(19) United States
(12) Patent Application Publication
(10) Pub. No.: US 2025/0051733 A1
(43) Pub. Date: Feb. 13, 2025

(54) Method of Generating Phage Clones with Expanded Activity

(71) Applicant: The Government of the United States, as Represented by the Director of the Defense Health Agency, Fort Detrick, MD (US)

(72) Inventors: Mikeljon P. NIKOLICH, Tacoma Park, MD (US); Kevin BURKE, Silver Spring, MD (US); Andrey A. FILIPPOV, Gaithersburg, MD (US)

(21) Appl. No.: 18/744,397

(22) Filed: Jun. 14, 2024

Related U.S. Application Data
(60) Provisional application No. 63/531,942, filed on Aug. 10, 2023.

(51) Int. Cl. C12N 7/00; A01N 63/40; A01P 1/00; A61K 35/76; A61P 31/04

(52) U.S. Cl. CPC C12N 7/00; A01N 63/40; A01P 1/00; A61K 35/76; A61P 31/04; C12N 2795/10031; C12N 2795/10032; C12N 2795/10051

(57) ABSTRACT

The utility of directed-in vitro evolution of phages in a phage cocktail, i.e., phage training, using panels of multidrug resistant strains of P. aeruginosa or K. pneumoniae was demonstrated effective for the development of phages having broader host ranges of MDR P. aeruginosa or K. pneumoniae. The phage clones obtained by this method have lytic activity against more host strains than their parental phages. Sequencing results of the trained phages showed significant genetic changes from the parental phages. Some trained phages having lytic activity in an expanded range of MDR bacterial strains was proved to be stable, indicating the genetic changes that accumulated were not readily reversible. One of the phage clones showing host range stability was selected and incorporated into a previously used phage cocktail. The new phage cocktail provided improved therapeutic efficacy in a mouse model of wound infection. Taken together, these results show the utility of in vitro phage training in the development of more efficacious phage therapeutics to target the critical drug-resistant pathogens P. aeruginosa as well as K. pneumoniae. Based on these results, a new method for phage training and pharmaceutical composition comprising one of the trained phages is suggested.

### GOVERNMENT FUNDING SUPPORT

[0001] This invention was made with government support under grant no. W0350_20_WR, awarded by the Military Infectious Diseases Research Program and previous awards from the same program. The government has certain rights in the invention.

### REFERENCE TO ELECTRONIC SEQUENCE LISTING

[0002] The application contains a Sequence Listing which has been submitted electronically in .XML format and is hereby incorporated by reference in its entirety. Said .XML copy, created on Jun. 14, 2024, is named “15969044US0_seq_listing.xml” and is 3,481,280 bytes in size. The sequence listing contained in this .XML file is part of the specification and is hereby incorporated by reference herein in its entirety.

### BACKGROUND

### 1. Field of the Invention

[0003] The invention relates to the general field of phage treatment for multidrug resistant (MDR) bacteria, and in particular to a method to generate phages with expanded activity and a pharmaceutical composition comprising at least one thereof for therapeutic treatment of MDR Pseudomonas aeruginosa and Klebsiella pneumoniae.

### 2. Background of the Invention

[0004] As antibiotic resistance continues to spread, multidrug-resistant (MDR), extensively drug-resistant (XDR) and pandrug-resistant (PDR) bacterial infections present a growing and serious global concern. Multidrug-resistant bacteria pathogens, especially the ESKAPEE group (gram-positive Enterococcus faecium and Staphylococcus aureus, and gram-negative Klebsiella pneumoniae, Acinetobacter baumannii, Pseudomonas aeruginosa, Enterobacter spp. and Escherichia coli), are responsible for over 10,000,000 infections a year worldwide and roughly 2.5 million deaths because of their high virulence and antibiotic resistance, and thus clinicians will be increasingly challenged to provide effective antibacterial treatments to patients suffering from.

[0005] MDR gram-negative bacteria present acute threats as they are spreading throughout the world and cause especially difficult-to-treat infections, with antibiotics losing efficacy.

[0006] Specifically, these pathogens are a significant challenge for wounded warfighters because they are found in mono- or polymicrobial combat wound infections, and the current antibiotic pipeline lacks new drugs with activity against these bacterial species. K. pneumoniae and P. aeruginosa are among the most prevalent gram-negative pathogens isolated from injured soldiers during Operation Iraqi Freedom and Operation Enduring Freedom, highlighting the need for novel therapeutics to serve the warfighter.

[0007] Considering the difficulty in finding a new compound showing antibiotic effects against a specific bacterial strain as well as drug developing cost and clinical safety concern thereof, phage therapy presents a powerful tool to supplement or possibly replace failing antibiotics for the treatment of these MDR infections since phages offer attractive characteristics for therapeutics, including replication at the site of infection, often capable of targeting difficult-to-reach places like biofilms, and minimal off-target killing because of the high strain specificity of most phages.

[0008] Phage therapy has great potential as an effective approach for treating drug-resistant bacteria. Bacteria and their phages have been evolving together for billions of years, and although bacteria can become resistant to phages, the phages can also evolve to overcome the resistance and infect the bacteria, which gives advantages over antibiotics. For successful phage therapy, it is necessary to continually isolate new phages that can overcome phage resistance of refractory bacterial strains. Although phages with such capability can be isolated from the environment, e.g., sea- and fresh water, sewage, or patient samples, it is not always possible or efficient to isolate phages with the clinical relevance.

[0009] There is another problem to be solved. An intrinsic property of phages is their specificity, which is beneficial to minimize the disruption of normal microflora. However, such tight specificity makes it difficult to develop phages with broad antibacterial spectra for durable, off-the-shelf phage cocktail therapeutics.

### SUMMARY OF THE INVENTION

[0010] One approach is to prepare a phage cocktail that comprises various phages targeting a broad range of pathogenic bacteria. When phages in a phage cocktail encounter a pathogen that is refractory to phage infection, a new phage that can infect the resistant bacteria is generated by using a directed in vitro evolution approach (the Appelmans protocol). In a phage cocktail according to the “Appelmans protocol”, one or more phages adapt to overcome phage resistance of a bacterium (“phage training”), which might be explained by genetic mechanisms, spontaneous mutations as well as genetic recombination between phages. Using this approach, it is possible to develop phage clones with broader host ranges against a panel of global, diverse MDR clinical strains such as ESKAPEE pathogens.

[0011] Here it is disclosed to employ directed evolution in vitro to generate phage variants with broader host ranges for improved therapeutic cocktails for the goal of obtaining phages having broader host ranges for the development or improvement of therapeutic phage cocktails. For that purpose, a directed in vitro evolution approach (the Appelmans protocol) was employed to develop Pseudomonas phages as well as Klebsiella phages against panels of global, diverse MDR clinical strains.

[0012] In this disclosure, it is demonstrated that a directed in vitro evolution approach can yield phages with expanded or altered host ranges. Such phage clones with an expanded host range can provide powerful additions to a therapeutic phage cocktail design by reducing the number of phages required for a broad host range of bacterial strains, in a currently available phage cocktail, which provides better activity directed at phage-resistant strains. Using this method, phages trained, i.e., evolved against P. aeruginosa or K. pneumoniae, were obtained, 4 as Pseudomonas phages and 3 Klebsiella phages.

[0013] Then, the phage clones with expanded host ranges were isolated and characterized. Sequence analysis identified single nucleotide polymorphisms (SNPs) and areas of recombination in the evolved phage clones relative to parental phages.

[0014] The ability of phages to cause bacterial lysis in expanded host range strains was stably maintained for some phages. Among them, Pseudomonas phage 20176 4-2 was selected because it was one of the trained phages with stably expanded host range and compatibility with top performing phages. A Pseudomonas phage cocktail previously developed, WRAIR_PAM3, covers 83% of a 100-strain diversity panel, and a Klebsiella cocktail, KPM1, covers only 50% of a 100-strain diversity panel. The selected phage clone, 20176-4-2, replaced two phages in the 6-phage cocktail WRAIR_PAM3 to make a 5-phage cocktail WRAIR_PAM3T. This replacement expanded the cocktail activity to 85%, reduced the number of cocktail components (which simplifies cocktail manufacturing), added a phage binding to a different bacterial receptor (which is important to reduce phage resistance) and improved antibacterial therapeutic efficacy in a mouse model of wound infection.

[0015] Based on this discovery, here is provided a new method for phage training employing a directed in vitro evolution and pharmaceutical compositions comprising the phages obtained using said method.

### BRIEF DESCRIPTION OF THE DRAWINGS

[0016] FIG. 1 shows the basic steps of the Appelmans protocol.

[0017] FIG. 2 is a flowchart showing the phage training protocol used in this disclosure from start to finish. (a) Pooled lysates were filter-sterilized and then used to seed plates for the next round of training. Lysates were checked on agar plates every five rounds to check for plaque formation. Following isolation and purification of trained phage clones, the stability of host range expansion was assessed via serial propagation against a single permissive host. (b) Illustration of the method for testing stability of host range expansion maintained after phage training. Phage clones were propagated on a phage-permissive host, and five serial propagations were conducted. The host range of passaged phage clones isolated from the collected plaques were compared with the parental phages.

[0018] FIG. 3 shows plaque morphology of isolated phages using KB-Pa (Pseudomonas phage training panel) and KB-Kp (Klebsiella phage training panel), following purification from their respective isolation host strains (MRSN20176, MRSN15882, and MRSN27989). The phages displayed lytic activity of 2+ or 3+ and displayed ‘pinprick’ to small plaque sizes (0.5-2 mm).

[0019] FIG. 4 shows lytic profiles of KB-Pa (Pseudomonas phage training panel)-evolved P. aeruginosa phage clones isolated from training strain MRSN20176 compared with parental phages. (a) Lysis scoring reflects the quality of plaque formation when plated against 100 P. aeruginosa strains in a global diversity panel [Lebreton F, Snesrud E, Hall L, Mills E, Galac M, Stam J, Ong A, Maybank R, Kwak Y I, Johnson S, Julius M, Ly M, Swierczewski B, Waterman P E, Hinkle M, Jones A, Lesho E, Bennett J W, McGann P. A panel of diverse Pseudomonas aeruginosa clinical isolates for research and development. JAC Antimicrob Resist. 2021 Dec. 10; 3(4):dlab179. doi: 10.1093/jacamr/dlab179. PMID: 34909689; PMCID: PMC8664536]. Host range coverage was determined by replicative lysis (2+ activity and higher); expansion was determined relative to the best performing parental phage, KEN1. (b) Parental phages and trained phage clones tested with lytic activity.

[0020] FIG. 5 shows lytic profile of KB-Kp (Klebsiella phage training panel)-evolved K. pneumoniae phage clones isolated from strain MRSN15882 and MRSN27989 compared with their parental phages. (a) Lysis scoring reflects quality of lysis when tested against 100 K. pneumoniae strains in a global diversity panel (Lebreton et al.). Host range coverage was determined by replicative lysis (2+ activity and higher), and expansion was determined relative to the best performing parental phage, KEN39. (b) Parental phages and trained phage clones tested with lytic activity.

[0021] FIG. 6(a) shows lytic profiles of clones collected following stability testing of the top performing evolved clones. Stability of host range expansion was observed for phage clones collected from MRSN20176, with clones derived from phage 20176-4 gaining coverage, and clones derived from phages 20176-5, phage clones 20176-6-2, 20176-6-3, 20176-7-2, and 20176-7-3 retaining their expanded host range. FIG. 6(b) is the list of tested Pseudomonas phage clones.

[0022] FIG. 7 shows that clone 20176-4-2 robustly kills infection/challenge strains of P. aeruginosa. (a) Lytic effect comparison of phage clone 20176-4-2 on PAO1 and PAO1::lux strains. (b) Phage clone 20176-4-2 is better at inhibiting PAO1::lux growth than each of three parental phages (KEN1, KEN10, and AFR43)

[0023] FIG. 8 shows timeline of an animal experiment in a mouse dorsal wound infection model.

[0024] FIG. 9 shows therapeutic effect of PAM3T treatment in a mouse wound infection model. Phage cocktail PAM3T compared with antibiotic treatment (CAZ BID: 410 mg/kg ceftazidime) reduced bacterial luminescence in wounds. The most rapid and robust antibacterial effect was observed for the phage cocktail PAM3T and antibiotic combo-treated group.

[0025] FIG. 10 summarizes the therapeutic effect of PAM3T treatment in a mouse wound infection model of FIG. 9 in graphs. (a) mouse survival rates, (b) wound healing (mean time to wound closure). (c) table with mean time to wound closure data.

[0026] FIG. 11 shows the result of Appleman training round by round in MDR P. aeruginosa strains.

### DETAILED DESCRIPTION

[0027] In the Summary above, in the Detailed Description, and the claims below, as well as the accompanying figures, reference is made to particular features of the invention. It is to be understood that the disclosure of the invention in this specification includes all possible combinations of such particular features. For example, where a particular feature is disclosed in the context of a particular embodiment or embodiment of the invention, or a particular claim, that feature can also be used, to the extent possible, in combination with and/or in the context of other particular embodiments and embodiments of the invention, and in the invention generally. For the purposes of explanation, numerous specific details are set forth in order to provide a thorough understanding of the present disclosure. It will be apparent, however, to one skilled in the art that the present invention may be practiced without these specific details.

### A. Definitions

[0028] Embodiments of materials and methods are described herein; any methods and materials similar or equivalent to those described herein can be used in the practice of or testing of the invention. Unless defined otherwise, all technical and scientific terms herein have the same meaning as commonly understood by one of ordinary skill in the art to which the invention pertains. In describing and claiming the present invention, the following terminology will be used.

[0029] It is also to be understood that the terminology used herein is for the purpose of describing particular embodiments only, and it is not intended to be limiting.

[0030] As used herein and in the appended claims, the singular forms “a,” “an,” and “the” include plural references unless specifically stated otherwise.

[0031] Other than in the operating examples, or where otherwise indicated, all numbers expressing quantities of ingredients or reaction conditions used herein should be understood as modified in all instances by the term “about.” The term “about” generally refers to a range of numbers that one of skill in the art would consider equivalent to the recited value (i.e., having the same function or result). In a specific embodiment, the term “about” includes a stated numerical value as well as a value that is +/−15% of the stated numerical value. For example, about 5.75 M includes 5.75 molar as well as 6.61 M and 4.89 M, and all 1/10 values in between. In many instances, the term “about” may include numbers that are rounded to the nearest significant figure.

[0032] As used herein, the term “bacteriophage” refers to bacterial viruses with a DNA or RNA genome, which is usually protected by a membrane or protein shell (capsid), and long (contractile or non-contractile) or short non-contractile tail with fibers responsible for binding to a bacterial cell. Bacteriophages infect bacteria either to replicate to large numbers and cause the cell to lyse (lytic infection) or, in some cases, to integrate into the bacterial genome without killing the host bacteria (lysogenic infection). In the lytic infection, viral DNA and proteins are rapidly synthesized and packaged into virus particles, leading to the lysis (destruction) of the host bacteria and then sudden release of progeny virus particles (virions). In contrast, in the lysogenic infection, the phage DNA is inserted into the host bacterial chromosome (prophage state), replicated together with bacterial chromosome, and transmitted to daughter cells. Lysogeny can sometimes significantly affect the host (lysogenic conversion). Under certain conditions causing DNA damages, the prophage is excised and initiates a lytic cycle, leading to the formation of progeny viruses and lysis of the host. (Fortier L C, Sekulovic O. Importance of prophages to evolution and virulence of bacterial pathogens. Virulence. 2013 Jul. 1; 4(5):354-65.) As used herein, the term “lytic activity” refers to phage activity leading to cell lysis of a target bacteria as determined by a plaque assay.

[0033] As used herein, the term “plaque assay” refers to phage titration, which is a process for isolation of phage clones and quantitation of the number of viable phage particles in a sample, which is presented as plaque-forming units (pfu) per unit volume, indicating active phage particle numbers in a unit volume of a phage suspension. For plaque assay, 10-fold serial dilutions of a phage sample are carried out through 10⁻¹⁰, depending on the phage titer; mixing each 10-fold serial dilution of the phage sample with aliquots of phage-sensitive bacteria suspended in bacterial culture medium; incubating the mixture of phage and bacteria for 10 minutes to allow for adsorption (attachment) of the phage to the bacteria; preparing tubes containing top agar (0.7% agar in bacterial culture medium) warmed at the 47° C. water bath; adding certain volume of phage and bacteria mixture (usually 100 μL) into a top agar tube, carefully mixing, pouring onto the appropriately labeled bottom agar plate (1.5% agar in bacterial culture medium), one plate for each phage dilution; allowing the top agar to solidify (about 5-10 minutes); and inverting the plates and incubating the plates at 37° C. Phage-infected and lysed bacteria release phages that infect and lyse the surrounding bacteria in the top layer, and multiple rounds of infection and lysis continue until the area of the infected bacteria on the plate is cleared, which appears as individual holes, or plaques, in an otherwise confluent bacterial lawn. Since each plaque is caused by a single viable phage when there are much less phages than bacteria, counting the number of plaques can be assumed as the number of plaque-forming units in the original suspension.

[0034] In the specification, the term “phage cocktail” means a phage mixture comprising two or more phages of the invention, or variants or progeny thereof, each of which have been isolated from the environment from which they were originally found or have been produced by means of a technical process such as genetic engineering or serial passage techniques.

[0035] As used herein, the term “plaque isolation” refers to recovering one single plaque with e.g., an Eppendorf tip and subsequently suspending it in a small volume (e.g., 500 μL or 1.5 mL in a tube) of phage buffer, with subsequent chloroform treatment or ultrafiltration to remove live and dead bacterial cells. This can be applied to a small volume (few mL) bacterial culture or spread on the surface of a host agar plate for bacterial lysis.

[0036] As used herein, the term “phage propagation” refers to amplifying phages by starting from a single plaque, from phage suspension, or floating agar in a plate that has confluent lysis. Bacterial lysis can be done in a liquid bacterial host culture or on a plate by using the double agar layer technique with top and bottom agar. When using a plate for bacterial lysis by phages, the bottom agar has usual agar concentration (1-1.5%) containing culture nutrients for the host; the top layer has the agar concentration (0.3% to 0.75%) containing the host bacteria mixed in this “soft agar” to form a homogenous thin layer of bacterial lawn. The phages can be dropped onto the top layer or added already into the melted soft agar cooled to 47° C. Then, the plate is incubated by shaking carefully on a plate shaker for few hours. The soft agar layer with confluent lysis is scraped off, centrifuged for removing agar and bacterial cell debris. The supernatant is filtered through a 0.45 m filter, and then through a 0.2 m filter to get a phage stock solution. When using liquid bacterial culture for bacterial lysis, the phages are added to the bacterial culture of a log phase OD₆₀₀ being cultured in a shaking incubator at 37° C., letting the bacteria and phages grow together until lysis occurs, i.e., the culture media becomes almost clear or transparent. This process needs to be observed because some phage-resistant bacterial cells may overgrow and make the culture turbid again. (www.dsmz.de/fileadmin/user_upload/Collection_allg/DSMZ_Cultivation_of_Phages.pdf) As used herein, the term “antibiotics” refers to antimicrobial substance active against bacteria for the treatment of bacterial infections, which usually either kill or inhibit the growth of bacteria. General antibiotics can be classified into to: (1) bacterial cell wall or membrane synthesis inhibitors, e.g., penicillins and cephalosporins; (2) protein synthesis inhibitors (e.g., macrolides, tetracyclins); and (3) DNA synthesis inhibitors (e.g., fluoroquinolones gyrase inhibitors and sulfa antibiotics inhibiting bacterial folic acid synthesis). Standard or traditional antibiotic agents include, but are not limited to: (1) cell wall or membrane synthesis inhibitor antibiotics, e.g., penicillins or beta-lactam compounds: pencillins (e.g., penicillin G, penicillin V, isoxazolyl penicillins, oxacillin, cloxacillin, flucloxacillin, dicloxacillin, nafcillin, methicillin, ampicillin, amoxicillin, piperacillin, ticarcillin, carbenicillin, aminopenicillins, carboxypenicillins, ureidopenicillins, temocillin, azlocillin, mezlocillin, mecillinam); cephalosporins and cephamycin: (e.g., cefazolin, cephalexin, cephradine, cefadroxil, cefuroxime, cefaclor, cefamandole, cefonicid, cefprozil, ceforanid, cefoxitin, cefmetazole, cefotetan, cefoperazone, cefotaxime, ceftazidime, ceftriaxone, cefepime, ceftaroline fosamil, cephalothin, cephapirin, cefpodoxime, ceftibuten, cefdinir, ceftizoxime, ceftriaxone, cefepime, cefditoren, cefixime, ceftibuten, cefacetrile, cefaloglycin, cefalonium, cefaloridine, cefatrizine, cefazaflur, cefazedone, cefroxadine, ceftezole, cefuzonam, cefcapene, cefdaloxime, cefdinir, cefditoren, cefetamet pivoxil, cefmenoxime, cefteram, ceftiofur, cefoperazone, ceftazidime latamoxef, cefclidine, cefluprenam, cefoselis, cefozopran, cefpirome, cefquinome, ceftobiprole, flomoxef (or oxa-1-cephamycin), ceftobiprole); carbacephems (e.g., loracarbef); carbapenems (e.g., biapenem, doripenem, ertapenem, imipenem, imipenem-cilastatin, meropenem, tebipenem pivoxil, faropenem, panipenem/betamipron, razupenem (PTZ-601), thienpenem (thienamycin)); monobactams (e.g., aztreonam, tigemonam, nocardicin A, or tabtoxinine β-lactam); beta-lactamase inhibitors (e.g., clavulanic acid, sulbactam, tazobactam); glycopeptides (e.g., vancomycin, teicoplanin); lipoglycopeptide (e.g. oritavancin, dalbavancin and telavancin); daptomycin, fosfomycin, bacitracin, cycloseine, isoniazid; polypeptide antibiotics (e.g., polymyxin B, or polymyxin E (colistin)); (2) antibiotics targeting bacterial ribosome subunits, the 30S and the 50S subunits; dactinomycin (or actinomycin D), chloramphenicol; tetracyclines (e.g., tetracycline, chlortetracycline, doxycycline, oxytetracycline, demeclocycline, lymecycline, meclocycline, methacycline, minocycline, rolitetracycline, or tigecycline); macrolides (e.g., erythromycin, clarithromycin, azithromycin, fidaxomicin, telithromycin, carbomycin A, josamycin, kitasamycin, midecamycin/midecamycin acetate, oleandomycin, solithromycin, spiramycin, troleandomycin, tylosin, or roxithromycin, dirithromycin, roxithromycin); aminoglycosides: (e.g., streptomycin, rhodostreptomycin, kanamycin, neomycin, amikacin, gentamicin, netilmicin, tobramycin, paromycin, apramycin) apramycin, plazomicin, arbekacin, and streptomycin); lincosamides (e.g., lincomycin, pirlimycin and clindamycin); ansamycins: geldanamycin, naphthomycin, rifamycins (e.g., rifampicin (or rifampin), rifabutin, rifapentine, rifalazil, or rifaximin); quinupristin-dalfopristin, mupirocin, streptogramins (e.g., streptogramin A, streptogramin B), oxazolidinones (e.g., linezolid, tedizolid), spectinomycin; (3) DNA replication inhibitor antibiotics: fluoroquinolones and quinolones (e.g., nalidixic acid, norfloxacin, ciprofloxacin, levofloxacin, gatifloxacin, moxifloxacin, gemifloxacin, lomefloxacin, ofloxacin, pefloxacin, moxifloxacin, rosoxacin, enoxacin, fleroxacin, nadifloxacin, rufloxacin, balofloxacin, grepafloxacin, pazufloxacin, sparfloxacin, temafloxacin, tosufloxacin, clinafloxacin, garenoxacin, stifloxacin, trovafloxacin, prulifloxacin, cinoxacin, flumequine, oxolinic acid, piromidic acid, pipemidic acid); sulfonamide antibiotics (e.g., sulfacytine, sulfisoxazole, sulfamethizole, sulfadiazine, silver sulfadiazine, sulfamethoxazole, sulphapyridine, sulfadoxine, sulfathalidine, sulfacetamide sodium, mafenide, co-trimoxazole, sulfasalazine, sulfanilamides, sultiame, sulfadimethoxine; pyrimidines (e.g., trimethoprim, pyrimethamine, and more than 200 drugs; https://go.drugbank.com/categories/DBCAT000349); others (pyrazinamide, ethambutol, streptomycin, ansamitocin); and any combination thereof can be used.

[0037] As used herein, the term “multidrug resistance” refers to antibacterial resistance which happens when bacteria develop the ability to defeat the drugs designed to kill them. That means bacteria are not killed and continue to grow. CDC typically uses this term to refer to an isolate that is resistant to at least one antibiotic in three or more antibiotics classes. Multidrug resistance mechanisms fall into four main categories: (1) limiting uptake of a drug; (2) modifying a drug target; (3) inactivating a drug; (4) active drug efflux. There are two main ways that bacterial cells can acquire antibiotic resistance. One is through mutations that occur in the DNA of the cell during replication. The other way that bacteria acquire resistance is through horizontal gene transfer through plasmids or transposons coding for resistance to a specific agent. Examples of bacteria resistant to antibiotics are methicillin-resistant Staphylococcus aureus (MRSA), vancomycin-resistant Enterococcus (VRE), multi-drug-resistant Mycobacterium tuberculosis (MDR-TB) and carbapenem-resistant Enterobacteriaceae (CRE) gut bacteria. Generally, MDR is defined as non-susceptibility to ≥1 agent in ≥3 antimicrobial categories, extensively drug-resistant (XDR) as non-susceptibility to ≥1 agent in all but ≤2 categories, and pandrug-resistant (PDR) as non-susceptibility to all antimicrobial agents listed. (Magiorakos A P et al., Multidrug-resistant, extensively drug-resistant and pandrug-resistant bacteria: an international expert proposal for interim standard definitions for acquired resistance. Clin Microbiol Infect. 2012 March; 18(3):268-81.) As used herein, the term “subject” or “patient” encompasses the whole phyla of animal kingdom, including Arthropoda, Mollusca, Chordata, for example, crab, lobster, shrimp, squid, oysters, clams, mussels, or other shellfish, eel, fishes, amphibians, reptiles, birds, and mammals that include domestic-, farm-, zoo- and wild animals, primates, and humans, who may be suffering from P. aeruginosa or K. pneumoniae infection, particularly an infection caused by non-MDR or MDR P. aeruginosa or K. pneumoniae strains in the lung, urogenital organ, skin or blood stream. For example, the subject has P. aeruginosa or K. pneumoniae infection after lung transplant or is suffering from pneumonia, cystic fibrosis, bronchiectasis, bladder infection (cystitis), kidney infection (pyelonephritis), skin infection (cellulitis, burn wounds), and/or sepsis. In addition, the subject may include mushrooms, algae, or plants that can be infected with non-MDR or MDR P. aeruginosa or K. pneumoniae strains.

[0038] As used herein, the term “treatment” in the context of pharmacological or medical meaning refers to intervention of disease, disorder, condition or symptoms to obtain a desired physiologic effect. “Treatment” includes: inhibiting the disease, disorder, condition, or symptoms thereof, such as, arresting its development or progression, and also includes relieving, alleviating, or ameliorating the disease, disorder, condition, or reducing one or more symptoms thereof, such as, for example, reducing infection.

[0039] As used herein, the term “administering” refers to introducing an agent to a subject, and can be performed using any of the various methods for drug or composition delivery known to those skilled in the art. Routes of administering include, but are not limited to oral administration, parenteral administration (subcutaneous (SC/SQ: <1 mL), intravenous (IV: 1-20 mL), intradermal (ID: <0.2 mL), intramuscular (IM: <4 mL), intraperitoneal (IP), intraarterial, intracardiac, intraarticular, and intraspinal injection), rectal administration by way of suppositories or enema, local/topical administration directly into or onto a target tissue, nasal administration (nebulizer, nasal spray, inhalation), or administration by any route or method that delivers a therapeutically effective amount of the drug or composition to the cells or tissue to which it is targeted.

[0040] As used herein, the term “therapeutically effective amount” refers to an amount effective, at dosages and for periods of time necessary, to achieve the desired therapeutic results. A therapeutically effective amount is also one in which any toxic or detrimental effects of compounds of the invention are outweighed by the therapeutically beneficial effects.

[0041] As used herein, the term “composition” refers to a pharmaceutical composition, meaning a mixture of substances suitable for administering to an individual, which includes one or more pharmaceutically active ingredients. For example, a pharmaceutical composition may comprise a certain amount of phage particles in solution or lyophilized dry powder as well as suitable pharmaceutical excipients.

[0042] As used herein, the term “excipient”, in the context of pharmaceuticals, refers to any substances other than the active ingredient or agent, contained in pharmaceutical dosage forms. The excipients are considered as inert substances, i.e., they do not have any active role in therapeutics, but they can be used to support the process to produce an effective product. Examples of excipients are active pharmaceutical ingredient excipients, binder excipients, capsule shell excipients, carrier excipients, coating systems excipients, controlled release excipients, diluent excipients, disintegrant excipients, effervescent system excipients, emulsifier excipients, film former excipients, flavor excipients, high-functionality excipients, lipid excipients, lubricant excipients, modified release excipients, penetration enhancer excipients, permeation enhancer excipients, pH modifier excipients, plasticizer excipients, preservative excipients, sachet filling excipients, solubilizer excipients. solvent excipients, surfactant excipients, sustained release excipients, taste masking excipients, thickener excipients, viscosity modifier excipients, blending excipients, filler excipients, compaction excipients, direct compression excipients, dry granulation excipients, hot melt extrusion excipients, wet granulation excipients, rapid release agent excipients, film formation excipients, increased bioavailability excipients, dispersion excipients, solubility enhancement excipients, stabilizer excipients, capsule filling excipients, powder blends excipients, tablet compressibility excipients, etc. (https://www.americanpharmaceuticalreview.com/25335-Pharmaceutical-Raw-Materials-and-APIs/25283-Pharmaceutical-Excipients/) As used herein, the term “dosage” refers to the administering of a specific amount, number, and frequency of doses over a specified period of time, and the term “dose” refers to a specified amount of medication taken at one time. A “dosage regimen” refers to the number of doses of a drug, medication, or an agent that a patient is supposed to take (or to be administered) over a specified period of time, and the individual doses that comprise the regimen are usually scheduled.

[0043] As used herein, the term “dosage form” refers to a pharmaceutical preparation in which a specific mixture of active ingredients of a drug and inactive components (excipients) are formulated in a particular shape or form to facilitated administration and accurate delivery of active ingredients, and/or to be presented in the market. Solid dosage forms include powders, granules, capsules, tablets, cachets, pills, lozenges, gummies, suppositories. Semi-solid dosage forms include ointment, creams, paste, gels, poultices. Liquid dosage forms include collodions, droughts, elixirs, emulsions, suspension, enemas, gargles, linctuses, lotion, liniments, mouth washes, nasal drop, paints, solutions, syrups. Gaseous dosage forms include aerosols, inhalations, and sprays. (https://thepharmapedia.com/pharmaceutical-dosage-form-pharmaceutics/pharmacy-notes/)

[0044] As used herein, the terms “administer” and “administration,” when used with respect to a drug or an agent (including antibodies and antibiotics), means providing the drug or agent to a subject using any of the various methods or delivery systems for pharmaceutical compositions known to those skilled in the art. For example, the administration of the drug can be oral, nasal, parental, topical, ophthalmic, or transdermal delivery of the drug in the form of solid, semi-solid, lyophilized powder, or liquid dosage forms.

[0045] As used herein, the terms “co-administration” refers to the administration of a first active agent before, concurrently, or after the administration of a second active agent such that the biological effects of the two (or more) agents overlap.

[0046] As used herein, the term “nucleic acid” refers to any polyribonucleotide or polydeoxyribonucleotide that may be unmodified RNA or DNA or modified RNA or DNA. Thus, for instance, nucleic acid as used herein refers to, among others, single- and double-stranded DNA, DNA that is a mixture of single- and double-stranded regions, single- and double-stranded RNA, and RNA that is mixture of single- and double-stranded regions, hybrid molecules comprising DNA and RNA that may be single-stranded or double-stranded, or a mixture of single- and double-stranded regions.

[0047] As used herein, “sequence identity” or “identity” in the context of two nucleic acid- or polypeptide sequences refers to the residues in the two sequences that are the same when aligned for maximum correspondence over a specified comparison window. When percentage of sequence identity is used in reference to proteins it is recognized that residue positions which are not identical often differ by conservative amino acid substitutions, where amino acid residues are substituted for other amino acid residues with similar chemical properties (e.g., charge or hydrophobicity) and therefore do not change the functional properties of the molecule. When sequences differ in conservative substitutions, the percent sequence identity may be adjusted upwards to correct for the conservative nature of the substitution. Sequences that differ by such conservative substitutions are said to have “sequence similarity” or “similarity”. Means for making this adjustment are well known to those of skill in the art. Typically, this involves scoring a conservative substitution as a partial rather than a full mismatch, thereby increasing the percentage sequence identity. Thus, for example, where an identical amino acid is given a score of one and a non-conservative substitution is given a score of zero, a conservative substitution is given a score between zero and one. The scoring of conservative substitutions is calculated, e.g., as implemented in the program PC/GENE (Intelligenetics, Mountain View, Calif.).

### B. Overview

[0048] Phages are potentially powerful therapies for drug-resistant bacterial infections. The high specificity of phages makes it complicated to develop phage therapeutics. In certain embodiments, directed evolution (e.g., Appelmans protocol) was used to generate phages with expanded host ranges.

[0049] As used herein, the term “Appelmans protocol” refers to an empirical liquid method of phage titration developed in the 1920s by Appelmans, whose working mechanism(s) has not been clarified. (Appelmans, R. Le dosage du Bacteriophage. Compt. Rend. Soc. Biol. 1921, 85, 1098; Chanishvili, N. & Sharp, R. Eliava Institute of Bacteriophage, Microbiology and Virology, Tbilisi, Georgia. A Literature Review of the Practical Application of Bacteriophage Research; Eliava Foundation: Tbilisi, Georgia, 2009; and Burrowes B H, Molineux I J, Fralick J A. Directed in Vitro Evolution of Therapeutic Bacteriophages: The Appelmans Protocol. Viruses. 2019 Mar. 11; 11(3):241).

[0050] In certain embodiments, a method utilizing phage evolution in vitro to generate therapeutic phages having expanded lytic host ranges is provided. Briefly, phages, which belong to the same genus but are complement to each other in their antibacterial/lytic activity, are selected and mixed to make a phage cocktail. The phage cocktail is repeatedly grown on a set of bacterial strains, including both phage-resistant and phage-susceptible host bacteria in multiple rounds (“training”) until the phages in the cocktail have evolved so as to lyse the phage-resistant strains. Phage clones showing lytic activity in an expanded host range are collected and purified, and then their DNA is isolated, sequenced and compared with control/parent phages (“untrained”).

[0051] As a proof-of-principle experiment aimed at examining the mechanism of host-range expansion, a 96-well plate format Appelmans protocol was designed, using a 3-phage cocktail against P. aeruginosa and 4-phage cocktail against K. pneumoniae. The selected phages belong to the same genus, respectively, but are complement to each other in their antibacterial activity. For phage training, a panel suite comprising MDR 17 clinical isolates and one phage susceptible strain of P. aeruginosa and a panel suite comprising 10 MDR strains and one phage susceptible strain of K. pneumoniae were prepared. The phages are incubated with both phage-resistant and phage-susceptible host bacteria through multiple rounds.

[0052] After several (e.g. 3-20) rounds of selection, individual phages were isolated that could grow on a pan-resistant strain for each bacterial species. Next, the selected phages were tested with 100 globally diverse strains of the bacteria, and clones with extended activity were collected, and purified.

[0053] Then, phage DNA is isolated, sequenced and compared with “parent” phages. These phage clones clearly differ from natural phages. Sequence analysis demonstrated SNPs and recombination events occurred in predicted tail fiber genes, which is the area for recognition of the host bacteria, and this likely drove host range expansion, Generally, phage tails are composed of repetitive protein subunits that form a rod-like structure with a globular domain at the distal end, and the structure, number of subunits, and location of the tail fibers differ among the phage classes. (Filik K, et al., Bacteriophage Tail Proteins as a Tool for Bacterial Pathogen Recognition-A Literature Review. Antibiotics (Basel). 2022 Apr. 21; 11(5):555) After stability test, one of the best phage clones with stable expanded activity was selected and used in therapeutic cocktails. One “trained” phage clone, 20176-4-2, replaced two phages in 6-phage cocktail PAM3. The new 5-phage cocktail PAM3T has broader activity, more diverse components and easier to manufacture. Therapeutic effect of PAM3T treatment was tested in a mouse wound infection model. When phage cocktail PAM3T was compared with antibiotic, it was more effective in reducing bacterial infection in wounds. The most rapid and robust antibacterial effect was observed for the combo-treated group.

[0054] Phage training via the Appelmans protocol enabled host range expansion in phages targeting MDR bacterial strains. For some of the evolved P. aeruginosa phage clones, expansion in host range coverage was stable even after passages on a single permissive host. These phages show promise as possible therapeutic candidates.

[0055] As disclosed herein, it was demonstrated that this approach works both for Pseudomonas aeruginosa and Klebsiella pneumoniae phages. The approach works well on two genera of P. aeruginosa podophages, Bruynoghevirus and Phikmvvirus (data not shown), as well as myophages of K. pneumoniae (genus Jiaodavirus), thus showing that recombination-stimulating approach works universally on any number of phages. In addition, it was demonstrated that a phage obtained via directed evolution can be incorporated in a therapeutic cocktail, significantly improving it (reducing the number of components, expanding activity and increasing phage diversity, which is important to address a problem of phage resistance)—this cocktail, PAM3T, showed the highest efficacy among all our P. aeruginosa phage cocktail iterations in a mouse wound infection model; and incorporation of a “trained” K. pneumoniae phage in a 5-phage cocktail expanded its activity from 50% to 81%.

[0056] In a publication by another group, a mix of three P. aeruginosa phages was used for the Appelmans protocol, two of which belonged to the same genus (Litunavirus), and a recombinant clone of these two with slight expansion of activity was isolated; proving the presence of a non-homologous phage did not help in recombination and selection of phage progeny with much improved properties.

[0057] The phages generated by in vitro directed evolution in a phage cocktail comprising 3-4 taxonomically similar phages as described herein have expanded host range and/or activity against previously phage resistant strains. The evolved phages can stably maintain changes in host range, and the selected “trained” phage as an example was efficacious as therapeutics in mixture with other phages. Accordingly, the method embodiments described herein can be used for “training” phages against various MDR strains of various bacterial species, e.g., ESKAPEE.

### C. Embodiment Examples

[0058] The Appelmans protocol is a method by which phages in a phage cocktail can expand their host range without addition of new genetic information, solely depending on in vitro evolution.

[0059] In some embodiments, a method of the modified protocol is employed for expanding the antibacterial activity of phages, wherein the method comprises steps of:
[0060] i. mixing taxonomically similar phages with complimentary lytic activity;
[0061] ii. passaging mixed phages against a panel of phage-resistant bacterial clinical isolates;
[0062] iii. pooling lysates from wells showing reduction in bacterial growth and using them to seed subsequent rounds;
[0063] iv. periodically checking for plaque formation on phage-resistant strains;
[0064] v. isolating and purifying phage clones, sequencing and re-assessing host range; and
[0065] vi. assessing stability via serial propagation against single strain and re-assessing host range.

[0066] In certain embodiments, the modified protocol is employed to generate phages against MDR strains of P. aeruginosa or Klebsiella pneumoniae, using panel sets of MDR strains of the bacteria.

[0067] For the experiments in this disclosure, a panel set of P. aeruginosa strains for phage training comprises MDR strains comprising MRSN 317, 552, 1388, 2144, 6220, 6678, 8130, 8136, 8914, 12427, 13488, 16344, 20176, 20193, 25678, 26263, and 358800, and PAO1, a phage-susceptible P. aeruginosa strain; and a panel set of K. pneumoniae strains for phage training comprises MDR strains comprising MRSN 4759, 6778, 15687, 15882, 22232, 27989, 479404, 511348, 614201, and 681054, and 414780, a phage-susceptible K. pneumoniae strain. However, since MDR strains of both bacteria are continuously generated somewhere in the world, the bacterial strains in the panel can further include any newly appeared MDR strains.

[0068] In this disclosure, as an example of a phage-susceptible P. aeruginosa, PAO1 strain was used for phage propagation, and as an example of a pan-phage resistant P. aeruginosa, MRSN 20176 strain was used for plaque selection. Also, as an example of a phage-susceptible K. pneumoniae, MRSN414780 strain was used, and as an example of a pan-phage resistant K. pneumoniae, MRSN 15882 was used. However, other strains can be contemplated for the same purpose.

[0069] In addition, this method can be applied to developing phages against other bacterial species, especially MDR strains of ESKAPEE bacteria (Enterococcus faecium, Staphylococcus aureus, Klebsiella pneumoniae, Acinetobacter baumannii, Pseudomonas aeruginosa, Enterobacter spp. and E. coli) using Enterococci phages, Staphylococci phages, Acinetobacter baumannii phages, Enterobacter phages, and E. coli phages.

[0070] In the following, the aforementioned method is described in more detail. The steps are:
[0071] i. selecting at least two genetically similar phages, which have complementary lytic activity against a bacterial species, and determining the titer of each phage;
[0072] ii. mixing the phages at about the same ratio of each phage titer to make a phage cocktail to yield an input cocktail of 1×10⁵-1×10²⁰ pfu/mL, and optionally about 1×10¹⁰ pfu/mL;
[0073] iii. adding a certain volume of 10-20 MDR strains and a phage-susceptible strain of a bacterial species, which are individually cultured overnight in the wells of a multi-well plate filled with a certain volume of bacterial culture media, in one strain per one column (or row) manner;
[0074] iv. performing a serial 10-fold dilution of the phage cocktail of step ii (10⁰ to 10⁻⁷ or to 10⁻¹¹) in bacterial culture media;
[0075] v. adding each of the serial 10-fold dilutions of step iv into a row (or a column) of the wells containing the bacterial culture of step iii;
[0076] vi. incubating the plate(s) with shaking, optionally at 37° C. overnight;
[0077] vii. pooling the lysate from the bacterial culture wells showing reduced bacterial growth or bacterial lysis;
[0078] viii. clearing the pooled lysates, optionally by vortex mixing with CHCl₃ and centrifugation;
[0079] ix. repeating steps iii to viii with the cleared lysate at least 10 rounds;
[0080] x. while performing step ix, periodically, optionally every 5 rounds, testing plaque forming activity with the cleared lysate, using a double-layered agar plate with a pan-phage-resistant strain lawn;
[0081] xi. after final round, collecting individual phage plaques from the double-layered agar plate of step x;
[0082] xii. performing steps iii to vii with each collected individual phages;
[0083] xiii. selecting phages showing expanded host range when compared with parent phages;
[0084] xiv. testing the selected phages against genetically diverse strain global diversity set;
[0085] xv. selecting phages from the phages of step xiv, which show expanded host range when compared with parent phages in step xiv;
[0086] xvi. isolating and purifying the phage particles, and sequencing their DNAs;
[0087] xvii. testing phage stability with at least three clones of the selected phages; by re-testing them against the strain global diversity set to assess host range.

[0088] In this disclosure, as a non-limiting example of phages, three phages of Phikmvvirus genus are selected for the development of phages against MDR P. aeruginosa strain; KEN1 (SEQ ID NO: 28), KEN10 (SEQ ID NO: 29), and AFR43 (SEQ ID NO: 27); and five phages of Jiaodavirus genus are selected for the development of phages against MDR K. pneumoniae strains; KEN22 (SEQ ID NO: 30), KEN25 (SEQ ID NO: 31), KEN25-2, KEN37 (SEQ ID NO: 32), and KEN39 (SEQ ID NO: 33). However, other phages of the same genus can be contemplated if those phages can infect P. aeruginosa (or K. pneumoniae). Further, phages of other genera can be contemplated if they can infect P. aeruginosa (or K. pneumoniae). Furthermore, mixing P. aeruginosa phages (or K. pneumoniae phages) from more than one genus can be contemplated if they have similar genomes and complementary lytic activity against the bacteria. The number of phages to be mixed needs to be at least two, and thus five or more numbers of phages can be contemplated, which may present better gene recombination opportunity.

[0089] Also disclosed herein, 26 novel phages having new recombination genes were created. The following is the list of those phages.
[0090] 1. A bacteriophage able to infect MDR strains of P. aeruginosa, wherein the phage is obtained according to claim 2, and wherein the phage comprises a nucleic acid sequence of SEQ ID NO:1 or a nucleic acid sequence of at least 89, 90, 95, or 97% sequence identity therewith, originated from phage plaque 20176-4.
[0091] 2. A bacteriophage able to infect MDR strains of P. aeruginosa, wherein the phage is obtained according to claim 2, and wherein the phage comprises a nucleic acid sequence of SEQ ID NO:2 or a nucleic acid sequence of at least 89, 90, 95, or 97% sequence identity therewith, originated from phage plaque 20176-4-1.
[0092] 3. A bacteriophage able to infect MDR strains of P. aeruginosa, wherein the phage is obtained according to claim 2, wherein the phage comprises a nucleic acid sequence of SEQ ID NO:3 or a nucleic acid sequence of at least 89, 90, 95, or 97% sequence identity therewith, originated from phage plaque 20176-4-2.
[0093] 4. A bacteriophage able to infect MDR strains of P. aeruginosa, wherein the phage is obtained according to claim 2, and wherein the phage comprises a nucleic acid sequence of SEQ ID NO:4 or a nucleic acid sequence of at least 89, 90, 95, or 97% sequence identity therewith, originated from phage plaque 20176-4-3.
[0094] 5. A bacteriophage able to infect MDR strains of P. aeruginosa, wherein the phage is obtained according to claim 2, and wherein the phage comprises a nucleic acid sequence of SEQ ID NO:5 or a nucleic acid sequence of at least 89, 90, 95, or 97% sequence identity therewith, originated from phage plaque 20176-5.
[0095] 6. A bacteriophage able to infect MDR strains of P. aeruginosa, wherein the phage is obtained according to claim 2, and wherein the phage comprises a nucleic acid sequence of SEQ ID NO:6 or a nucleic acid sequence of at least 89, 90, 95, or 97% sequence identity therewith, originated from phage plaque 20176-5-1.
[0096] 7. A bacteriophage able to infect MDR strains of P. aeruginosa, wherein the phage is obtained according to claim 2, and wherein the phage comprises a nucleic acid sequence of SEQ ID NO:7 or a nucleic acid sequence of at least 89, 90, 95, or 97% sequence identity therewith, originated from phage plaque 20176-5-2.
[0097] 8. A bacteriophage able to infect MDR strains of P. aeruginosa, wherein the phage is obtained according to claim 2, and wherein the phage comprises a nucleic acid sequence of SEQ ID NO:8 or a nucleic acid sequence of at least 89, 90, 95, or 97% sequence identity therewith, originated from phage plaque 20176-5-3.
[0098] 9. A bacteriophage able to infect MDR strains of P. aeruginosa, wherein the phage is obtained according to claim 2, and wherein the phage comprises a nucleic acid sequence of SEQ ID NO:9 or a nucleic acid sequence of at least 89, 90, 95, or 97% sequence identity therewith, originated from phage plaque 20176-6.
[0099] 10. A bacteriophage able to infect MDR strains of P. aeruginosa, wherein the phage is obtained according to claim 2, and wherein the phage comprises a nucleic acid sequence of SEQ ID NO:10 or a nucleic acid sequence of at least 89, 90, 95, or 97% sequence identity therewith, originated from phage plaque 20176-6-2.
[0100] 11. A bacteriophage able to infect MDR strains of P. aeruginosa, wherein the phage is obtained according to claim 2, and wherein the phage comprises a nucleic acid sequence of SEQ ID NO:11 or a nucleic acid sequence of at least 89, 90, 95, or 97% sequence identity therewith, originated from phage plaque 20176-6-3.
[0101] 12. A bacteriophage able to infect MDR strains of P. aeruginosa, wherein the phage is obtained according to claim 2, and wherein the phage comprises a nucleic acid sequence of SEQ ID NO:12 or a nucleic acid sequence of at least 89, 90, 95, or 97% sequence identity therewith, originated from phage plaque 20176-7.
[0102] 13. A bacteriophage able to infect MDR strains of P. aeruginosa, wherein the phage is obtained according to claim 2, and wherein the phage comprises a nucleic acid sequence of SEQ ID NO:13 or a nucleic acid sequence of at least 89, 90, 95, or 97% sequence identity therewith, originated from phage plaque 20176-7-2.
[0103] 14. A bacteriophage able to infect MDR strains of P. aeruginosa, wherein the phage is obtained according to claim 2, and wherein the phage comprises a nucleic acid sequence of SEQ ID NO:14 or a nucleic acid sequence of at least 89, 90, 95, or 97% sequence identity therewith, originated from phage plaque 20176-7-3.
[0104] 15. A bacteriophage able to infect MDR strains of K. pneumoniae, wherein the phage is obtained according to claim 2, and wherein the phage comprises a nucleic acid sequence of SEQ ID NO:21 or a nucleic acid sequence of at least 89, 90, 95, or 97% sequence identity therewith, originated from phage plaque 15882-3.
[0105] 16. A bacteriophage able to infect MDR strains of K. pneumoniae, wherein the phage is obtained according to claim 2, and wherein the phage comprises a nucleic acid sequence of SEQ ID NO:22 or a nucleic acid sequence of at least 89, 90, 95, or 97% sequence identity therewith, originated from phage plaque 15882-3-1.
[0106] 17. A bacteriophage able to infect MDR strains of K. pneumoniae, wherein the phage is obtained according to claim 2, and wherein the phage comprises a nucleic acid sequence of SEQ ID NO:23 or a nucleic acid sequence of at least 89, 90, 95, or 97% sequence identity therewith, originated from phage plaque 15882-3-2.
[0107] 18. A bacteriophage able to infect MDR strains of K. pneumoniae, wherein the phage is obtained according to claim 2, and wherein the phage comprises a nucleic acid sequence of SEQ ID NO:24 or a nucleic acid sequence of at least 89, 90, 95, or 97% sequence identity therewith, originated from phage plaque 15882-3-3.
[0108] 19. A bacteriophage able to infect MDR strains of K. pneumoniae, wherein the phage is obtained according to claim 2, and wherein the phage comprises a nucleic acid sequence of SEQ ID NO:25 or a nucleic acid sequence of at least 89, 90, 95, or 97% sequence identity therewith, originated from phage plaque 15882-6.
[0109] 20. A bacteriophage able to infect MDR strains of K. pneumoniae, wherein the phage is obtained according to claim 2, and wherein the phage comprises a nucleic acid sequence of SEQ ID NO:26 or a nucleic acid sequence of at least 89, 90, 95, or 97% sequence identity therewith, originated from phage plaque 15882-6-1.
[0110] 21. A bacteriophage able to infect MDR strains of K. pneumoniae, wherein the phage is obtained according to claim 2, and wherein the phage comprises a nucleic acid sequence of SEQ ID NO:27 or a nucleic acid sequence of at least 89, 90, 95, or 97% sequence identity therewith, originated from phage plaque 15882-6-2.
[0111] 22. A bacteriophage able to infect MDR strains of K. pneumoniae, wherein the phage is obtained according to claim 2, and wherein the phage comprises a nucleic acid sequence of SEQ ID NO:28 or a nucleic acid sequence of at least 89, 90, 95, or 97% sequence identity therewith, originated from phage plaque 15882-6-3.
[0112] 23. A bacteriophage able to infect MDR strains of K. pneumoniae, wherein the phage is obtained according to claim 2, and wherein the phage comprises a nucleic acid sequence of SEQ ID NO:29 or a nucleic acid sequence of at least 89, 90, 95, or 97% sequence identity therewith, originated from phage plaque 15882-7.
[0113] 24. A bacteriophage able to infect MDR strains of K. pneumoniae, wherein the phage is obtained according to claim 2, and wherein the phage comprises a nucleic acid sequence of SEQ ID NO:30 or a nucleic acid sequence of at least 89, 90, 95, or 97% sequence identity therewith, originated from phage plaque 15882-7-1.
[0114] 25. A bacteriophage able to infect MDR strains of K. pneumoniae, wherein the phage is obtained according to claim 2, and wherein the phage comprises a nucleic acid sequence of SEQ ID NO:31 or a nucleic acid sequence of at least 89, 90, 95, or 97% sequence identity therewith, originated from phage plaque 15882-7-2.
[0115] 26. A bacteriophage able to infect MDR strains of K. pneumoniae, wherein the phage is obtained according to claim 2, and wherein the phage comprises a nucleic acid sequence of SEQ ID NO:32 or a nucleic acid sequence of at least 89, 90, 95, or 97% sequence identity therewith, originated from phage plaque 15882-7-3.

[0116] Since one of the goals of these new phage development is pharmaceutical application for the treatment of bacterial infection, certain embodiments pertain to pharmaceutical compositions comprising at least one of those phages, optionally 2, 3, 4, 5, 6, or 7 or more phages listed above. A pharmaceutical composition may comprise at least one of those phages mixed with or without other phages from the same genus or other genus or genera, which targets the same bacterial species or different bacterial species of the same genus or other genus or genera.

[0117] For the experiments in this disclosure, Pseudomonas phages from Phikmvvirus genus and Klebsiella phages from Jiaodavirus genus were used as unlimiting examples to demonstrate the method described above, but any Pseudomonas phages or Klebsiella phages can be used.

[0118] The members of Phikmvvirus genus (Lineage: Viruses; Duplodnaviria; Heunggongvirae; Uroviricota; Caudoviricetes; Autographiviridae; Krylovirinae), which are Pseudomonas phages, are listed on https://www.ncbi.nlm.nih.gov/Taxonomy/Browser/wwwtax.cgi?id=477967.

[0119] The members of Jiaodavirus genus (Lineage: Viruses; Duplodnaviria; Heunggongvirae; Uroviricota; Caudoviricetes; Straboviridae; Tevenvirinae), which are Klebsiella phages, are listed on https://www.ncbi.nlm.nih.gov/Taxonomy/Browser/wwwtax.cgi?id=1985325.

[0120] In a particular embodiment, a composition comprising other phages against P. aeruginosa in addition to phage of SEQ ID NO:3 is presented, wherein the phages are one, two, three, or four phages selected from genus of Pbunavirus (e.g., EPa11, EPa15, and/or Epa22), Nankokuvirus (Epa16 and/or Epa18), and/or Abidjan virus (e.g., Epa43). A preferred embodiment here is a composition comprising EPa11, EPa15, Epa16, Epa18, and phage of SEQ ID NO:3, which can be replaced with another phage or mixture of other phages of SEQ ID NO:1, 2, 4-16.

[0121] Such phage cocktail design can also be contemplated for a composition for the treatment of K. pneumoniae infection, wherein the composition comprises at least one phage selected from phages of SEQ ID NO:21-32.

[0122] Further, a phage cocktail comprising at least one phage from the P. aeruginosa phages and at least one phage from K. pneumoniae phages can be contemplated for the treatment of multiple infection, and phages against other bacterial species such as ESKAPEE, developed using the protocol described above, can be mixed with the phages of this invention.

### Formulations and Administration

[0123] For the treatment of bacterial infection, an effective amount of the phage or phage cocktail is administered to a patient through nasal (nebulizer, nasal or inhalation spray), parenteral (intravenous, intramuscular, intraperitoneal, subcutaneous, etc.) or topical route. Pharmaceutical composition for each administration route is formulated into a proper dosage form and comprises necessary excipients. For example, the phage or phage cocktail can be dissolved or suspended in saline or other buffers to be manufactured as a solution for nebulizer mist, nasal spray, or intravenous injection, and each of solutions for different route administration may have similar or different excipients.

[0124] In certain embodiments, the composition is formulated into a solution for parenteral administration.

[0125] In certain embodiments, the composition is formulated into a solution for nebulizer.

[0126] In certain embodiments, the composition is formulated into a solution or aerosol for nasal spray.

[0127] In certain embodiments, the composition is formulated into aerosol or dry powder for inhalation.

[0128] In certain embodiments, the composition is formulated into a lotion, cream, gel, an emulsion, ointment, or dry powder for topical administration.

[0129] In addition, such compositions may further comprise pharmaceutically acceptable excipients for nasal, parenteral, or topical administration. As used herein, the term “excipients” refers to substances that are added to therapeutic products to improve stability, bioavailability, and manufacturability. Examples of excipients are listed below.

[0130] For example, parenteral administration, the composition may comprise lyoprotectants (e.g., human albumin, lactose monohydrate, maltose/trehalose/sucrose, mannitol, dextran, inulin, fructose), micro-encapsulating agents (e.g., aliphatic polyester such as polyglycolide, polylactide, and their copolymers, phospholipids/lecithin, phosphatidic acids, phosphoglycerol, phosphoserine, phosphorethanolamine, phosphocholine, PEGylated phospholipids, hydroxypropylcyclodextrin, Betadex sulfobutyl ether sodium), solubilizers and emulsifiers (e.g., N-methyl 2-pyrrolidone, PEG, polysorbates, polyoxyl 35 castor oil, polyoxyl-15-hydroxystearate, polyvinyl pyrrolidone, propylene glycol, sodium cholesteryl sulfate, sorbitan esters, poloxamer, 2-pyrrolidone, diacylglycerols, monglycerol), tonicity agents (e.g., dextrose, glycerin, mannitol, NaCl, KCl, sorbitol/sorbitol solution), solvents and cosolvents (water miscible such as propylene glycol, PEG low molecular weight, glycerin, ethanol, 2-pyrrolidone, and N-methyl-2-pyrrolidone and water immiscible such as ethyl oleate, benzyl benzoate, vegetable oil, soybean oil, sesame oil, peanut oil, castor oil, almond oil, and cottonseed oil), viscosity-building agents (e.g., sodium carboxymethylcellulose (Na CMC), methylcellulose, gelatin, polyvinyl pyrrolidone), antioxidants (e.g., ascorbic acid, acetylcysteine, sodium ascorbate, sodium metabisulfite, sodium bisulfite, and tocopherol), chelating agents (e.g., EDTA), preservatives (e.g., methyl paraben, ethyl paraben, propyl paraben, butyl paraben, benzoic acid, sodium benzoate, EDTA, cetrimide, benzyl alcohol, benzalkonium chloride, thimerosal, and phenylmercuric salts), buffering agents (e.g., acetate, citrate, tartrate, phosphate, triethanolamine (TRIS) buffer).

[0131] For topical administration, the composition may comprise gelling agents (e.g., carbomer, carrageenan, chitosan, gelatin, gellan gum, pectin, ploxamer, poly(ethylene)oxide, polycarbophil, pullulan, HEC, HPMC, MC, alginates, Na CMC, xanthan gum, acacia, agar, guar gum, tragacanth, modified starch, povidone), humectants (e.g., corn syrup, glycerin, lactic acid, PEGs, propylene, glycol, sodium lactate, sorbitol, trehalose, xylitol), cream and ointment bases (e.g., cetostearyl alcohol, cetyl palmitate, fatty alcohols, hard fat, lanolin, lanolin alcohol, hydrogenated castor oil, mineral oil, petrolatum, glyceryl behenate, hard paraffin, soft paraffin, stearic acid, beeswax (white or yellow), carnauba wax, emulsifying wax, microcrystalline wax), solubilizers and emulsifiers (e.g., cocoylcaprylocaprate, decyl oleate, diethylene glycol monoethyl ether, dimethyl isosorbide, glyceryl monooleate, isopropyl myristate, medium chain triglycerides (MCT), octyldodecanol, oleyl alcohol, oleyl oleate, polyoxyethylene alkyl ethers, polyoxyethylene stearates, propylene glycol monocaprylate, propylene glycol monolaurate, sodium cetostearyl sulfate, lecithin, cyclodextrins, docusate sodium, glyceryl monostearate, hydrogenated vegetable/cottonseed/palm kernel oil, MCT, N-methyl-2-pyrrolidone, poloxamer, PEG, polysorbate, PEG castor oil derivatives, propylene glycol, polyoxyglycerides, sodium lauryl sulfate, sucrose esters), suspending agents and thickeners (e.g., magnesium aluminum silicate, MCC and Na CMC, propylene glycol alginate, acacia, carbomer, carrageenan, colloidal silicon dioxide, gellan gum, HEC, HPC, HPMC, maltitol, MC, pectin, PEGs, polyvinyl alcohol, povidone, Na CMC, sorbitol, sucrose, xanthan gum, tragacanth, gelatin, guar gum, kaolin, phospholipids), preservatives (e.g., methyl paraben, ethyl paraben, propyl paraben, butyl paraben, benzoic acid, sodium benzoate, EDTA, cetrimide, benzyl alcohol, benzalkonium chloride, thimerosal, and phenylmercuric salts), and stabilizers including pH modifiers (e.g., lactic acid, citric acid, tartaric acid, ascorbic acid, and their sodium salts), antioxidants referred to above, and chelating agent EDTA.

[0132] For nasal administration, the composition may comprise a suspending agent and thickener (e.g., colloidal carboxymethyl cellulose (CMC) and microcrystalline cellulose (MCC), MC, HPMC, pectin, PEGs), preservatives (e.g., methyl paraben, ethyl paraben, propyl paraben, butyl paraben, benzoic acid, sodium benzoate, EDTA, cetrimide, benzyl alcohol, benzalkonium chloride, thimerosal, and phenylmercuric salts), penetration enhancer (e.g., polysorbates, poloxamers, PEGs, propylene glycol, EDTA), tonicity agents (e.g., dextrose, glycerin, mannitol, NaCl, KCl, sorbitol/sorbitol solution), buffering agents (e.g., acetate, citrate, tartrate, phosphate, triethanolamine (TRIS) buffer). A composition for nebulizer solution may comprise buffering agents (e.g., phosphate buffer, citrate buffer), EDTA chelating agent, ethanol cosolvent, pH modifier (e.g., HCl, NaOH, sulfuric acid, tartaric acid, citric acid), preservatives (e.g., methyl paraben, propyl paraben, benzalkonium chloride), surfactant (e.g., polysorbate 20, polysorbate 80, sorbitan laurate), and tonicity agent (e.g., NaCl). A pressurized metered-dose inhaler composition may comprise propellants (e.g., hydrofluoroalkanes), surfactants (e.g., oleic acid, sorbitan trioleate, lecithin), pH modifier (e.g., citric acid), lubricant (e.g., PEG 1000, PEG 600), cosolvent (e.g., ethanol, glycerol), suspending agents (e.g., Povidone K25, K30). A dry powder—optionally lyophilized—inhaler composition may comprise carriers (e.g., lactose monohydrate), surfactants (e.g., dipalmitoyl phosphatidylcholine, distearoyl phosphatidylcholine), lubricant (e.g., magnesium stearate).

[0133] Further, a spray container, which is pressurized or not, containing the composition for nasal spray or inhalation spray can be contemplated, and the spray container optionally comprises an antibiotic or antibiotics in the dosage form of liposome, solution, or lyophilized dry powder, for example, liposomal ciprofloxacin, aztreonam solution, colistin solution or dry powder, tobramycin solution or dry powder. In a preferred embodiment, the spray container comprises ceftazidime. In other embodiments, methods of treating a subject having P. aeruginosa and/or K. pneumoniae infection are provided, and the methods comprise administering an effective amount of the composition described above, through nasal, parenteral, and/or topical route.

[0134] The composition comprising at least one phage described in this disclosure can be administered alone or co-administered with antibiotics, especially antibiotics against gram-negative bacteria. Antibiotics can be administered through oral, parenteral, topical, and/or nasal route together with the composition or separately before, after, or at the same time with the administration of the composition. In addition, some antibodies or fragments thereof against the surface antigens of the target bacteria may be contemplated for co-administration with the composition herein.

[0135] The subjects suitable for the treatment using the composition are patients with P. aeruginosa and/or K. pneumoniae infection in the lung, urinary tract, skin, and/or blood stream, and in particular patients who has P. aeruginosa and/or K. pneumoniae infection after lung transplant or are suffering from pneumonia, cystic fibrosis, bronchiectasis, bladder infection (cystitis), kidney infection (pyelonephritis), skin infection (cellulitis, burn wounds), and/or sepsis.

[0136] For excipients for other dosage forms including parenteral solution and topical gel, cream, paste, ointment, emulsion can be found in Remington: The Science and Practice of Pharmacy, 23rd Edition or higher version.

[0137] The composition can be administered once a day, twice a day, thrice a day for one day, couple of days, three days, four days, five days, six days, a week, two weeks, three weeks, a month or a longer period. Daily dose (pfu) is to be determined empirically, depending on the severity of P. aeruginosa and/or K. pneumoniae infection. For example, patients can be administered with 10⁵-10¹⁵ PFU, optionally 10⁹-10¹¹ PFU of a single phage or combination of at least two phages intravenously twice daily; or with the same dose by inhalational nebulization. Patients can also receive antibiotic treatment with the phage treatment against their own target isolate. Initial duration of phage treatment can be 6 months, but it can be shorter or longer courses of treatment directed by clinical and microbiologic responses. Phage regimens can be adjusted by the treating clinicians as needed based on tolerability to phage-containing pharmaceutical formulation and lab tests during phage treatment.

[0138] Although the main subject of this invention is human, any animals including both vertebrates and invertebrates, and even some mushrooms, algae and plants, which can be infected by P. aeruginosa or K. pneumoniae, can benefit from treatment with the phages listed above or phage cocktail comprising any of them. For example, the composition comprising the phages or phage cocktail against non-MRD or MRD strains of P. aeruginosa or K. pneumoniae can be scattered as dry powder or solution to the fish tank or aquaculture for oysters, clams, mussels, or other shellfish, or algae farm.

[0139] Considering the aspect of bactericidal effect of phages, the composition can also be developed into hygiene control products. For example, the composition can be utilized as a disinfectant for cleaning the surface of medical device and instruments, and/or hospital furniture or walls, by applying a liquid, aerosol, or powder composition to the surface directly or to wiping cloth.

### EXAMPLES

### Example 1. Materials and Methods

1.1. P. aeruginosa Phage Training

[0140] Bacterial Strains and Bacteriophages All bacterial strains, except PAO1 and PAO1::lux, used in this study are taken from diversity panels of clinical isolates prepared by the Multidrug-Resistant Organism Re-pository and Surveillance Network (MRSN). Bioluminescent strain P. aeruginosa PAO1::lux was engineered by insertion of the luciferase gene cassette (lux) in the PAO1 chromosome, (Engeman et al 2021). Strains were characterized for antibiotic suscepti-bility and phage susceptibility, (Table. 1). Antibiotic and phage susceptibility rankings are derived from how many phages or antibiotics can lyse or kill the strain. The susceptibility data comes from analysis of phages from our library lysing these strains. All bacterial strains were grown in Heart Infusion Broth (HIB) with shaking at rpm=200 and at 37° C. For all experiments, bacterial cultures were prepared fresh the day before planned experiments and grown overnight.

[0141] Bacteriophages used in this study were provided to our group from collaborating labs locating at AFRIMS (Bangkok, Thailand) or USMRD-A (Nairobi, Kenya). The phages belong to the PhiKMVvirus genus, (Table. 2). It was hypothesized that due to their close relatedness, these phages should be more able to undergo recombination. Phages stocks were prepared by propagating phages on host isolation strains. In brief, concentrated phage stock was added to bacterial culture at mid-log phase in propagation media (HIB+glucose, MgCl₂, and CaCl₂)) and allowed to incubate with the bacterial culture for 4-6 hours or until the culture was cleared, whichever came first. Cultures were then pelleted and phage lysate was filter-sterilized by passing through a 0.22 um syringe filter. Filtered phage lysates were used as the initial inoculum for the phage training. Phage lysates were stored, protected from light, at 4° C.

[0142] Strains were used in either one or two training panels, indicated by P1 or P2. All strains were selected on the basis of being highly phage-resistant broadly and resistant to all three selected phages specifically (AFR43, KEN1, and KEN10) except for PAO1. PAO1 was selected due to its high phage susceptibility including towards all three phages.

### Appelmans Training:

[0143] Appelmans training was conducted with minor modifications from the protocol described by Burrowes et al, [Burrowes B H, Molineux I J, Fralick J A. Directed in Vitro Evolution of Therapeutic Bacteriophages: The Appelmans Protocol. Viruses. 2019; 11(3):241. doi.org/10.3390/v11030241]. In brief, phage resistant bacterial clinical isolates were selected. They were grown overnight in HIB medium. On the day of training, fresh overnight cultures were used to inoculate sterile HIB added to wells in a 96-well plate. An uninfected bacterial control was maintained for all strains used. The initial input cocktail consisted of a 1:1:1 mix of phages AFR43, KEN1, and KEN10 at a total concentration of 1×1010 PFU/mL. Phage lysate from propagated purified phages (for Round 0) and filtered lysate from the previous round of phage training (for all subsequent rounds) was titrated down the columns of the 96-well plate.

[0144] The assembled plate was incubated overnight, shaking at 37° C. The following morning, the OD at 600 nm was visualized in a microplate reader. In Panel P1, wells that showed reduction in OD relative to the uninfected control were determined and lysates collected. In Panel P2, only the two most dilute wells showing reduction were collected to select for the best performing possible recombinant/mutant phages. If no reduction in OD was observed, the two least dilute wells were collected. For both panels, all collected lysates were pooled together, filter sterilized through a 0.22 um filter, and stored at 4° C. for subsequent use. To assess for activity on phage resistant strains, pooled lysates were titrated in SM buffer to 10\hat{ }₇ and plated on the strains used in the phage training. Plaque formation was assessed the following morning and plaques collected for follow up analysis.

### Purification of Collected Trained Phage Clones:

[0145] Phage clones isolated on previously resistant strains were collected via picking plaques and transferring to 500 μL of sterile SM buffer. 50 uL chloroform was added to assist in destroying any remaining cells and releasing phage still inside. After allowing for equilibration, the plaque suspensions were centrifuged at 5000 g for 5 minutes. The aqueous phase was collected and filter sterilized. This process of picking plaques and filter sterilization was repeated three times and plaque purity was then assessed by confirming uniform plaque morphology.

### Host Range Determination:

[0146] Host range is determined by assessing lysis against a 100-strain highly diverse panel of bacterial clinical isolates. Overnight cultures of bacterial strains were pre-pared in HIB medium. On the day of testing, phage stocks of the tested phages are ti-trated to 10\hat{ }−7 in SM buffer. Phage dilution series are spotted on each strain of the di-versity panel. The following day, quality of lysis is assessed. Lysis is scored on a quali-tative system with scores from 0-4. Zero indicates no lysis, one indicates lysis without replication (no plaque formation), 2-4 represent varying levels of lysis with plaque formation. Scores are tallied for a phage against all 100 strains.

### Stability of Host Range Expansion Assessment:

[0147] Stability of observed changes in lytic spectra were assessed by conducting serial propagations on a single, phage susceptible bacterial strain. Propagations were con-ducted This is followed by re-isolation and purification of subclones and re-assessment of host range.

### Lysis Dynamics Analysis in 96-Well Plate Format:

[0148] Phage lysis and kinetics of lysis are assessed by real time monitoring of clearance of optical density in a 96-well plate format. Outer wells are filled with 100 uL SM buff-er to aid in preventing evaporation during incubation. HIB is inoculated in the morn-ing with overnight culture to reach an OD of 0.05-0.1 and allowed to grow to mid-log (OD600=0.5), shaking at 37° C. Once OD is reached, the culture is placed on ice to min-imize further growth. 100 μL of sterile HIB media is added to one row to serve as a blank. 100 μL of mid-log culture is added to the next row to serve as a phage-free growth control. Finally, the remaining four rows have 95 μL of mid-log culture with 5 μL of phage to reach MOI values desired (typically 10, 1, 0.1, 0.01). The plate is sealed with sterile, clear, gas-permeable plate tape and then placed in a microplate reader (SpectraMax 384, Molecular Devices). The reader is set to 37° C. and is set to read wavelength at 600 nm with reads every 10 minutes for a period of 8 hours or 24 hours. Results of lysis are compared to the uninfected bacterial culture to assess lytic capability of a phage against a particular bacterial strain.

### Endotoxin Purification of Phage Stocks:

[0149] Phage stocks intended for use in therapeutic cocktails and in animal experiments were purified of endotoxin. A large volume culture (250 mL) of appropriate bacterial host strain was used to propagate phage to a high titer (>1011 PFU/mL). The phage lysate was pelleted overnight spinning at 6000 g. Lysate was removed, and the pellet re-suspended in 7 mL of SM buffer. This concentrated stock was then further cleaned with octanol washes in triplicate. The final collection was then mixed with 5 mL of p=1.7 CsCl solution and pelleted overnight at 3900 rpm, although initially intended as 4700 g. The speed was lower due to rotor constraints, but fractions were properly formed. Resulting fractions were collected and phage titer was assessed for each fraction. If sufficient phage was in the desired phage fraction, the sample was dialyzed in 1×PBS with 5% MgCl2 over three rounds, switching buffer between each round. The phage sample was dialyzed in a 3 mL 20K cutoff dialysis cassette. Finally dialyzed phage samples were plated again to determine titer and then endotoxin levels were assessed via using the LAL test system, EndoSafe PTS (Charles River) following a modified version of the manufacturer's protocol. In brief, dialyzed phage was diluted in SM buffer. A 1:1 mix of diluted phage and B-G-blocker (Lonza) was prepared and then assessed per manufacturer's protocol.

### Phage Cocktail Preparation for Animal Experiments:

[0150] Purified phage stocks were titrated and plated within a week of the start of an animal experiment to confirm phage stock titer. Calculations to generate a phage cocktail are made to ensure that phages reach desired concentration for the experiment without allowing endotoxin levels to reach above FDA recommended limits of 500 EU/kg/hr. Phage cocktails are prepared in 1×-PBS buffer (PBS+10 mM MgSO4). Cocktail doses were prepared the day of dose administration.

### Phage Treatment of Dorsal Wound Model of Infection:

[0151] Full thickness dorsal wounds were created in four groups of eight mice each. The wounds were infected with P. aeruginosa PAO1::lux at a dose of 107 CFU. The four groups consisted of a control group, a phage cocktail treated group, an antibiotic treated group, and a phage/antibiotic combination treated group. Treatment regimens were begun four hours post infection and continued for four days. Phage cocktail was administered both topically (TOP) and by intraperitoneal (IP) injection at a dose of 109 PFU made up with equal parts of phages EPa15, EPa18, EPa22, EPa43 and 20176-4-2 in volumes of 200 uL (IP) and 25 uL (TOP). Ceftazidime was used at a dose of 410 mg/kg and administered via IP injection four hours after injection and twice daily following. The antibiotic/phage combination treatment regimen consisted of phage applied topically and ceftazidime delivered via IP injection. Control mice were treated with saline (company). Mice were monitored over the course of the experiment with weight checks (daily), Aranz measurements (taken on Days 0, 3, 6, 10, 15, and 20), and IVIS measurements (taken on Days 1, 2, 3, and 6). Mice were euthanized following closure of wounds.

### Library Preparation and Sequencing

[0152] Sequencing libraries was constructed using the KAPA HyperPlus Kit (Roche Diagnostics, Indianapolis, IN) as described previously, [22] with modifications. Briefly, input DNA was tagmented and amplified via PCR. The library was sequenced on an Illumina MiSeq (Illumina, San Diego, CA) with a 600 cycle MiSeq Reagent Kit v3 that produced 300-bp paired end reads.

### Genome Assembly

[0153] Raw reads were quality assessed using FastQC 0.11.9, [23] and trimmed with Trimmomatic v0.39, with the following parameters: ILLUMINACLIP, TruSeq3-PE-2.fa:2:30:10; LEADING, 3; TRAILING, 3; SLIDINGWINDOW, 4:24; and MINLEN, 60. Reads were further trimmed with Trimmomatic using the HEADCROP:9 parameter. The phage genome was de novo assembled from the trimmed reads using the Unicycler assembly pipeline

### Genome Annotation

[0154] The termini of each assembled phage genome was determined using PhageTerm, Genomes were annotated using Pharokka. Pharokka integrates the gene caller, Phanotate, with evidence from several sources including BLAST searches against cus-tom phage/prophage databases, searches against phage protein domains.

### Genome Variation Analysis

[0155] Structural variations, single nucleotide polymorphisms (SNPs), and indels were identi-fied between phage mutant genomes and their respective parent strains using nucdiff.Nucdiff aligns input genomes and detects variants including substitutions, inser-tions, deletions, inversions, and translocations. The R package gggenome, was used to visualize genomic variations. Aligned genomes were provided as input to gen-erate figures depicting SNPs, indels, and structural rearrangements. Default gggenome plotting parameters were used, except for varying figure size and color schemes.

1.2. K. pneumoniae Training

### Bacterial Strains and Bacteriophages Used:

[0156] All bacterial strains used in this study are taken from a 100-strain highly diverse panel of bacterial clinical isolates prepared by the MRSN. All bacterial strains were grown in Heart Infusion Broth (HIB) at 37° C., shaking. Cultures were prepared fresh before the start of each experiment, with fresh colonies inoculated in HIB and grown the night before experiments. Strains were selected based on their phage resistance, with strains that are both antibiotic resistant and phage resistant being selected. A susceptible strain, MRSN414780, was used for general propagation of training lysates and to maintain phage titers during training. All phages used in the training were propagated on host bacterial strains. In brief, concentrated phage stock was added to bacterial culture at mid-log phase in propagation media (HIB+glucose, MgCl2, and CaCl2)) and allowed to incubate with the bacterial culture for 4-6 hours or until the culture was cleared, whichever came first. Cultures were then pelleted and phage lysate was filter sterilized by passing through a 0.22 um syringe filter. Filtered phage lysates were used as the initial inoculum for the phage training. Phage lysates were stored, protected from light, at 4° C. Training phages were selected based on their host range coverage and genetic similarity which is important to help facilitate recombination, which is likely a major driver of change in training experiments. The phages all belong to the Jiaodavirus genus which has been reported as having a broad host range, quick lysis time, and efficacy at lower MOIs.

### Appelmans Training:

[0157] Appelmans training was conducted with minor modifications as described by Burrowes et al, [Burrowes B H, Molineux I J, Fralick J A. Directed in Vitro Evolution of Therapeutic Bacteriophages: The Appelmans Protocol. Viruses. 2019; 11(3):241. doi.org/10.3390/v11030241]. In brief, phage resistant bacterial clinical isolates were selected. They were grown overnight in HIB medium. On the day of training, fresh overnight cultures were used to inoculate sterile HIB added to wells in a 96-well plate. An uninfected bacterial control was maintained for all strains used. The initial phage inoculum consisted of a 1:1:1:1 mix of KEN22, KEN25, KEN37, and KEN39 to a final concentration of 1×1010 PFU/mL. Phage lysate from propagated purified phages (for Round 0) and filtered lysate from the previous round of phage training (for all subsequent rounds) was titrated down the columns of the 96-well plate.

[0158] The assembled plate was then allowed to incubate overnight, shaking at 37° C. The following morning, the OD at 600 nm was visualized in a microplate reader. Wells that showed reduction in OD relative to the uninfected control were tracked. The two most dilute wells showing reduction were collected in order to select for the best performing possible recombinant/mutant phages. If no reduction in OD was observed, the two least dilute wells were collected. All collected lysates were pooled together, filter sterilized through a 0.22 um filter, and stored at 4° C. for subsequent use.

[0159] To assess for activity on phage resistant strains, pooled lysates were titrated in SM buffer to 10\hat{ }−7 and plated on the strains used in the phage training. Plaque formation was assessed the following morning and plaques collected for follow up analysis.

### Purification of Collected Trained Phage Clones:

[0160] Phage clones isolated on previously resistant strains were collected via picking plaques and transferring to 500 μL of sterile SM buffer. 50 uL chloroform was added to assist in destroying any remaining cells and releasing phage still inside. After allowing for equilibration, the plaque suspensions were centrifuged at 5000 g for 5 minutes. The aqueous phase was collected and filter sterilized. This process of picking plaques and filter sterilization was repeated three times and plaque purity was then assessed by confirming uniform plaque morphology.

### Host Range Determination:

[0161] Host range is determined by assessing lysis against a 100-strain highly diverse panel of bacterial clinical isolates. Briefly, overnight cultures of bacterial strains are prepared in HIB medium. On the day of testing, phage stocks of the tested phages are titrated to 10\hat{ }−7 in SM buffer. Phage dilution series are spotted on each strain of the diversity panel. The following day, quality of lysis is assessed. Lysis is scored on a qualitative system with scores from 0-4. Zero indicates no lysis, one indicates lysis without replication (no plaque formation), 2-4 represent varying levels of lysis with plaque formation. Scores are tallied for a phage against all 100 strains.

### Stability of Host Range Expansion Assessment:

[0162] Stability of observed changes in lytic spectra were assessed by conducting serial propagations on a single, phage susceptible bacterial strain. This is followed by re-isolation and purification of clones and re-assessment of host range. Host range is compared with the originally isolated trained phage clones.

### Library Preparation and Sequencing

[0163] Sequencing libraries was constructed using the KAPA HyperPlus Kit (Roche Diagnostics, Indianapolis, IN) as described previously [29] with modifications. Briefly, input DNA was tagmented and amplified via PCR. The library was sequenced on an Illumina MiSeq (Illumina, San Diego, CA) with a 600 cycle MiSeq Reagent Kit v3 that produced 300-bp paired end reads.

### Genome Assembly

[0164] Raw reads were quality assessed using FastQC 0.11.9 and trimmed with Trimmomatic v0.39, with the following parameters: ILLUMINACLIP, TruSeq3-PE-2.fa:2:30:10; LEADING, 3; TRAILING, 3; SLIDINGWINDOW, 4:24; and MINLEN, 60. Reads were further trimmed with Trimmomatic using the HEADCROP:9 parameter. The phage genome was de novo assembled from the trimmed reads using the Unicycler assembly pipeline.

### Genome Annotation

[0165] The termini of each assembled phage genome was determined using PhageTerm. Genomes were annotated using Pharokka. Pharokka integrates the gene caller, Phanotate, with evidence from several sources including BLAST searches against custom phage/prophage databases, searches against phage protein domains.

### Genome Variation Analysis

[0166] Structural variations, single nucleotide polymorphisms (SNPs), and indels were identified between phage mutant genomes and their respective parent strains using nucdiff. Nucdiff aligns input genomes and detects variants including substitutions, insertions, deletions, inversions, and translocations. The R package gggenome was used to visualize genomic variations. Aligned genomes were provided as input to generate figures depicting SNPs, indels, and structural rearrangements. Default genome plotting parameters were used, except for varying figure size and color schemes.

### Example 2. Phage Training Leads to Phage Clones with Altered and Expanded Host Ranges

[0167] The protocol is schematically summarized in FIG. 1 and FIG. 2. Phages were combined at an equal ratio of each phage titer to yield a phage cocktail of 1×10¹⁰ pfu/mL. Using a 96-well microtiter plate, 100 μL of serial 10-fold dilutions (10⁰ to 10⁻⁶) of the phage cocktail were added to 100 μL of double-strength LB containing 1 μL of an overnight bacterial culture of a phage-susceptible strain. 10-12 bacterial strains can be tested on each plate. For each bacterial strain, the top well was used for a control, i.e., bacterial strain without phage addition. After overnight incubation at 37° C. on a shaking platform at 200 rpm, the plates were visually inspected. Wells showing reduced bacterial growth and complete lysis were pooled. Pooled lysates were cleared by vortex mixing with 1:100 CHCl₃, followed by centrifugation (15,000×g for 15 min). The lysate was termed the round 1 cocktail and was used to initiate the next round of the protocol using the same set of bacterial strains.

[0168] In the experiments described here, genetically similar phages with complementary activity, were mixed. Three Pseudomonas phages, which are members of the Phikmvvirus genus (KEN1, KEN10, AFR43), were selected for the Pseudomonas phage training, and four Klebsiella phages, which are members of the Jiaodavirus genus (KEN22, KEN25, KEN37, KEN39), for the Klebsiella phage training (Table 1). This was to facilitate DNA recombination events in phages active against different strains of the same bacterial species so that their progeny would gain the ability to lyse additional bacterial strains.

[0169] Pseudomonas phage cocktail was passaged serially against ‘phage training’ panels including 10-12 phage-resistant P. aeruginosa strains and one phage permissive strain (e.g., PAO1) (Table 2a). Klebsiella phages cocktail was passaged serially against a panel including 10 phage-resistant bacterial strains and one phage permissive strain (MRSN414780) (Table 2b). Then, phage lysates were collected from the wells showing reduced bacterial growth, pooled, and passaged against the same panel of bacterial strains over successive rounds.

[0170] Three sets of training panels were used in this work (Table 3). All phage variants isolated from panel Pa-OK showed altered specificity, reduction in activity and developed as specialists. Several phage clones from panels Pa-KB and Kp-KB displayed expanded host range and were used in further work.

TABLE 1
Characteristics of bacteriophages selected for training

| | Genome, size | | | Host | Training |
|---|---|---|---|---|---|
| Phage ID | bp | Family | Genus | range, % | Panels |
| AFR43 | 43,008 | Autographiviridae | PhilKMVvirus | 37 | Pseudomonas |
| KEN1 | 42,986 | Autographiviridae | PhilKMVvirus | 40 | Pseudomonas |
| KEN10 | 42,678 | Autographiviridae | PhilKMVvirus | 37 | Pseudomonas |
| KEN22 | 167,213 | Straboviridae | Jiaodavirus | 26 | Klebsiella |
| KEN26 | 165,574 | Straboviridae | Jiaodavirus | 31 | Klebsiella |
| KEN37 | 166,503 | Straboviridae | Jiaodavirus | 34 | Klebsiella |
| KEN39 | 166,254 | Straboviridae | Jiaodavirus | 36 | Klebsiella |

TABLE 2
Characteristics of the bacterial strains
selected for phage training panels

| | | | |
|---|---|---|---|
| Strain ID | Antibiotic resistance | Phage susceptibility | Panel |

(a) Pseudomonas phage training panel strains
(a) Pseudomonas phage training panel strains

| | | | |
|---|---|---|---|
| MRSN317 | MDR | XPR | KB/OK |
| MRSN552 | susceptible | MPR | KB/OK |
| MRSN1388 | Susceptible | XPR | KB |
| MRSN2144 | Susceptible | MPR | OK |
| MRSN6220 | PDR | PPR | KB |
| MRSN6678 | XDR | PPR | KB |
| MRSN8130 | MDR | MPR | OK |
| MRSN8136 | XDR | XPR | KB |
| MRSN8914 | XDR | XPR | OK |
| MRSN12427 | ND | PPR | KB |
| MRSN13488 | Susceptible | PPR | KB/OK |
| MRSN16344 | XDR | MPR | OK |
| MRSN20176 | XDR | XPR | KB/OK |
| MRSN20193 | ND | XPR | KB |
| MRSN25678 | MDR | PPR | KB |
| MRSN26263 | Susceptible | PPR | KB |
| MRSN358800 | XDR | XPR | OK |
| PAO1 | Susceptible | Susceptible | KB/OK |
| MRSN351791 | MDR | MPR | |

(b) Klebsiella phage training panel strains

| | | | |
|---|---|---|---|
| MRSN4759 | MDR | XPR | KB |
| MRSN6778 | MDR | PPR | KB |
| MRSN15687 | MDR | XPR | KB |
| MRSN15882 | MDR | PPR | KB |
| MRSN22232 | XDR | PPR | KB |
| MRSN27989 | MDR | PPR | KB |
| MRSN479404 | XDR | PPR | KB |
| MRSN511348 | XDR | XPR | KB |
| MRSN614201 | MDR | PPR | KB |
| MRSN681054 | XDR | PPR | KB |
| MRSN414780 | XDR | Susceptible | KB |

PDR/PPR (pan-drug/phage resistant): no tested drugs/phages kill;
XDR/XPR (extensively drug/phage resistant): fewer than 3 drugs/phages kill;
MDR/MPR (multi-drug/phage resistant): resistant to greater than third of tested drugs/phages;
ND: no data

TABLE 3
Host Range coverage of collected trained phages

| Phage ID | Host Strain | Training Panel | Host Range |
|---|---|---|---|
| 20176-1 | P. aeruginosa 20176 | KB-Pa | 27% |
| 20176-2 | P. aeruginosa 20176 | KB-Pa | 29% |
| 20176-3 | P. aeruginosa 20176 | KB-Pa | 40% |
| 20176-4 | P. aeruginosa 20176 | KB-Pa | 42% |
| 20176-5 | P. aeruginosa 20176 | KB-Pa | 43% |
| 20176-6 | P. aeruginosa 20176 | KB-Pa | 42% |
| 20176-7 | P. aeruginosa 20176 | KB-Pa | 43% |
| 20176-8 | P. aeruginosa 20176 | KB-Pa | 33% |
| 20176-9 | P. aeruginosa 20176 | KB-Pa | 42% |
| 20176-10 | P. aeruginosa 20176 | KB-Pa | 42% |
| 15882-1 | K. pneumoniae 15882 | KB-Kp | 33% |
| 15882-3 | K. pneumoniae 15882 | KB-Kp | 44% |
| 15882-5 | K. pneumoniae 15882 | KB-Kp | 36% |
| 15882-6 | K. pneumoniae 15882 | KB-Kp | 40% |
| 15882-7 | K. pneumoniae 15882 | KB-Kp | 38% |
| 15882-8 | K. pneumoniae 15882 | KB-Kp | 14% |
| 15882-4 | K. pneumoniae 27989 | KB-Kp | 11% |
| 15882-11 | K. pneumoniae 27989 | KB-Kp | 9% |
| 15882-12 | K. pneumoniae 27989 | KB-Kp | 10% |
| 552-2 | P. aeruginosa 552 | OK-Pa | 3% |
| 552-5 | P. aeruginosa 552 | OK-Pa | 3% |
| 2144-1.2 | P. aeruginosa 2144 | OK-Pa | 8% |
| 2144-5.1 | P. aeruginosa 2144 | OK-Pa | 8% |
| 2144-5.2 | P. aeruginosa 2144 | OK-Pa | 7% |
| 2144-6.2 | P. aeruginosa 2144 | OK-Pa | 8% |
| 2144-7.2 | P. aeruginosa 2144 | OK-Pa | 8% |
| 2144-8.1 | P. aeruginosa 2144 | OK-Pa | 8% |
| 8130-3.1 | P. aeruginosa 8130 | OK-Pa | 4% |
| 8130-3.2 | P. aeruginosa 8130 | OK-Pa | 4% |
| 8130-4.1 | P. aeruginosa 8130 | OK-Pa | 5% |
| 8130-5.1 | P. aeruginosa 8130 | OK-Pa | 5% |
| 8130-5.2 | P. aeruginosa 8130 | OK-Pa | 5% |
| 8914-1 | P. aeruginosa 8914 | OK-Pa | 10% |
| 8914-3 | P. aeruginosa 8914 | OK-Pa | 10% |
| 8914-4 | P. aeruginosa 8914 | OK-Pa | 10% |
| 8914-5 | P. aeruginosa 8914 | OK-Pa | 10% |
| 8914-7 | P. aeruginosa 8914 | OK-Pa | 10% |
| 8914-8 | P. aeruginosa 8914 | OK-Pa | 10% |
| 16344-A1/1 | P. aeruginosa 16344 | OK-Pa | 4% |
| 16344-A1/2 | P. aeruginosa 16344 | OK-Pa | 4% |
| 16344-A2/1 | P. aeruginosa 16344 | OK-Pa | 4% |
| 16344-A2/2 | P. aeruginosa 16344 | OK-Pa | 4% |
| 16344-1./2 | P. aeruginosa 16344 | OK-Pa | 4% |
| 16344-5./2 | P. aeruginosa 16344 | OK-Pa | 4% |
| 20176-35-2 | P. aeruginosa 20176 | OK-Pa | 2% |
| 358800-H1 | P. aeruginosa 358800 | OK-Pa | 38% |
| 358800-H2 | P. aeruginosa 358800 | OK-Pa | 38% |
| 358800-H3 | P. aeruginosa 358800 | OK-Pa | 38% |
| 358800-H6 | P. aeruginosa 358800 | OK-Pa | 37% |

2.1. P. aeruginosa Phage Training

[0171] Phage training was conducted per the modified Appelmans training and continued until phage clones with desired attributes (ability to form plaques on phage resistant strains) were collected. Training was conducted over two independent experiments which employed different strains but the same cocktail of phages. Panel 1 phage training occurred prior to the start of the Panel 2 training and information obtained from this run was used to improve set-up for the P2 training. Lysis was monitored each round and strains showing lysis were periodically screened to look for plaque formation.

[0172] After 49 rounds of training in P1 panel, the pooled lysate collected from the final round was able to lyse 50% of the diversity panel. Plaques were collected on numerous strains and phages were isolated on MRSN552, MRSN2144, MRSN8130, MRSN8914, MRSN16344, MRSN20176, and MRSN358800 and successfully purified. Most of the purified phages collected from this panel had a narrow host range, ranging from 2% to 38% at most. Despite loss in overall activity, there were still differences in host range from the parental phages; these phages displayed altered lytic spectra, lysing strains that the parental phages could not, including highly phage resistant bacterial strains. Phages isolated on MRSN358800 had the best performance with four phages (H1, H2, H3, H4) isolated on that strain lysing 38%, 38%, 38% and 37% respectively. This puts these phages as relatively equivalent in host range, but with an altered lytic spectrum. Phages isolated on all other strains lysed 10% or fewer strains of the 100-strain diversity panel.

[0173] Clones collected from the P1 training panel developed at different rounds. Plaques were first observed on MRSN8130 and MRSN351791 following round 1. Plaques were first observed on MRSN2144, MRSN16344, MRSN8914, MRSN20176, and MRSN552 at rounds 4, 9, 18, 35, and 44 respectively. Plaques collected on MRSN358800 were collected by passaging lysate from MRSN20176 on MRSN358800. In some cases, plaques were lost and then reappeared at later rounds of training. In cases where collected phages were isolated earlier, they were more often narrow host range. For example, phages collected on MRSN8130, which had plaques appear after only one round of training had host ranges of Following 20 rounds of training in the P2 panel, ten plaques were isolated on a formerly phage-resistant bacterial isolate, MRSN20176. Plaques were observed following round five of training but were incredibly faint. This raised two concerns: that these phages would be difficult to propagate or handle in the laboratory, and that not enough time had passed for expansion in host range. So, training was continued for further rounds until plaques were finally collected on round 20. These plaques were more robust but unable to fully clear the bacteria from the plaque. After purification of the collected phage clones, they were assessed for host range against a 100-strain highly diverse panel of Pseudomonas aeruginosa clinical isolates. Additionally, the three parental phages used in the training were also plated against the diversity panel. The parental phages had host ranges of 37-40%, consisting of all strains lysed with productive plaque formation. Each parental phage also displayed non-replicative lysis on a small additional number of strains.

[0174] Following assessment of the trained clones, it was found that six of ten collected iso-lates displayed broader host range than the best performing parental phage. These clones had host ranges of 42-44% lysis. Additionally, all clones displayed non-replicative lysis on additional strains.

[0175] FIG. 3a shows plaque morphology of collected phage clones from KB-Pa phage training panel. Plaques are on agar plates with lawns of MRSN20176 grown on HIB plates with a 0.7% agar HIB top layer. FIG. 4 summarizes the results of host range of (a) trained phages collected from panels P1 and (b) P2 final round (49) lysate from plating results on 100 strains of P. aeruginosa.

2.2. K. pneumoniae Phage Training Leads to Phage Clones with Altered Lytic Spectra.

[0176] Following 10 rounds of phage training, multiple phage clones infecting highly phage resistant strains were isolated, which were previously resistant to the parental phages. Phages clones were collected from two highly resistant strains, MRSN15882 and MRSN27989. Phage clones collected on these strains were weakly lytic, with small, faint plaques, (FIG. 3). Ultimately, three clones were isolated and purified from MRSN27989, and six clones were isolated and purified from MRSN15882. Additional plaques were originally identified on other resistant strains, including additional plaques on MRSN15882 and MRSN27989, and plaques on MRSN15687 and MRSN681054, but were seemingly unstable and lost before being purified, or were recalcitrant to propagation reaching a workable phage titer. Following three rounds of plaque isolation, phage clones were plated on 100 strains from a highly diverse panel of clinical isolates.

[0177] Full characterization was focused on those phage clones that proved more amenable to handling in the lab. The nine phage clones assessed against the 100-strain diversity panel displayed altered lytic spectra and in three cases, expanded lytic spectra. Additionally, parental phage clones KEN22, KEN25, KEN37, and KEN39 were plated on the panel at the same time. Phage clones 15882-3, 15882-6, and 15882-7 had expanded activity with activity against 44, 40, and 38% of the panel respectively. Compared with the best performing parental phage, KEN39, which had a host range of 36%, this represents an expansion of 8, 4, or 2% over KEN39. Increasing lytic activity against eight strains is a substantial increase in activity in that phage clone. No other phage clones collected from the training project saw expansion in activity. 15882-1 and 15882-5 saw activity roughly equivalent to the parental phages with 33% and 36% activity respectively. Finally, phage clones 15882-8 and 27989-4, 27989-11 and 27989-12 showed dramatic loss in activity with host ranges of 14, 11, 9, and 10% respectively.

[0178] For all phage clones, the quality of lysis indicated by assessing plaque quality indicates expansion of weakly lytic plaques. Plaques were largely turbid, with no full clearance of the bacterial culture. While parental phages only robustly lysed strains with full clearance, all trained clones only lysed a single strain with 4+ activity. While activity was expanded, the quality of action was reduced. Most expansion in activity was of a faint, weak plaque. Additionally, the trained phages acquired from MRSN15882, with the exception of 15882-8, gained further activity with respect to non-replicative lysis.

[0179] Even for phages with reduced or equivalent host range, the strains lysed by these trained clones differs from the parental phages. First and foremost, these phage clones are capable of lysing highly phage resistant strains (MRSN15882 and MRSN27989).

[0180] FIG. 3b shows plaque morphology of phage clones collected following 10 rounds of training on phage-resistant strains MRSN15882 and MRSN27989. FIG. 5 shows the result of host ranges of trained phages and parental phages on 100-strain diversity panel strains following 10 rounds of training. Lysis scoring is derived from a qualitative scoring system based on plaque formation and quality of observed plaques.

### Example 3. Phage Host Range Alteration is Largely Stable Even after Training is Completed

3.1. P. aeruginosa Phage Host Range Alteration is Largely Stable Even after Training is Complete.

[0181] The stability of host range expansion was assessed via taking purified phages and serially propagating them against strain PAO1. Clones that showed expansion, except for 20176-9 and 20176-10, which proved difficult to propagate to high titer, were serially propagated for stability assessment. Ultimately, four phages were assessed in this manner, 20176-4, 20176-5, 20176-6, and 20176-7. Three subclones were isolated following serial propagations. The host range of these subclones was re-assessed following purification. Ultimately, most phage clones retained similar activity as the originally isolated trained phage. In several cases, activity was lost but was still higher than the parental phages. This was the case for 20176-4-3. In two cases, host range coverage expanded relative to the trained phage clone. 20176-4-1 and 20176-4-2 both displayed increased host range coverage with 44% and 45% coverage when tested against the 100-strain diversity panel. Non-replicative lysis was observed on an expanded number of strains following stability assessment for all stability phage clones relative to the originally trained phages and the parental phages.

[0182] FIG. 7 summarizes host range expansion assessment. Three subclones were plated against 100 strains of P. aeruginosa following plaque purification and host ranges determined.

3.2. K. pneumoniae Host Range Expansion is not Stable Following Removal of Phages from Training Panel.

[0183] Once purified, phage clones were assessed for stability of observed changes to host range by passaging phages against a highly phage susceptible strain serially. Following five serial propagations on phage susceptible strain MRSN414780, phage clones were recollected and host range reassessed. Three subclones were collected from propagated lysate of 15882-3, 15882-6, and 15882-7. Interestingly, the proportion of strains lysing with full clearance of the bacterial lawn (3+ and 4+ activity) increased in all subclones. In the originally trained clones, only 1 strain, MRSN414780, was lysed with 4+ activity. That increased to 4 strains for 15882-3 subclones, 5 strains for 15882-6 subclones, and 4 strains for 15882-7 subclones, (FIG. 3). The strains lysed with higher level activity primarily expressed 03b and O1v1 LPS type loci.

[0184] The ultimate goal of our experiment was to isolate phages with expanded host range that could be incorporated in a therapeutic phage cocktail. While phage clones were not stable, improvement in host range demonstrated that the phages had expanded activity. With the incorporation of phage 15882-3 it could theoretically reach 75% coverage. With the best subclone collected following stability testing, we could still reach 67% coverage. In both cases, coverage was improved relative to the best performing phage cocktail in this lab, KPM1, which collectively covers only 71% of the 100-strain diversity panel. This is because the trained phages have a broader host range, and a better coverage against other strains not already targeted.

3.3. Lysis Dynamics of Trained K. pneumoniae Phages Compared with Parental Phages:

[0185] A therapeutic phage needs not only to form plaques on strains of interest, it also must be able to lyse the strain in a timely manner and should ideally suppress phage resistant mutants from developing. To assess these attributes of the trained phages, lysis dynamics of the trained phages was examined, which showed expanded coverage and compared with parental phages KEN22, KEN25, KEN37 and KEN39.

[0186] FIG. 7 summarizes host range of subclones collected following serial propagation on permissive host MRSN414780. Subclones were compared with originally collected evolved clones to determine host ranges following plating on 100-strain diversity panel.

[0187] Overall, following multiple rounds of training, phage clones displaying altered specificity and/or expanded host ranges compared with the parental phages were obtained when tested against genetically diverse 100-strain panels of global diversity panel of MDR P. aeruginosa or K. pneumoniae.

[0188] Altogether, 31 P. aeruginosa phages and 9 K. pneumoniae phages with altered host specificity were isolated and characterized. They were individually plated on a previously pan-phage-resistant clinical strain of P. aeruginosa, MRSN 20176 or K. pneumoniae MRSN 15882. Among these phage clones, 4 Pseudomonas phages and 3 Klebsiella phages possessed expanded host ranges. These clones were collected from phage-resistant strains P. aeruginosa MRSN 20176 and K. pneumoniae MRSN 15882.

[0189] Parental Pseudomonas phages KEN1, KEN10 and AFR43 each covered 37-40% of diversity panel strains. Pseudomonas phage clones 20176-4, 20176-5, 20176-6, and 20176-7 covered 42%, 42%, 43% and 43% of P. aeruginosa strains, respectively. Parental Klebsiella phages (KEN22, KEN25, KEN37, KEN39) each covered 26-36% of diversity panel strains. Klebsiella phage clones 15882-3, 15882-6, and 15882-7 covered 44%, 40%, and 38%, respectively.

[0190] The stability of phages was tested with the altered Pseudomonas phage clones having expanded host ranges to determine whether the observed spectral expansion would be retained after repeated propagation on a single host. The host range expansion was retained by most of the altered Pseudomonas clones. Among them, phage clones 20176-4, 20176-5, 20176-6, and 20176-7 were passaged against phage-permissive strain PAO1 serially over five rounds.

[0191] Lysates were then plated, and three clones were collected from each, purified, and re-plated against the 100-strain global diversity set to assess host range. Surprisingly, phage subclones collected from 20176-4 showed an increase in host range, while the remaining clones showed either retention of host range or a reduction. Phage subclone 20176-4-2, one of the subclones of 20176-4, was selected for use in phage cocktail development.

[0192] It is unclear why some phages retained activity after serial propagation better than others. K. pneumoniae phages collected using MRSN15882 showed greater instability in general than P. aeruginosa phages isolated using MRSN20176. The increase in higher quality lysis might suggest that given enough time, these K. pneumoniae phages may develop as specialists (phages with high lytic capability against a small subset of strains).

### Example 4. P. aeruginosa Phage Clone 20176-4-2 Shows Therapeutic Potential During Characterization

4.1. Phage 20176-4-2 Robustly Lyses Infection Challenge Strains of P. aeruginosa

[0193] Phage clone 20176-4-2 was selected to move forward for characterization to determine if the phage would make for a viable therapeutic phage. The initial work focused on lysis dynamics of this phage when tested against our infection challenge strains. Phage 20176-4-2 was mixed at a range of MOI values from 10 to 0.01 and allowed to incubate and mix with common infection challenge strains PAO1 and PAO1::lux, a modified version of PAO1 encoding a luciferase reporter cassette.

[0194] FIG. 8 sows lysis curves of trained phage 20176-4-2 compared with untrained parental phages on infection challenge strain PAO1::lux at MOI ratios of 10-0.01.

[0195] Phage 20176-4-2 showed robust lysis against the infection challenge strains, rapidly clearing the culture to the limit of detection at all tested MOI values. Bacterial culture was maintained below the limit of detection for up to 8 hours at which point, out-growth of probable phage resistant mutants took place. However, the rate of out-growth was highly dependent on the concentration of phage added, with outgrowth occurring more frequently in the highest concentrations of phage.

[0196] While 20176-4-2 is capable of forming plaques on strain MRSN20176, it does not robustly lyse the strain in liquid culture. At the same range of MOI values as before, the phage is unable to clear the culture to the limit of detection.

[0197] When compared with parental phages KEN1, KEN10, and AFR43, lysis of infection challenge strains shows minor differences. The culture is cleared to the limit of detection within similar amount of time, approximately one hour after mixing phage with culture. The infection challenge strain used here is broadly phage susceptible, including to all parental phages and our trained phage. All tested phages can suppress resistant outgrowth for only some time, with the trained phage suppressing for approximately 6 hours compared to 2-3 hours for AFR43 or KEN10, or 4-5 hours for KEN1. The longer suppression of bacterial resistant outgrowth and maintained rapid killing activity demonstrate that this phage has strong potential for therapeutic use.

[0198] Next, endotoxin was removed from the phage 20176-4-2 preparation via octanol/cesium chloride fractionation for incorporation into a phage cocktail (endotoxin concentration 0.00912×10⁶ EU/mL and phage titer 7E10\hat{ }11). The phage maintained stable titer over two months of storage (Table 4).

TABLE 4
Titer of phage stock over 2-month period.

| Time point | Phage Titer (PFU/mL |
|---|---|
| 1 week | 5E10\hat{ }9 |
| 1 month | 1.4E10\hat{ }10 |
| 2 months | 2E10\hat{ }9 |

[0199] Phage 20176 4-2 was assessed for compatibility and stability by mixing it with other top performing phages from the phage library, and for in vitro killing efficacy (FIG. 8). When the phage at various multiplicity of infection (MOI) was tested for antibacterial effect, phage clone 20176-4-2 robustly killed infection/challenge strains of PAO1 P. aeruginosa strain. For testing the antibacterial effect on a recombinant PAO1 strain, PAO1::lux, with which mice would be infected for in vivo study, the same number of MOI was tested. The phage infection in the recombinant PAO1::lux strain showed very similar antibacterial effect, verifying that lux gene recombination into the bacterial strain did not affect susceptibility of the bacteria.

### Example 5. Phage Sequence Analysis of Trained Phage Clones

[0200] The phage clones were sequenced to detect gene recombination, mutations, and single nucleotide polymorphisms (SNP) events that might be driving the observed phenotypic changes. Upon deeper analysis, four major sites of recombination and the presence of numerous SNPs were observed when compared with the most closely similar parental phage genome. Point mutations were identified in genes predicted to encode tail fibers. Additionally, mutations and recombination events were identified in genes predicted to encode DNA polymerase and RNA polymerase and other phage structural proteins (Table 5).

TABLE 5
Observed recombination events in trained phages

| Recombination | Region | Genes in |
|---|---|---|
| Event | Impacted | Region |
| Recombination | 2928-3362 | Two hypothetical genes |
| Region 1 | | Nucleotidyltransferase |
| | | DNA ligase |
| Recombination | 14649-15409 | DNA polymerase, two |
| Region 2 | | additional hypothetical |
| | | genes |
| Recombination | 20202-23559 | RNA polymerase, two |
| Region 3 | | hypothetical proteins virion |
| | | structure protein, head-tail |
| | | adapter |
| Recombination | 33487-33918 | Internal virion protein |
| Region 4 | 34806-36125 | endolysin domain |

[0201] Some phage variants gained the ability to lyse previously phage-resistant strains but lost the ability to lyse previously susceptible strains. Whole-genome sequencing results revealed that significant mutations had accumulated in the variants with altered specificity relative to their parental phages. Genomic analysis to identify the mutations responsible for host range alteration or expansion is still in progress.

[0202] Host range expansion was observed for six P. aeruginosa phage clones: 20176-4, 20176-5, 20176-6, 20176-7, 20176-9, and 20176-10. Despite possessing divergent host ranges, phage clones isolated from MRSN20176 had identical sequences. Single nucleotide polymorphisms (SNPs) were observed in the 20176 clones relative to the parental phages, including in expected locations like genes predicted to encode tail fibers. The 20176 phage clones were most similar to AFR43.

[0203] Host range expansion was only observed in Klebsiella phages isolated from strain MRSN15882, with clones 15882-3, 15882-6, and 15882-7 showing increased coverage. All other Klebsiella evolved clones showed a high loss of activity, (FIG. 3). Phage clones from MRSN15882 had more sequence divergence. Recombination events and SNPs were observed in expected locations such as genes encoding tail fibers.

### Example 6. Therapeutic Effect of PAM3T Treatment in a Mouse Wound Infection Model

[0204] Phage 20176-4-2 was incorporated into a modified version of a therapeutic Pseudomonas phage cocktail and tested in a dorsal wound model of infection in mice.

[0205] Purified stocks of 20176-4-2 were used to replace phages from an existing Pseudomonas cocktail in development within this lab, WRAIR_PAM3. This cocktail consists of six phages that collectively cover 85% of the diversity panel. Phage 20176-4-2 replaced two phages of the PAM3 cocktail, EPa11 and EPa16, to generate a five-phage cocktail which we termed WRAIR_PAM3T. All phages were purified via a coupled octanol ex-traction and cesium chloride centrifugation. This cocktail collectively covered 85% of the diversity panel, but with one fewer phage.

[0206] In summary, using the prepared 20176-4-2 phage, new therapeutic phage cocktail WRAIR_PAM3T was made. The current phage cocktail targeting P. aeruginosa, WRAIR_PAM3, consists of six phages, which collectively target 85 strains of 100 strain global diversity panel. To make a new phage cocktail WRAIR_PAM3T, two phage components of WRAIR_PAM3 were removed, and the “trained” phage 20176 4-2 was added (Table 6). Thus, PAM3T consists of only five phages but has expanded activity, with a combined host range of 85% of the diversity panel.

TABLE 6
Improved phage cocktail PAM3T against P. aeruginosa

| | | | | | | | | Host | | PAM |
|---|---|---|---|---|---|---|---|---|---|---|
| | | | | Host | Host | | | range | Comple- | ho |
| Phage mix | Component | Family | Genus | receptor | resistance | Antagonism | Antibiofilm | (% | mentarity | range |
| PAM 3 | EPa11 | Former Myoviridae | Pbunavirus | L-OSA, | Medium | — | −/++ | 51 | High | 83% |
| 6 components | | | | VL-OSA | | | | | | |
| | EPa15 | Former Myoviridae | Pbunavirus | L-OSA, | NT | — | −/++ | 54 | High | |
| | | | | VL-OSA | | | | | | |
| | EPa16 | Former Myoviridae | Nankokuvirus | A, B | Medium | — | −/++ | 35 | High | |
| | | | | bands | | | | | | |
| | EPa18 | Former Myoviridae | Nankokuvirus | A, B | NT | — | +/++ | 38 | High | |
| | | | | bands | | | | | | |
| | EPa22 | Former Myoviridae | Pbunavirus | L-OSA, | Medium | — | −/++ | 52 | High | |
| | | | | VL-OSA | | | | | | |
| | EPa43 | Mesyanzinovvirdae | Abidjanvirus | LPS | Low | — | −/+ | 37 | High | |
| | | | | core | | | | | | |
| PAM3T | EPa15 | Former Myoviridae | Pbunavirus | L-OSA, | NT | — | −/++ | 54 | High | 85% |
| 5 components | | | | VL-OSA | | | | | | |
| | EPa18 | Former Myoviridae | Nankokuvirus | A, B | NT | — | +/++ | 38 | High | |
| | | | | bands | | | | | | |
| | EPa22 | Former Myoviridae | Pbunavirus | L-OSA, | Medium | — | −/++ | 52 | High | |
| | | | | VL-OSA | | | | | | |
| | EPa43 | Mesyanzinovviridae | Abidjanvirus | LPS | Low | — | −/+ | 37 | High | |
| | | | | core | | | | | | |
| | 20176-4-2 | Autographiviridae | Phikmvvirus | NT | NT | — | NT | 46 | High | |

[0207] PAM3T was then tested in a mouse dorsal wound model of infection with P. aeruginosa strain PAO1::lux, with four phage doses provided daily both topically and intraperitoneally (Table 7 and FIG. 7). The therapeutic effect of phage cocktail PAM3T (Group 3) was compared with ceftazidime antibiotic treatment (Group 2), which reduced bacterial luminescence in wounds. However, the most rapid and robust antibacterial effect was observed for the PMT3T-ceftazidime antibiotic combo-treated group (Group 4).

[0208] To assess the efficacy of the modified PAM3T cocktail, a mouse dorsal wound infection model was used. Mice were infected with 10\hat{ }7 CFU of strain P. aeruginosa PAO1::lux, which encodes a luciferase to allow for monitoring bacterial burden in the wound by bioluminescence. Mice were treated with four groups: a saline control, ceftazidime alone, PAM3T alone, and a combinatorial treatment of PAM3T and ceftazidime. Wound size, clinical scores, and mortality were tracked over a period of 21 days. Saline treated mice displayed a high mortality rate during the experiment, with 7 of 8 mice dead by 3 days post infection. One mouse from the ceftazidime alone group died by Day 5. All mice treated with PAM3T or with the PAM3T and ceftazidime com-bination survived the full course of the experiment.

[0209] Wound size measurements showed that wounds were larger in mice treated with only saline or ceftazidime alone. Ceftazidime treated mice had average wound perimeters increase to over 29.29 mm by Day 7. On the other hand, phage treated mice showed maximal wound sizes reaching 22.5 mm with phage treatment alone and 17.5 mm with phage/antibiotic combination treatment, (Fig #). Wound closure occurred faster in cocktail treated mice. The first mice to show wound closure occurred on Day 14 and occurred only in PAM3T and PAM3T+ceftazidime treated mice. The mean time to wound closure in PAM3T and PAM3T+ceftazidime treated mice was 16.8 and 17.0 days respectively compared with 19.9 days for antibiotic treated mice.

[0210] The bacterial burden in the wounds of mice treated with the phage cocktail was dramatically reduced as detected by IVIS measurements. By Day 3, PAM3T alone treated mice showed modest reduction in bacterial burden compared to ceftazidime alone. However, PAM3T+ceftazidime treated mice had nearly undetectable levels of bacteria by Day 3. Wound closure rates, IVIS measurements, and survival data all demonstrate phage therapy efficacy and phage-antibiotic synergy.

TABLE 7
Mouse groups and treatment
(a) Mouse Groups

| | | | | | Treatments (0, |
|---|---|---|---|---|---|
| | | | | | 1, 2, 3, Days, IP |
| | | | | | and/or |
| Group # | # Mice | Wound? | Bacteria | Dose (CFU) | topically) |
| G1 | 8 | Yes | PAO1::lux | 1.0 × 10⁷ | Saline once a |
| | | | | | day (IP & |
| | | | | | topical): 4 |
| | | | | | treatments |
| G2 | 8 | Yes | PAO1::lux | 1.0 × 10⁷ | 410 mg/kg |
| | | | | | Ceftazidime |
| | | | | | (CAZ BID) (IP): 7 |
| | | | | | treatments |
| G3 | 8 | Yes | PAO1::lux | 1.0 × 10⁷ | PAM3T once a |
| | | | | | day (IP & |
| | | | | | topical): 4 |
| | | | | | treatments |
| G4 | 8 | Yes | PAO1::lux | 1.0 × 10⁷ | PAM3T once a |
| | | | | | day (Topical) & |
| | | | | | 410 mg/kg CAZ |
| | | | | | BID (IP): 4 & 7 |
| | | | | | treatments, |
| | | | | | respectively |

(b) Treatments

| | PBS | | CAZ | PAM3T | |
|---|---|---|---|---|---|
| Group | IP | Topical | IP | IP | Topical |
| G1 | Yes | Yes | No | No | No |
| G2 | No | No | 410 mg/kg | No | No |
| G3 | No | No | No | Yes | Yes |
| G4 | No | No | 410 mg/kg | No | Yes |

[0211] While 7/8 (87.5%) of control mice treated with saline died (not shown), the phage treatment protected 100% of mice from lethal septicemic infection (G3- and G4 group). PAM3T reduced the burden of P. aeruginosa PAO1::lux in infected wounds to undetectable levels within two days, and phage-treated wounds closed as rapidly as by Day 14, versus by Day 21 for positive control mice treated with ceftazidime.

[0212] FIG. 9 shows IVIS images of PAO1::lux infection of dorsal wound 24 and 72 hours post treatment of wounds with antibiotic, phage cocktail, or both combined, (a) wound size and closure following treatment with saline, ceftazidime, PAM3T cocktail alone, or both ceftazidime and PAM3T and, (b) survival of mice infected with PAO1::lux following treatment with saline, ceftazidime, PAM3T, or a combination of ceftazidime and PAM3T.

[0213] FIG. 10 presents FIG. 9 results in graphs, showing therapeutic effect of PAM3T treatment in a mouse wound infection model. FIG. 10A shows mouse survival rates. Only 1/8 (13%) of saline treated mice survived. As many as 7/8 (87%) of CAZ treated mice survived. All (8/8, 100%) PAM3T and PAM3T+CAZ combo treated mice survived. FIG. 10B is a graph showing wound healing (mean time to wound closure), and FIG. 10C table summarizes the results. i.e., it took 19.9 days in CAZ-treated mice, 16.8 days in PAM3T treated mice, and 17.0 days in PAM3T+CAZ co-treated mice, demonstrating the efficacy of PAM3T phage cocktail comprising the “trained phage”.

1. A method of expanding the activity of therapeutic phages, comprising steps of:
i. mixing taxonomically similar phages with complimentary lytic activity, wherein the taxonomically similar phages are, optionally, one or more selected from KEN1, KEN10, AFR43, KEN22, KEN25, KEN37, and KEN39;
ii. passaging mixed phages against a panel of phage-resistant bacterial clinical isolates, wherein the phage-resistant bacterial clinical isolates are, optionally, one or more selected from PAO1, MRSN 20176, MRSN414780, and MRSN 15882;
iii. pooling lysates from wells showing reduction in bacterial growth to form pooled lysate
iv. repeating steps (i)-(iii) using the pooled lysate;
v. identifying plaque formation on phage-resistant strains using pooled lysate;
vi. isolating phage clones from plaques formed in step (iv) to obtain candidate phages, and
vii. assessing host range of candidate phages; and
viii. optionally, assessing stability via serial propagation against single strain and re-assessing host range.

2. A method of developing phages having antibacterial activity in expanded range of multidrug resistant (MDR) strains of a bacterial species, wherein the bacterial species is Pseudomonas aeruginosa or Klebsiella pneumoniae, the method comprising steps of;
i. selecting at least two genetically similar phages, which have complementary lytic activity against a bacterial species, and determining the titer of each phage;
ii. mixing the phages at about the same ratio of each phage titer to make a phage cocktail to yield an input cocktail of 1×10⁵-1×10²⁰ pfu/mL, and optionally about 1×10¹⁰ pfu/mL;
iii. adding a volume of 10-20 MDR strains and a phage-susceptible strain of a bacterial species, which are individually cultured overnight in wells of a multi-well plate filled with a certain volume of bacterial culture media, in one strain per one column (or row) manner;
iv. performing a serial dilution of the phage cocktail of step ii (10⁰ to 10⁻⁷ or to 10⁻¹¹) in bacterial culture media;
v. adding each of the serial dilutions of step iv into a row (or a column) of the wells containing the bacterial culture of step iii;
vi. incubating the plate(s) with shaking, optionally at 37° C. overnight;
vii. pooling the lysate from the bacterial culture wells showing reduced bacterial growth or bacterial lysis;
viii. clearing the pooled lysates, optionally by vortex mixing with CHCl₃ and centrifugation;
ix. repeating steps iii to viii with the cleared lysate at least 5, 7, 10 or 15 rounds;
x. while performing step ix, periodically, optionally every 5 rounds, testing plaque forming activity with the cleared lysate, using a double-layered agar plate with a pan-phage-resistant strain;
xi. collecting individual phage plaques from the double-layered agar plate;
xii. performing steps iii to vii with each collected individual phages; and
xiii. selecting phages showing expanded host range when compared with parent phages;
wherein the method optionally further comprises
xiv. testing the selected phages against genetically diverse strain global diversity set;
xv. selecting phages from the phages of step xiv, which show expanded host range when compared with parent phages in step xiv;
xvi. isolating and purifying the phage particles, and sequencing their DNAs; and
xvii. testing phage stability with at least three clones of the selected phages; by re-testing them against the strain global diversity set to assess host range.

3. The method of claim 2, wherein at least two phages of Phikmvvirus genus are selected for the development of phages against MDR P. aeruginosa strains.

4. The method of claim 3, wherein the phages of Phikmvvirus genus are KEN1 (SEQ ID NO:28), KEN10 (SEQ ID NO: 29), and AFR43 (SEQ ID NO: 27).

5. The method of claim 2, wherein the phage susceptible P. aeruginosa strain is PAO1, or wherein the pan-phage resistant P. aeruginosa strain is MRSN 20176.

6. (canceled)

7. The method of claim 2, wherein at least two phages of Jiaodavirus genus are selected for the development of phages against MDR K. pneumoniae strains; wherein, optionally, the phages of Jiaodavirus genus are KEN22 (SEQ ID NO: 30), KEN25 (SEQ ID NO: 31), KEN37 (SEQ ID NO: 32), and KEN39 (SEQ ID NO: 33).

8. (canceled)

9. The method of claim 2, wherein the phage susceptible K. pneumoniae strain is MRSN414780 or wherein the pan-phage resistant K. pneumoniae strain is MRSN 15882.

10. (canceled)

11. A bacteriophage able to infect MDR strains of P. aeruginosa, wherein the phage comprises a nucleic acid sequence of any of SEQ ID NOs: 1-14, or a nucleic acid sequence of at least 97% sequence identity therewith and/or bacteriophage able to infect MDR strains of K. pneumoniae, wherein the phage comprises a nucleic acid sequence of any of SEQ ID NOs: 21-32 or a nucleic acid sequence of at least 97% sequence identity therewith.

12. (canceled)

13. A composition for the treatment of P. aeruginosa infection, wherein the composition comprises at least one phage selected from claim 11, and wherein, optionally, the composition comprises other phages against P. aeruginosa strains, said other phages being one, two, three, or four phages selected from genus of Pbunavirus, Nankokuvirus, and/or Abidjan virus.

14. (canceled)

15. The composition of claim 13, wherein the selected Pbunavirus is EPa11, EPa15, and/or Epa22.

16. The composition of claim 13, wherein the selected Nankoku virus is Epa16 and/or Epa18.

17. The composition of claim 13, wherein the selected Abidjan virus is Epa43.

18. The composition of claim 13, wherein the composition comprises EPa11, EPa15, Epa16, Epa18, and SEQ ID NO:3.

19. A composition for the treatment of K. pneumoniae infection, wherein the composition comprises at least one phage selected from claim 11.

20. (canceled)

21. (canceled)

22. (canceled)

23. (canceled)

24. (canceled)

25. (canceled)

26. (canceled)

27. (canceled)

28. (canceled)

29. (canceled)

30. A method of treating a subject having P. aeruginosa and/or K. pneumoniae infection, the method comprising administering an effective amount of a composition comprising at least one phage of claim 11, wherein administering comprises administration through a nasal, parenteral, or topical route.

31. (canceled)

32. The method of claim 30, wherein the subject has P. aeruginosa and/or K. pneumoniae infection in the lung, urinary tract, skin, and/or blood stream.

33. The method of claim 32, wherein the subject has P. aeruginosa and/or K. pneumoniae infection after lung transplant or is suffering from pneumonia, cystic fibrosis, bronchiectasis, bladder infection (cystitis), kidney infection (pyelonephritis), skin infection (cellulitis, burn wounds), and/or sepsis.

34. A method of disinfecting a surface, comprising applying to the surface a liquid, aerosol, or powder composition comprising any of the phages of claim 11.

35. A method of disinfecting a fish tank or aquafarm, comprising applying to the water the composition comprising any of the phages of claim 11, wherein the composition is formulated into a liquid, aerosol, or powder form.

36. A panel set of P. aeruginosa strains for phage training, comprising MRSN 317, 552, 1388, 2144, 6220, 6678, 8130, 8136, 8914, 12427, 13488, 16344, 20176, 20193, 25678, 26263, 358800, and PAO1; or a panel set of K. pneumoniae strains for phage training, comprising MRSN 4759, 6778, 15687, 15882, 22232, 27989, 479404, 511348, 614201, 681054, and 414780.

The application's sequence listing, which the Patent Office published only in electronic form, follows.

SEQUENCE LISTING (33 sequences)

SEQ ID NO: 1 - DNA, 42717 bp, unidentified
  source 1..42717: mol_type = genomic DNA
ggaaccgtgtatcgggtgcaggacctgatcgaccgagacctggaccggctgatggagaactacgccggcagtatgtcgggccgctcagcattggcccgcgcaggcatgccgggggactcggagatcgaagccttcatccgggagtaccagcgagaggcagcacacctgggcaccgataaggtgcaggagctgacggggcaactgcggggagtcttcggggacttcaccggcaacgtgccgagggagcatcagctcggcccggttgctcagcgggccagcggcctgaccagcgccaccatgctgggattctcaggcgtgtatcagctcgccgagctggccacgatggcgcaccgtcaaggcgtcttcaacgtcatgaaggccatgctgaactcccgcctgggagacttcgtgggcgccatgcgtcgcgacccggacctcgctgacgagatgcagaccgtcctcggcctgaacctcgccaacgatatccggatgaagccctggaagcggcagttcgacaccttcctggccagccaagataccttcatggatcgcttcctgcacgcaggtaagcaggctgtcccggtgctcaacggcatgaagttcattcacaactggcaatcccgtatgaacgccaacctcaccttgaacaaggtggcgcgggcggctcagggggatgaagcagcccttcgcgtgctccagcagtacgggaaggacgtggactggacgccagtgttggcgcgggttcgcggttatgtcacatacagaggaaggaacgcccaatcgatgaattggggcgcctggagccaagcagacgtgaacaccgtcatgaacaccgcactgcggatcatggacgactcgctgctgtacggcagggtcggtcagaactcgggctttgctcggtcacctgtcggccaaatcctgggccagttccgcagctttgtggccttcgcgcacaacaagctcctccggggaacctatgagaactccggcgtgcttggcgtggcctcgctcctcgcattccagtatccgctcaccgcgctgatgatgggtgccaaggcagcgatcaacggcaagttcgacacctctgatgaaggcatccgcaagatggccatcgacggcatcggctacactgccggtctgggcttcaccgccgatatgtggggtgtggtcactggccactcccgaatgtctgctccggtcttcggactggctgaacactccaacgaagtgttccgaggcgttcgagacctcgtaaccggcgacgacccggcagcagccactggcgatatcgtcaacggcgcggcgggcgcactgcctttcgtcaacgtgttcccggcaaccaagttgctgttggaatccatcaaaggggaatagcgtggctcggttcaagaaccccgagaccatccacgttgcagatggggtcgagactgtattcagtctcgacttcccattcctgcgtcgtgaggacgtattcgtccaggtcgacaagatactcaccaccgactatacgtgggtggacaacaccaacattcagcttgcggaagtgcctaagcagggccaagaggtccgcatcttccgcgacacccccgcccaagtgccggatacgcagttcagccagggcatcccgttcctgcctcgctacatcgacgcgaacaacaagcagcttctgtacgccgtgcaggagggcatcaacaccgcgaacctcgcactggatggtgttctcgacgcgatccgtatcgccgaggaggcccgccgccttgcacaggaggcactcgacgccgctaacgaagcgctgcgccgcgccctgggcttcgccgagattcgcaccgttacggaagactcggacatcgacccgagctggcgtggttactggaaccgctgcatcaccgctgataagccgctgaccctgaccatgcagatggaagacccggatgcaccctggatcgagttcagcgaggttcacttcgaacaggcgggtgtgcgcgacctcaacatcgtggccggccccggcgtgaccatcaaccggttgcagaacaccaccatgcagctctacggcgagaatggcgtgtgtaccctcaagcgtctcgggcctaaccactggatcgtgttcggagccatggaggacgaataatgcgcggcattatcgcgggcatcatggcctctcaaattcggcggcccaagcccatcttggcgacctacccatatcccatcctggctacggatgacgcatggtcttgtaggccgaacatcgtggcagcgctaacacgcgacaccctgcacgaggtgttgaaccagcccggagaggacacctaccacgcgacctccagtgtggtaagcgtgctgctgcggtcgctgactcagctcggctacggcggtggcgatgggttcctgacgggacctgccatccatgcagttttactgcgcgatacggttaaggactacaccgcagaaccttacgcattctcgtcgcagaccgcagtggtaggcgcggagttgaaggttgtggtcgtatactctgagtatatcgtggagccttacgccttcaccacctcaacagcaattaaacaggcggaactgaccaatgtttgagacgcgagttaagggtcgctacacggtgacccatatgaaagccacgggtgaagtcctggcgcaacacaccttcgacaacctcatcactaacgcaggtcttgattggatttgcgccatggatacctctgacctgttctcccaggccctggccgtgagtaccagcactgcggaccctaaccccgccgcgccctccctgccggaagaagttcggcgcaccacctcgtatgcccctaacggcgacgtgacctcgggcctggacggggagtggatttactggcacaagcggtggcgcttcccaataggcaccctggccggtcaggtactggccaccgtgggcatcgtagctcaatccgcggtggggtttgagagtaacaccggcgcgaagattccggcaggtactccactatcctacacccggatcaaagacgccgccggccaacccaccaccctggtagttcaggctgacgagattctcgacgtacagtatgagctgcgcagcaaggctgtggcgatggccgaggccaagttcgtgatctccggggttgagcgtaccatccgcctcaccccgctgcccttcgcgaaccggcgtaacctctacggtgagcgctacatcttctacaacgagagtccacggatcgacggcaagaatgcgtccggtgccgatgtccaagacggtcagtgggtgaagctgtacccgcgatatactcgcggcacctacaagggtcagcttatgctacgggccaccgtagataacggcaacatgccggggggtatcaccggctgtaaggacctaaagatttacaatgggcggaactacgcactcaccatcgaccctcccgtagtcaagaacaacactcaggagttctccattacaatggagttctcggtggcgagggcataacccatggcactgatctacgacttcaacgaagacctcgatcccaaggccaagtcgaagtttgtaggtgccagggcacgtcgtgacatcagcgacgtgctcgacttctgcgacggaggggtcgccatccaggacccctccgaggggctattcgtccgggtatggcgcaccatgctgcggaatgacggcacctacctcggctgggaggacggcaccaacgaagtgcgcattggcgatggcatcgacgcgggtatctcgacgatatccttggacttcgacagcaatatgaactacgtctttgtgttcgtccgcgcagacaagaccggcgccctatcgtacttcaacgtgcagcagggccgtcgtatcgtagttgagctgggccaagtggactatgccaaggtagccctcgacgacaagcgccccggcgcaactgcgtgggcacaggtcatcgtaccctacacccgaggcggtaacatgtacgttcgcacgcagaacgagaactacacccaggagcacctggaggtggacaccggcaaggtgttccggcctctggtcaagtgcggcatgggaaccaacctacgcttccaagtccaattcagagggcacatgtaatgagcaaaaagcagaccgcgagtgctgagcggctgggcctgcttcacgagctggtctgcaccgccatcgaacgcaacttcaagtggtacatggacaacgacatcccgatccccgcatcggatatcgctgccgccaccaagttcctcaaggacaacgagatcacctgcgatccgtccgacaccatcaacatcgaccggctccgtgaggaaatgcggcaggcgcaggcggagaaccgccgtatcgccctggagggcttcatcgccggtgagaccgacgatgagatggaacgactgtacacccactaggaggcagcatgacgccgcaagaacgattccagatagcccacgaggtgcgggacatgtacccgcgcttccgggacttctgcctggacgccatgctgttcctcggcttcaagatgacgtggatgcagctcgacatcgccgacttcatgcaggactcgcccaacaaggcgatggtcgctgcacagcgtggcgaggccaagtccaccatcgcctgtatctacgtggtctggtgcatcactcagaacccggctacccgcgccatgctggtatccggctccggtgacaaggccgaggagaacggccagttgatcacgaagctgatcatgcactgggaccttctggcgtacctgcgccccgaggcccgcatgggtgaccgtacctcggccaccagcttcgacgtgaactgggcattgaagggcgtcgagaaatcggcctccatcaactgcatcgggatcaccgctgccctccagggctaccgggctgacatcctgatccctgacgacatcgagaccacgaagaacggcctcaccgccaccgagcgggccaagctgacgcgacagtcgcaggagttcacctctatctgtacccacggtaagattctctacctgggcacgccgcagtcccgtgagtcgatctacaacggcctgccggcgcggggcttcctgatgcgcatctggccgggccgcttcccgaccctggatgagcaggaacgctacggtgactggctcgcaccttccatcctggcgcgcattgcccgcctggaggagaaaggccacaacccgcgcaccggcaagggcctggatgggacccgtggctgggctgccgatccgcagcgctacaacgaagaggacctgctcgacaaggagcttgaccaaggccccgagggcttccagcttcagtacatgctggacaccagcctcgccgacgagcagcgtatgcagctcaagctgcgcgacctgctgttcatcgacgccacgcatgagagcgtgccagagcaagtggcctgggctgccgatgagcgcttcaagctcaagttcgacgcccaccgattcccggtcatcaaacctgagctgtacctgccggcgctgatggctggcggctgggcaccactccagcaaatgacgatgttcgtggaccctgccggcgacggtggcgacgagctgtcgtatgccgtgggcgggactcttggcccgtacatccacgtcgtgagcatcggcggctggaagggtggctttgccgaggagaacctggagaaatgtattgccctggctgcgcgttatggcgtcaaggtgatctatgtcgagaaaaacctcggcgctggtgcagttggccagctcttccgcaaccacatgcgatccatcgacccggacaccaacaagccccgctatgaggggatcggcgtagaagaccgccagaagtccggacagaaagagcgtcgcatcatcgacaccctgcggcccatcatgcagcggcaccgtctgatcttccacgtatcggcgatggattccgaccatgtggcctgtcagcagtacccagcggacaagcgcaatgagcgctccgtgttccaccagattcacaacatcaccaccgaccgaggctcactgccgaaggacgaccggatcgatgcccttgagggccttgtccgcgagctagcacccacgctcgtaaaggacgacgaagccgcaacccgcgctcgtgaagaggctgccaagaaggaatggctgaacaacccgatgggttacactaagtctgtccttcggtctctcggcatgggccgggagcgtcgcaagggccgcccaaaaggacgaagactatgatgctcgataccgccaccgaggcgggcaaaggcaccctcgccgtcaccggcgtggggatcgccgtttactcgccctatgagatcgccagcctctgtgctgcggtactcaccgcgctctacgtgggcgcccagctcatcaccctgctcccgaagatgctcgatagcatcgcggagcttcgccggaggttcaagaagtgaacaagcccctgcgcggcgcagcccttgcggctgccctcgccggccttgtcgccctggaaggtagcgagaccactgcctaccgagacatcgccggcgtacccaccatctgctctggcaccactgccggggtcaagatgggtgacaaagccacaccggagcagtgctaccagatgacgctcaaggactaccagcgcttcgagcgcatcgtcctggacgccatcaaggtgccgctgaacgtcaacgagcaaaccgccctgacgttcttctgctacaacgtgggtccagtctgtacaaccagcacagcgttcaagcgcttcaaccaaggccgcgccactgagggctgccaagccctggccatgtggaacaaggtcacgatcgacggccagaaggtcgtatccaagggcctcgtgaatcgccgcaacgcggagatcaagcaatgcctcgaaccatcgtcgcaatactcgtccttgctgtggtagccctgggagcctcatacggcttcgttcagagctaccgggccttgggtatcgcccaggaggagatcaagcggcagtcggcccgtgcggaggccctggaggtgcgctatgccaccttacagcgccacgtccaggaggttgccgccaagaccaacacccagcgccaggaggtggaccgtgccctggaccagaaccgcccgtgggctgaccggcctgtgcctgctgctgtcgttgacagcctgtgcaaccgccccggcgcccgctgtgctgtgcgaacacccactgattgaccctaccacccaggctggcctgatccgcgctgtagcggcctatcaggacgccctggacctatgcaacgccctgaatcaaggagactgaccatggcgaacacccgtgaccaatacctcgctggccgtaacaccggcctgaccttctaccaggtatgccagcccggcaccgacaaccgcatcgccctgcacgacatggacgaggccgatgtcaaggccaaggccaccgctgtgatcgcagcagccaccgccctgggcggcgagggtggcgctactccaccggacccgctcaccgcctacaaggtgaagaacggtgacaccctgcccgtggacggcggtggttccgtgaaggtgaccgtagccaacggtgctatcaccaaggtcgtatacaccgcaccggcgggctgagctacagccccgtccaacctgactccatccataacacaaggaactgaaccatggcaaccttcgccgctgcaactcagaaagacctccgcgccttcgccggcaccatcgagaacctgatccgtccgctggaagaagcggccctgggttctggctacaacgagaccaagctgcgcgctgaactggtcgcgcatctcgacgagctgatggctgctgtcgagaccgccaaggccctggtctacaagtgatcgagtagctcaagccgagcacctgcatagtcgggtgctccactggaactactggaattttattgaggtcggctggaaggctggctggattggctggcctgggctgggagtagttactccgggtccaattttgatatcgtcgtgtgagaaccctcccgactctgatcagcccacccttcccccgtaggccctccgtctggtgggccatcccctcgcattgcctgggtggtgcctgggtcatccctgggagcttccggcttcgccgggtggcggtgggcttccctgcccttcgccgcccattctacgcatcctgccgggagtgtcaagcccctggcggggtggcggtccatcggctcatactcagcgccctgcggtgcgccaccagcgctagcctccggtcatccttggccctggccctggccgctgggtacgggctgtgctgctcatcctctgctgcccacctggctagcttccgctgccatgctgcgtcgtgctggtgccaggctcgctcggctctgtcctgtctgctcagcatctcgttcctcctggggcctctgccctctggtctggtggtggttgcgggagtggctggccttgcctcttgtgcttgggctgtgcccttgccctctgcctggctgcctctgccctggagcttccctggtcctacctgggttgttccctctaggccgcgtactctactcgcctctacctggcttgtctagtcctgctccctgggtctgtctccctggcgctaccgctggtcctgctgtcttaccctcgccactccctcggcctgcctcggtcgcgccgctggcgctgatggacgcctatttgtccattgtgtgtgacataaccgcagccttagtgccacgcgggtttcagggtggtggccctggctgggtggctgctccctgggtggtggatttgcgttacctgggaacgataatcctggctagccagactaagcctcgcacgcgtgggtctctatacgcgtgggaaggctccagggagcgccctggcgcgggtattgacacgtgggcggcaggtctgtagagttcgccctgtcttcacgcaacaacgcctctacaggcagcctggagacaggggttgacaccctgccaggacatcggtaggatgcgcagccagaacgacgggagattgcaaccttccaagcgcggcacaagccataggcgcaagggacacggcaaactcttagggcatgaccaacgatgtgtaaggccggcaggcatcatcgcagggattgacacggtgcaggacacgcggtacagttcgcaccacctgatggcccctcagcaaaagggcctatgccggagaactggacgaactaatccccgacagaggattgacaagacaagcgcaagtctctaacatgcgcggcaagacgaaaggatggctgagccatctggcggtagaggttcgaagcttcaccagcggtacatggactggtgcggtaggttgaccgaagctgcaactggttaggcagggttccagggaatacctgtcgggtgctgaagactcacccaaaagagtctgagcgggaagcctccccgtccacggttaagcaaagggcctatggtaggtccggtgggaacgaatagagtgtcagtgggatcgggactagaatacccggttaatcgcgactgacagtatgctgggtagtatcggcgggccgattgaacaaggccaggcagatagcgcaaagggtacgggggatgagtgaagacgatcccgaagagtatgcgcaggacaagccagaaccgctgatactacagggactatgccaatgccaaggtttgtcccttgaggcccttccaccgaggggattcaagagacagacctagtgaggattgccgatggcacacttcaaggctaaggctcccaagtcaccctttgctgctcaggtagcgtactggcgggactgggaagccaaacgtactaagctcatcgcacaggataacgtcgaagggcgcaaagagcttcgcaagatgcgtgacgtgcgctacgctaccgacccggagccagcgccaggacgctaccacaaccctgaacagaaggctttcgtgaagggtagcgaaggcaaggcgcggaacatcctaaaggggtggaacgctaagaagtcgcaagggaagggtttgtaatgccacgtgtgaatgaactgacgccgcgtcaacgcaaggccgccaaggctcgccgcgacaaggcacgccggattgatctagcgcacaggatgccgaaaggcgccgactgcccgatcttccgcaaggctgagcaggcgcaagctaagcagccccgcgtcgataccctgaccactccccgcagtgctggctacctggccgccgctgcttacctgaacaaatccatctgaggtacataccatgaccaacgcaatctccaaaaccgtaatcgcattccgtggcaccgaagagatcaaccgcgctatcgacgccatccgtgtccgtggcaaggaactggacgaagccatccaactgaccggcctgtcgatcatccaccacatcgaccagtgcggcgacgtgaccgtagtcaaggcgctgtatgaagccatgccgaagggcagccgccgcaatgcgctggtcgagtggttggtgctgcacggcaaggtacaggttaacactgacaagaaatcgaacaaggacctacccttcctgtacaacaagttcggcaagaccgatctcgtcggcgccaccaacagcccgtggtacagcttcaagcctgagaaagcgctggaccaggagttcaacctggctgctgccctggccacgatcaaaaagcaggtgctccaggctcagaccaagggcaaggtgatcgtcggcatggaactgctgggtgacctggaagcgctggccgccaaggctgcacctatcgctgagcagagcaagcgcgctgctgcccattgactcaagtcgaacgcctgctaagcgggcgttccgctggaatcaatgacaactggagaaacacgatgagcttcaagcaacgtctgcaacgccaaatcgccctggcacagtacagccgcccggctcagttcccgtacggcgagcaggccgtccaggcgaagggggagtgaccatggacttctggatcgcccttcccttcctcgaactcggcctcaacctcggcgaggatgaactgcgcatgttgtggttcagcggcctgacggtactcttcatccacctcctgaagcggtgactcaagtcatggccctggcgggcgaccctcgcctactccggggccattgctggactcatcacaagcgagaactaaaccatgcaagctttgaatactctgttgatcgcaatccccaaggacccgtcgaacgcattcaacgcagccgacaaggcgctgtgcgcccatggcttccgtatgggtgacctgaataccgcgcacgtcctgaccccaggcgggttcgtggtagtgggcgccggcgtaactgtgaaccgctatgacgaagcgtatcgcctgagccgggacctggactctgaaggattcgacgtgctgctggtacagggtagcccgctgtccgggcacgtcacctgccaggcgtatggctggatcaacgctgaataccgcaagggctgcgcgaacgggcgcccgatcttcgacattgcaggaacctcgtaccatgtcctcgcgtgatccctaccgtatcggccaccgcgtggggctggtgaactacagcgaccgctacctgggtgccgacgcggcaggcaccaagggcatcattgaagccataacccgaccgtcccgctgtatgacgatctaccacgtacgctgcgagcgtaccttgcgccttatcgaggccgaggcccgtaacgtgcggttcatcagacagctaccgacccgtaaatgaagtggctcatcatagccgtcagcccatcaggaggctgtgccttcgtgtggagtcgcaagcgacctgtgcgtccattgcgattctactcacgcaaggcggccaaacgctggcttcgcaagcatcgccgatcggccttgcttgggagccggttcctcatcgtgaactggagcaagcgcatatgaatcctacctacgtcgtccgtctcaaggacggaactactcgccaggtggtagccgacagcatcgtcgccggccacgccttcgtcgaactctggttcctcggcggcgcggtcgctatctacccggcctgtgaagtacaagaggtgcatcgcactgacctcgtgaaggagggcgagtaatgaccgtcaagaccatatatgtcaagcctgaagacccggcgccgccagtcttgtccgtaggacgcctgtcaccaggtgaactctacaaggtggtgacgcctagcgtggcagagggcgccgttgtgctggcgaccaagcagacgcccgccctcgctcaggcagtcatcgtactgcacagcatgaaccccgcgcagtacgcggtgggtacggccattctcaacacagactggcggtgccgccgcctgggtgcgggtgagtacatcaaacttgttcaaggggaggccggccaatgatcgccgcgctgcttgtactcggcttgtactgttgcctcggcatactagcaggcgcctgctactgcatcgcagtgtcgccgccgttcgagaacccgacggaagtgcagttccaggacgcatgcgtgatcgggtgcttctggccactcataatcatcgtgggcacattcctggcactacgtgcagtaggccggggcctgctgaccgggctgaagcgtcacctgaacatcaaataacctaccggaggtaacatgatccgcacccatacccacaacaccgaccgcgagcaacgccgtctcttcgacctcacggaattgcgttccggtgagatgtatcgggtagtgcagcccgaggctaagcgcggcacactggtgatcggcgtagcagcttgggacagcacgggccgtcccgcagtgctgcccgtggttatccatgacgacggccctgccaaggtgaccggtccgcgtcccaccgtgctgcgcaacgacgggtggcgcatggccctcgccgacaaggggacccaggtgacactcaccgccgagtgaccaaggcgaaggctggtgcgccagccttccaccgtggccattccttgccgcgaaccaaccaacctctaggagctacatcatgaccaacaccaccaccgaaaccaccgtcgcaaccgtcctgggcgccaagctcatcaagaagccggccaccgtcgaagacttccgcaacaacgtcgtcttccaccacaacgccctgaccaagctgaccgaggtctacaacgaagcggtcgtcgccctgcaaaccgccgagcgcctgtccagcctcgttgccggcgacgtgatcaccttcgaccacggcaagggcgagaaagccgaagtgctgagcggcgaagtcatcagcgtagtcgccggcgtctatcaggtactggtgcgcttcagcgacagcgccccggccaagctgctggacgtgaaggccggtgccatccgcgcagtgcaggccccggcagcgtccgccgagaccctggacgaagccatcgcccaaggcgagtaaggcccgcacgtaataggcctggccctgccgggcctattgcgagctagccataccataggaggagtcaacgtgagcaagcacaaccccgagcacatcagcggcccggtacgcagcgtgagcgtacagaaggcacccgccatccaggccctggaagatcgcctggaatccgccctggctgtatgcgaggagcgcgcccaggatatcgacaccctgagccgccgcctccaggccgccgagcgggcgcgccgctgggagatcgacgagattcgcagccatcaggcgacgatccgtctgctccagaacgacttgaacgcagcgcacgatgcccacgaggcacaagagcgccgcgctcgcaaggcaaccatcatggcctgggtatgcctgctgaccgcaggtctggccgtaaccctgaaactggcaggagtctgacaatggaatgcaacgatcacttcaccaagctggcggccagcatgttcggcgtgccgtgtgccaaggtatccccggagatgcgccgggtggccaagagccgggcattcgcccacgcctatacgcccaagaaacaggcttcgggcgggacttacaccgcccgtgtgagcggcgtcacctgtgacggtggtaaggtggaggtgcgcctggataacgtggagcgcgtcagcacctgtggctatgccgatctagaggcgcgggtagcggccagcttgtgccaggccgacgcgaagcgcgccgatgagtacgaaaaactgctgctcaaggtattcccgctggtatcgaagaaggccggcccgctgtccgccaaggacttcgaggtacgtctacacgatctgcacgtaaccaagctggcggtaaaccgtgccctgcgcgatgccggaatagaaatggacggaccgctgcgcagccgggtacggaagcttgcggaccggaataacgagatgggcgctgaactgttcggcctcaagcagggtttgacccggctggtggaggtaggtcaacgggccggcctgtattgggacggcgcggagactcagcgattgctgacggtggccccgaccaaggccgtctgtcagctcatcagcaagctgaccggcgtgcggtataccttccgcgcttccgtggcgaaggctgaggccgaggcccgtgagcgggcgaaggcggcggctaaggacacctggcaggcagcaaccttcgcagccaccatcgccggcggcgtcgtgggtagcgtgctgacgtacctgctcgtctaagcgaccagggcctactccggggtcaaatccgagggcgttcctagagcgccctctcgtgtgagtctggaggatcacgaacatgcaataccatttcacgcattacaacggataccgcttcggcgtcgagctggaggacgaggctgtcttcccgtgcatcgacggtaagcgggcaacctgggacaaggtggcggcgtgtgccggcagccttgtgcattacatggcgcaggacctgattgacttcggccagcgcaagttgagggagatcgaagatgagcaagacgagcctgtatccgctgagcctgcatcccggcctgattcaaatcaggacgatccacgtattcagcatccaagccccgagcaacgccgagaactggtggcagtggttcctctggcagcggaagtaccacccgctccgggaaagcctgagtccagccggggagctgagtgcgagtatcgccgagtgtgtgctccacctccgccggagtggctggcaagatagcgacatctggcgcaagaagggaggcgtgctggccctcggtgccttcgacctgtcaggtctgatggtaggttcctgcctcgtagtgggcggtgaactgaaggccctgtgcgttgatgaccgacacagcaggcagggtatcggcgctgagctggtgcgggccgccgagctggcgggtgccgagtatctgacctgcttcgagttcctggagccgttctacgccgacttgggctggagcaccacccaccgcgaggcgaactggacagcaggagagccggacgtgttgcacatgagggcacccggccatgacgtatgaggtgatgacatggcttatcgagaacaaaccgctggtcatcggagtcgccttcagtctggtggccctgggcgtgctgctcacacagaacaacggcggcccgcctacggcgcccgcatgacctggcacctccaggacatgttcgaggcccgaggtgggctgcggcctttgtgggaggaatggtaccaatggcactgcgccgcgactcctggctaaagcaagcgcaatccctggcggttgggcaggtaggccggttccgacacgtcctgggatgcaagagcatgagccggggcgggaccaacatgacctgcaagaacctgcctgaccgctgggtggcttactgctactcctgtcaggagggtggtgtggtcgagaaaacgcatgtgcggagggtacaatgcgcggatcaagaacgcttcatgccctggcccgaggatgcctcggactggacgcaagccgactgctatcaatcgctttatggtttgctgctgtccaagggtatcgactacaacgtgatgacgccagggctgccgctgctgtacagcgaaaggcagcatcggcttatcttccctaccaacgcgggctggattgggcgcgctactgccgaccaaaatcccaagtgggtgggctacgggtatcctgccccggattaccatggatggccccaggaattatcaatgggcaggccatgggtgctgacggaagactacttgtcggcgctgaaggtgcggtgggcctgtcccgaagtctttgctgtcggtctgaacggtacaaggctgcgcgacaggctggcggcgatcatgttgcagcagacctgcaagcgcgccttcatcttcttggatggcgacccggcaggtgtccgtggtagtgcaggcgtgatgcgccggctccggtccctgcttatcgaaggccaagtaatacccacgccggacgggttcgatcccaaggacctgacccgcgagcagataaggagcctagtaattggacgtattgacgctacacgcactgagtgacaaggaccgcttccgcacgttgcggagtgtggtgcctgaagggatgatggggccggagacgtgctttgtcatcgactggatcgagcaatactggaaggtctacccagcgcatcagaaggtagacccgcaggcgctacgcgaactgataaagctgcgaggtggctaccagccggagcaactggcggtggtcctgaacctcgtcaaccaactggacaagccggtagacccggactcgctacagggcgttgtgtcccagctcaacgaactggatttttcaggcagggtggatgccctcctggcgcagtacaaccagggcgaagacatcgacctggcgtatgagctgcgccggctgagcgacgaggccctgcgccgcgagggggtcagtacgccgaccgactatgtgacggacgacgtgtttgatatcctggcggaggagcagggtgaccacggcatcaagctgccggggctggtgcttccggcgtacatgaagggcctccacgccggggcctcggtgctggtggcagcgccgcctgatgcgggcaagacctcgttcatggcctggatcgctgtccatatcgcgccgcagctcaagcggtacttcgaccctgggcggcccatcctgtggctgaacaacgagggcaagggccggcggatcaagccgcgcctgtactcggcagccctgggcatgaccgtgggcgagattcttgccctggacccggaggaggttcgcaggatgtacgccgagaaaatcggcggcgactctgagctgatccgcatcaaggacttccacggtgggtccctggcccaggccgagcaggtcattgacgcgatgaagccggcggtggtgttttgggacatgatggcccacgtcaaaggtggccagcgcaaggaccagaaccgcaccgacgagatggagtacaaggtggccgaggtccgcgagatggcggtgcgtcacgacttcatcagcttcatgacgtggcagatcagcaacgacggtcacgaccagttgttcccaccgcagtcctgcctcaaggattcgaagacggcggtacagggtgctgtggacgtgcaaatccacctgggccgtctcaacggtgcggatcaacaggtcatgcgcggcctgtccctgccgaagaacaagttccagatggacgggaagccttcgaacgtggaggctatgattaacttcgacgccgcacggtgtcgtttctttgagagtgtagaccatgcaagctaagcatagccgggtgctcgaaggcaccaaagaaattccactgggttccattgcactgccgaccggggtcaaggccctgttgctgcgcctgtactctgatgcacggcccaacgagggcgtcgccctggccggtgggttccctcgcgacctcatgcatggcgccactccaaaggacgtggacatcgccctgtacggcatgacgcagtatcaggctgaagtgctcatcaacagcgtgcttcctaccctggacccgcgcttcgtccgggacggtggctggagtaccgagtacgccgacgcaggtgagggcggtatcttcaagggcgtgatatccctggtgggctgccgtggcctggaaggcatggacgtggacttcaactactacgatgccgacagcctcggtcgggtgatggagtcgttcgacttcaccatcaaccaagtgggcatcgcgtacaactggccggaccccgagggcggcccgcgactgggtgtgtacctgcacaaggacgttacctggggcgtgaacaaggaagttggttccggctcgcgactgccggagcgatgcgaaaagatgcgggccaaggccgcgtactacggatgggagaacgtgtgatgagcaagcgcgacgtggtattggatatcgagaaaggcatctggcgcggcgtagatcagaacgacaaggccgtcgaggccatcatcaagaagcacgggtacgtgatcgtcgagcctaagatcgacgggtgccgtgccatcgtgggtgcgcacggcgtggtatcccgcagcggccgccgcttccctgccctggacggcctggaggatcgcatcatcgcgaaactgtcccagcccggcctggactccggtctggtgttggactgtgagatgtacctggaaggcatgcccttcagtgaggcgaccgggcgcatggcccgcaagaccccgctgaccgaggccgagctgaagtgcctgcacttcgcggtattcgacgccacccatatcggcgtgctccgcaaatcgcgcaagtcccacctcatatacgatgagcgccgcgccatggtccgcagcctcatggaagattgccggcggggcgacaccccgtacttcttccaggtagccgcacaatcctgccgttctatggaggcggtactacgctggtacggctaccaccgcgccatgggcttcgaggggtcgatggagaaagacccgagcctgacctaccgcaacggcaaggttgctggctgctacaagcgcaagccggagatcaccgtggacgggcgtatcgtcgggtacgtgatgggcaagactggcaagaacgtgggccgcgtcgtgggctaccgtgtggagctggaagatggttccggcaccgttggcgccaccggcctgagtgaggagcacatccagctcctgacctgcgcccacctcaacggctgcatcgacgaggccatgccgaactatggacgcatcgccgaggtctccgcgatggaacgctcagccaacaccctccgccatcccagcttcagtcgcttccgcgacctggccagtaaccctggagtgaaggtatgaagattcgaaagtcccataaccgcaactacccggaagatatggtataccacgccaccaaccgggattcgctgctgtatccgaagtacgtcatgggttccgtgttcatcagccaggacggaacattccgcatctgcgtcatggcagggacttgggaccacgttgggtccgaagttcggcatcatgcgcgggacatccaatccctcggcgccggtcgccgtaagttgcaccgggtcatgcgacgtctgcgtcgcaatctgcgacaggtaggagtcaaagtatgagaatgcccaccgaggaagaacgcatgatccgctgcttgctggcggatatccacgaacccctggacctgctgttccccggcctccgcaccaaggcccatatggacccgcaagcggaagagctgtcgattcgaattgactacgaccatgcgaagctgggccgtatgggattctgccacgcggtctccctgtaccaactgaccatatggggacgtgaaggaatggtccgctacctgatgcaggagattccccgccgtgtgctggaaggtctactggtcaaggcgcagcagtacagtcaaagcaactggtacagcaaatgacgactatccgaatcctcgacctcgaaaccgagagctacgagcacaaggggcgcaaggcgtcgccctttgacccccgcaactacatcgtcatggccggctggcgggacgatgttgacggcaaggtcggccagaaggtggaacatcgcttccgcagccgggccgaagccgaagacccgaacaaccgctggttcaacctcgacggcgtggacgtgatcgtagctcacaatgccatgttcgaatcgaactggttcttcacccgctaccgggacgagtacctggccttcttgcgacgcggtggccgggtctggtgtacccagcaagccgagtatctgctgagtcatcagacgtggctgtacccggcactcgacgagctggctccgaagtacggcggcacccacaaggtggacggcatcaagatgctgtgggaccagggtgtgctcacctcggagatggaccaggacctgctgagcgagtacctgtccggcccgtgcggcgacatcgagaataccgccctcgtgttctacggccagctgatgaagcttcaggcccgtggcatgtgggctggctacctggagcgctgcgaggccctgatcggtttctcggcgatggagtgtgccggcctgaaggtggacctcgaagtcgccaaggtgaaccacgccaagcaactggaagaggtggccgggatcgaggccgagctgaagaagctgatgcccgacttcccggaatacttcgagttcaagtataccagcctctaccatatgagcgcatggctctacggtggcgaggtgcggtacaagggccgggtgccatacgaagatggccggatggagaaagccgacttcgtgcgcttcggtacggccaagcgggggactccaatcgagagtacctcagttcgggtcccgatccatgaagtgaccgaccagggtgagtggcactggcccaccatcaccgagctggcgaccaagcacggcccggtcatcacgttctccgctggcaagaacaagggcagcgtcaaggtgttccgggaggatacggacatcccggcgaccaagtgggatgatgaccagcgattccggttccccggcctgatcaacctgaccaaccttccggaagtagtgcgtgagaaattcctgggcaaacgcccggagttccagtgcgccctcaccctggcggatgggtcgcccgtgttcagcaccagcggcgacgccctcaaggctctggagaaacagggcttcgaggcggccaagctgttgatgcgcctggccgagctgcacaaggacaactcctcgttctacatcacccacacctacaacaaggatgggacgattaaggacacgaaggggatgctccagtacgtggacgacgacggcatcatccaccattcgctgaatacgacggcgacggcgacaacgcgtctgtcgtccagccgcccgaacctccagcagctcccgtcgaaggacgaggacgacccggaagccggcagccgcgtgaaggagatgttcgtgtctcgcttcggcgcggacgggatgatcggcgagaccgactataccgccctggaggtggtgatgttggcggccctgtcgaaggatcggaacctcctggcgaaactgatggccggcactgacatgcacttgtaccgcctggcagggaagcacaacaactggaacgggttcgactacgaccagctcgtggccatcaagaaggaccccaaccacccgtggcacggtcgcatgatgcaggctcgaaagaacatcaagcccaaggcattctcggcgcagtacggcgcgagtgcggctggtatcgcattcaacaccggctgtaccgtggaagaggcccaggaattcctggacaacgaggcggccctgttcccagagtccatcgcattccggcagatcgtccgcgacagtgcagaggccaccagcctcgtaatgtacaaggccgaggaccagatgccggcaggcgccttcagcgagatggggccggatggcaactggcgccagtaccgccggggattctggcaagcgcctggtggcacctgctacagcttccgccaacaggagcgctgggacaaggaacagcgcaagacggtcatggacttcaaggacacgcagatcgccaactactggaaccagggcgaggctgggttcatgatgaccgtgagcgtagggcgcatcttccgttggatgctgcatcgcccaggatttatggtcaccgagttcctgatcaacaacgtacacgatgccgtgtacaccgactgccacaaggacaccgccgccgaggtcaaccgtggcgtgcgcgacatcatggccgacgctgcccgctacatgagcgagcgattgggctacgacatcgcggacgttcccttcccggcggtggccgagatgggacccaacatgttcaacatggacgtgatccgggactaggccgaccctagcctactccggccttaaatcttcattcgacacgagagagaccacgcatgactcaacaactcaacgctctgcaagccgccctcgccctggccaacaaggctgccgagaccgcaaccatcgacatgtccgaaacctccaccggcggtggcggcggtcgcatcttcccggcgggcaccgccatgggccgcttctgcatctacatcgagctgggtgaccacgccaaggaattccagggcaagctcaagaatccggcgcctcaaatccgcctgggcttcgcattgtggggcgacgtgaacccgcaggccggtaacccgcagagccgcccggacgacctgttccacacctacgaggccgacggctcgatcaagcccggcctgttccgtaccttcgagatgaccctcggcaacaacgaaaagtccaagaccaagctggccttcgacaagatgaactggagcgggcagcatacccacttcgctcagatgctcggccaggcgttcatcatcccgatcaagcgcaccaagatcaccaagggcaacaacgccggtaaggaacgcaacgacatcgattggggcggcatcatgaagccctataacccggtcgatggcagcccgtataacgtgccggaactgccgatggacctgttgcagtatttcttcttcgacgcgccgaccaaggagacctgggacgccctgttcatcgaaggcacctcggacaacggcaagtccaagaacttcctgcaagagaccattcgctcggccaccaacttccccggctcggccctgcacatcatgttgggcggcggcgatgatctgatcatcaagccgacgacccaggccgcaggcagcaacctgccggcagtgcccaacgtggccgccgacgccggcgtagcggcagcaccggctgtcccggctgttccccaggcagtggctcagacggcccccagcgtgccccaggtggcgaatgtggccgcccctgtggtaggtactgccgaggcacagaacgtgctgcctgacgtgccccaggtggctcagacggcggctccggcagcggtcgaagtcccggcggtcccggtagtgccggcagtaccgcaggtctaatgcgcctgccatcggaagagttcctggcaggactatccgcgcagttcgaccgcagcatggcaggcgggacgttggtgtgtgacgccgacggacccgcctatgtggctgcggccactgctaagaccctggacactgcactccgaagattctggaagctcattttggagcagcagttcctagcgcactgcacagggacacgggttcacctcacggcagcaggtggggcgaaggcgtaccgcgacacgtatccgaccatgaaaccgtaccagggccagcgcaagggcaaggcaaagcccgcgctgctggagccactgcggcgggccgtggcggacgtgcatgagcgaggcggggcgccggaggggatcgatgtcatcctgcacacgttcttcgaggcggacgacggcatgatgatggacgcctacgccatgcaggacaaggccatcatccggtccgacgacaaagacctgcggatgacgatctacccgtattgggagatcgatacggcgtgtgtgagcaggatcgagggcggattcggctacctcaaggaagcgtacacgccttccggccagttcaagctcaagggccatggacggaagttcttcttggcgcagtggctcggcggcgacaccgctgacaacatccgagggatcgatcgattcaacggtaagctctgcggtatgaagacggccttcgacatcctccatccgatcacggatgaggacgaggccatcgacatgatcctggaggcgtacgccaagatcaagcaaaacccgctggcagaggccgaggtgctgtggatgcgccgaacgcctaccgacaacgcagcgcagtatctgttaagccgcgaccttcgtccggccttccgccagtggatcatcgagctggacgcctaccacgaggcgctgctccagaagcggagggagagcgattatgacgagtgagccgaaggtctaccagataccgcgcagtcaacagcgcaccttcaccctgaagctatgggccgagcagaacaagctgtgcccgctctgcggcaagcccatcgatatcagcgtgaagggcgaagcggtgatggaccacgaccacgaaacggggctggtgcggggcgtcctgcaccggtcctgtaacaccgcagaaggcaagataacgaatgcggcaggttcctggggatgcaagtcgatgaagtattccgacatcatcccctaccttcgtgccctcctgacgtatctggaggggccgaagcatccgctgatctaccccctgcacaagaccgacgaggagaaacacgaagcgaagctggccaagcgccggcaggcagccgccaaacgcaaggcggcgatggccgtcgcaaagcacaacgcgaggaacgtatgagcaaactccgcaagcaattcaccaatgagtacctgcgaaacgtctatgtcgagctgggcctcaagaagggtgccgagcacctgaccgagcattcgcgcttcggcgaggtgagccgccagtgcttccgcaactggtgcatcaagctgggcttccacgacagcaggacgcgcggcatgtacgccaagaagggcgcgatgcactggctgggccgcaaggctgccgaggtagtgcgcaagttccctggcgccgtgggcaacgtggtaggccagggtccgaaggtgctgagcctggacatcgagacctcgcctatcgagggctgggtctggtcgctctggaagcagaacgtgggcctcaaccagatcaagcgggactggaccatcctgtcgttctgtgcgaagtggatgcacagcgacgaggtgatctacatggactgccagggtgaccccctggacgacatgcacctgctggtcgccctgcataagctgctggacgaggccgacatcatcatcgtccagaacggcaagcgcttcgacgtgcccaagatcaacgcccggttcttcctgaacaagatgccgccgccgagaccgttcaaggtgatcgacaccttgatcatcgccaagcagcaattcgcgttcaccagccgcaagctggagtacatgacccacaaggcatgcaccatcaagaagcgcctccacggcaagttccccggattcgacctgtgggcagcctgcctccaggacaacccggaagcctgggaggagatgcgcctgtacaacatcgacgacgtacgatcgatggaggagctgtacaccctgatgcgcccgtggttcgtcggccatcccaacgtggccgtgtacttcaatgacgccgagccgaccatccgctgcccgaagtgcggcgacacggatgtcaagcaagagggctgggtgcatacgcagaccggcaagtacgagcactatcactgcggcggctgtggtggctggagccgggggcggtacacccgcaacacctcggaacagcgcaaagccctgctgagcaactaaggaggtagcatgagcctagcattcccggactcttacgagtcgacgatcacgactgaaccgtaccgcaaaggtgcgagtctggaagaacgcaaggtcggtaagcttcccatgcacctggtagtcgaggggttcccgctgctgaagcgggagcttgctcgaatgatgcaatgggctgccgaggtcaaggggtatctgccgcacgactggaagaagatgacggtgggcgagttcaagtccgcccaacaccggcacgagtccaagcggctgatcgacggaccgctggatgacgagtccaacctgatgcacctggtgcatgaggcattcaacgcaatggccgccgccgagcgggccctgatggaccgggagaaaggtaatgagtaaaatctgttggtgtacccgacagcacgagaccgatgaaggtgttcgggtcatctgggccttcaacgagcggggcatcggggtcaactacgtcacagcgtacatcacgccggcgatggtcagccatcaggactggagcgatgtcatactcccggacattctccgggagatggcggagcgcctggagcgggaagtgaagctggtggaactgcgctggttccgcgctgagattctgagctgcggggaatggcgtgactaccgagcgatgacgctggatggggcggttagcctggccgaggccgagtggggtcccgaggatatcgggcgcgtaatcgaaagacgataggagacggaatggacctgatacagcagcagatcgcccacgaagaggccctggtcggggcggcgcagaatgacgcccgcattgccttggaaaaggcgattgcccaagggtccatcgaccgcatcccgagggcgcgcatcatgttgatgcggatgctccccatcgtgaccgaagcgatcttcgcccaccaggaagcgaaggcggcggggccggcagcaaagctgcggcacctgctgcggatcatcgacgcccaggacctcgcagtcatggcactgcgggccgggctgtcgatgctcatcaactatccaacgatcacagcgacgaagtattacacccacatgggtaagatgctctgtcgcgagatcgaagtgcggttggccttcaaggtcaaccaaccctattacgaccggacgctggactacctcaagaccagcaggactcgcagcgtccggcacatccagaagacgatggacgctcttctggacgcggtactgccggaagaggcacgtatcgacctgccggatggcgactacctgcgcctcggcaagttcattggtgatccgctgatacagtgcggcctgttcgagccgaaccgcttcacaggtcggggcggtacgagcgtccacctggagccgtcgccggaagccaaggagttcctgcaagacccttcggcggcgatgacctggggaggcccaggccgtagcgtgatgctggcaccgccgcgaccgtggaacgactggtgcgatggcggttactacagcgctaaggcgcagaagcaccatgtgctagtgcgccgtaccaagcaccagaccaagcgggcgcgccagatgcagctacgccacctgggccgggacaagatgcccaaggtgtacgaggcggtcaacgcgctgcaatcggtggcctacgagatcaaccacgacgtgtacgagatcatcgagcgcgtcttcacctccggtggcggcgtgctgggcatcccccagcgcacctacccggacaaacctgagttcccgctcggcgacgagtgggccaaggagaatgccagtgagcaagagctggaggccttcaaccgttggaaacgctccgtccaccggtggtacaccggggagcgagagcataccgccaagcttcgcgaatttgctgcactctaccgagttgttcgagagcatcatggcaaggcagtgtacttcccgatgcacgttgactcccgtggccgcatgtactattggggcacaccgaatccccaggggtccgacatcgccaaggcgtgtctgcgattccacgaaaagcgtgccctcggtaagcgcggcctgtactggctcaaagtccacgtcgccaactccctcggatgtgacaaggtgtacttcgacgaccgggcagcctgggtcgatgagcgatgggacgacttccagcgagcactcaacgaaggtccggagaactatccgagtctcttcccggaagacgagtcgcccctgtgcgccatcgcaggtctgctggagctgcgggcggcctacgcatcaggccagccggaggcttaccgaagtgggttcatcgtccacatggatgcaacctgctccggcctccagcactactcagccattctccgagacgagatcggcggagcctacgtcaacctgctgccacctggacttgccaaagctgacatctactcccgagttctcggtctcgttgcagagtctctggcacgagacagagaaagtgctgaaggcgaggctcggggctacgctgtattgtgggataaggctggtctatcccgaagcctgacgaagaagccctgcatgacgctggtatacggcaccacgttcaagggcgtggtagaccactgcctggactacctggacgagtccggcctggagattcccgagggtatcccgtcataccgcctgggaagctacatggcaacgctcatactggacgcaatacgcgagacagtaccatcggcagtcttcgccatggaatggctccagcggctcgctaaggcccttcctgatgcatccaaggatttgcactggatcacgccactcggcatgcaggtgttccagtcgtacccgaagaccgaggaggtgcgggtgaggctgcgggcagaggctgtcgagtacgtcaccctgtacgaggccaaggacgagctggacccggtacgcaacgccaacggcatcgctccgaacttcgtccacgggctggacagcagccacctgggcctgacggccctggcctgtgcggcagagggtatcccgatccaggccatccacgacagcatgggcacctatgcggcagacgtggatcggatgcacgtccacatcagggagcagttcatcgccatgtacagcggcccctgtgtgctcgtagaactggcaaaacagctcgggatagaggctaccccgccccggagaggatcgttgaatctggaggctgtacgggactcctgggcgttcttctgctgaggggattatgtcacccacataggagcaagtgcatccgtccaaggccctcgtagaggggagcagggagaaagaggtcagggaagaccagagggtagaagaagagtagaggtagagtagaagatgagactagatgactacgaaggattctagatagaatagactaaccagcataggagatatgatagatggctactatgaagacccaccgacctatggttatgtcacccacagtggaaggatcgagaacaggcaagggtacggcccgtcctgtcacgttcacctctcagcagatcgagtggttagagcagaccttccccgaacatcagatcggtcctggaaccacgatggaagacatccagttccaggccggtaggcgagacgtggtgcgagcagtacgcctgcgccgacgcgatgccatcgcagtggagttgaagtgatgaacaagtccatctggcgagtccacgcaaaggccggcactccctcggaactccaggggctgtgctggctggcaatacaggagttggaagaattcaccctcttccgctcgaaagacgacgccctgaatgcgatgctggacagtatcgagggcaacgatcgaaccgagctgttggtattccgcgatggccagttggccggcggtgcctgcattgtgttcgaggacgatccccacgtcggcccgtgcgtcacagcacagtggcagtacgtcctaccgcgctaccgcaatacaggcgtggtccgggagttcatccgcgaactccaccgtcaggccggctggggtcaaatccccctcgtgtgctggagccatcgtgaaagcgatagccggtacacgatccactaccggagagccaagccttatgggcaagaaagtaaagaaggtgctgggcaagaccatcatcggcaaactcgctgatggcctgctgggcaccgacctgagcggcgcacaatccgatgcccgcaagatggaagagcagaaccgcctaatgcaacagcaggcggaccagctcgcacgaaaccagcaggttgacctcaccgccgagaacgtggcgcaggttgacctaggagcgatggccgatgccactggcaccggcacgcgacggcgccggaatcaggcgggcacaggcgtatcgcaaaccctcggtatcaactactgacgaggtacgccatgaaaaccaccgcagctatgctgtgggagaaacttcgggatgggagcgtggagagtcgagccatcgagttcgccaagaccacgcttccctacctgatggtcgatcccatgtccggcagccggggagtcgtagagcatgacttccagtccgccggtgccctcctggtgaacaacctcgccgccaagctggcgagatcgctgttccccacggggattccgttcttccgatccgaactcactgatgcgatccgccgcgaggccgacagccgggacacagacattaccgaagtgaccgctgccttggctcgggtggatcgcaaagcaacacagcgcctgttccagaacgcctccctggcggtcctgacgcaggtgatcaagctactgatcgtgactggcaatgctctgctgtaccgagacagcgccgccgctacggtggtcgcatggtcgctccgctcctatgcggtgcgccgggatgcgactggccgctggatggatatcgtcctaaagcagcgctacaagtccaaggacctggatgaagagtacaagcaggacctgatgcgcgcaggacgcaacctgtccggttcaggtagcgtggacctgtacacccacgtacagcgcaagaggggcacggcgatggaatacgccgagctgtaccacgagatcgacggcgtgcgtgtgggcaaggagggccgctggcctatccacctgtgcccgtacatcgtgccgacctggaacctcgcccctggcgagcactacggtcgcggccacgtcgaggactacatcggcgacttcgccaagctgtccctgctgagcgagaaactcggcctgtacgagctggagtcgctggaggtcctgaacctcgtggacgaggccaagggtgcggtagtcgatgactaccaagacgccgagatgggtgactacgtgccaggtggcgcggaagccgtccgtgcttacgagcgtggcgactacaacaagatggctgctatccagcagagcttgcaagccgtagtcgttcgcttgaaccaggcgttcatgtatggtgccaaccagcgcgacgccgagcgcgtcactgccgaggaagtacgcatcactgcggaagaggcagagaacacactgggcggtacttactcgctcctggccgagaaccttcagtcgcccctggcctacgtctgcctctccgaggtggatgatgcgctactccaaggcttgatcaccaagcagcacaaaccggctatcgagacgggcctcccggccctgtcccgctccgccgctgtgcagagcatgctcaacgcttcccaggtcatcgctggcctggccccgattgctcagctcgatccccgcatctcgctaccgaagatgatggacacgatttgggcagccttcagcgtagacacgtcgcagttctacaagagcgccgacgagctacaggccgaggcagagcagcagcgtcagcaggccgcgcaggcccaggccgcgcaagagaccttgctggaaggcgcttccgacatgaccaacgcactcgcaggagtctgatagatgtcccaaccgaacgaacagcaactgccgccgggcctcgctaacctggttgccaacgtaccgcccgccgccgcgccgacaccgagtcatgtgcaggtgatgccgaacccggtgatccagccgcaggctccggtccagcccggccaggtaggtgcgccgcagcaactggccatcccgactcagcagccgcaacccgttccgaccagcgccatgacgccgcactaccagccggtagcggcacctgccgtgggtcaacccgttgttccgcaagcacccgctcagccggccccggtagctccgccggctgcgggtgcagttcttcccgagaacctggaagtcccgccgccgccggccttcactcccaacggggagatcgtgggcaccttggcagggaacctcgaaggcgacccgcagttggcgccctccatcagctatctggaggcgttctctgacaaactggataccgtccgagccttcggcaaggccgccgagaaccgcgatcctcggttcatcgacgagcactatctgaaggaagttctcggcccggcccaggcgcagcacgtcatcaacgtggccaagggcgtcctgacctatgttgatgcgcagaccaaagccgtcctgagccagacctatgccgccgtcggcggtgaggccatcctgaagcaggctgccggcgtcttcaaccaacacgctgacccggccaccaaggccgccatcggtcggctgatggactcgggcgatgcccaggccatgcagtacgcagcgaagcaaattgtggccttcgcacaaggctcgggtgccgtggtacaggctaccggccaacccctgggtgctgcggcacctgcactggcagctctgagcgctgagcagtaccgcttggaagtatctaagctgccgctgaacgcatccgaagccgagatggctgcgctgcgcgagcgtcgtaaggcaggcatggcgcagggtatctaacgaccctgccctactccggccttaaacccacatccaaaagagagagcatcgtatgagctttttgaacgacctgacccgtccgaactacgctggcaagaacgcggacgttgacatccacctggaagagcacctcggcatcgtcgataagcacttcgcctacacctccaagttcgcaccgctgatgaacatccgcgacctgcgtggctcgaacgtggtccgcctggatcgcctgggtaacgtcgaggccaagggccgccgcgccggtgaagagctggagcgcagccgagtcgtgaacgacaagtggaacctgaccgtcgacaccctgctgtacctccgccaccagttcgaccaccaggacgagtggacccaatccttcgacatgcgcaaggaagtcgccgagctggacggccaggaactggctcgcaagttcgaccaagcctgcctgatccaggtgatcaaggctgccgcgatggacgcgccggtggacctggaagatgcgttctcgccgggcgtgctggagaaactggacctgaccggcctgaccgccaagcaggctgccgacaagatcgtccgcatgcaccgccgcgtagtcgagaccttcatcgaccgcgacctgggcgatgcggtctactccgagggcctgaccccgatgtcgccgcgtgtgttcagcctgctgctggagcacgacaagctgatgaacgtcgagtaccaggcaaccggcgcgaccaacgactacgtgaagtcccgcgtggccatcctcaacggcgtcaaggtgctggagactccgcgcttcgccaccaaggcaatcgcagcccacccgctgggccgtcacttcaacgtgagcgccgaggagtccgagcgccagatcgccctgttcctcccgagcaagaccctgatcaccgcccaagtggcgccggtccaggccaagctgtgggaagacaacgagaaattctcgtgggtcctggataccttccagatgtacaacatcggtgcccgtcgtccggacaccgctggtgccatcgaactgaagggtatcggcgccttcgacatcaccgcgtgatgccacgaaaccccgcacttcggtgtggggtttcttcaaagcctaacgacccgcgcagattccctgcgtgggtttttgcgctttaggagaaaccctatgctactactcgacgcagtgaatgtcatcctgcgcaagatcggcgagctgccgatcccgagcatggatgagacgtatccaaccatggccatcgccctcccggagctggaagatcaacgcatccagttgctgacccaaggctggtggttcaacacctggtggaagcacaagctgacacctgatcccacgggccgcatcaacctgcccaagggcaccttggcattctacccggattccccggacctccagtgggacggcctgggagtgcgagatgccaacaccggcgacgaccgcatcggtaagtcggtcgagggccgattggtgctgtctcgggagtgggaccgtatcccggagatcgcacagcgcgtcattgcgcaccaggctgcgctcgcggtatacacccacgagattggaccggacgagaccgcccaggtcatcgcccaggaattgcaggcgtatcagaacgaactgtcccgcatgcacacccgatcacgtccgctgaacacccaggccaagcgtagcttcagccggtggcggcgcagcttgaggacctgagcatgagctacaagcaatccgcgtatcccaatctgctgatgggtgtgagccagcaggtgcccttcgagcgcctgccgggccagctcagcgagcagatcaacatggtatccgatcccgtgtcaggacttcggcggcgcagcggtatcgagctgatggcccacctgcataccgaccagccctggccgaggccgttcctctaccacacgaacctcggtggccgcagcattgcgatgctggtggcgcagcaccgtggtgagctgtacctgttcgacgagcgggacggtcgcctgctgatgggtcagcccctggtgcatgactacctcaaggccaacgattacaggcagctacgggccgccacggtggccgatgacctgttcatcgccaacctgagcgtgaagcccgaggccgaccgcaccgacatcaagggcgtagaccccaacaaggccggctggctgtacgtcaaggcaggccagtattcgaaggcattctccctgaccatcaaggtcaaggacaacgccacgggcaccacctacagtcacacggccacctacgtgacaccggacaacgccagcacgaaccccaacctcgctgaggcaccgttccaaacgagcgtgggctacatcgcttggcaactctacggcaagttcttcggcgccccggagtacgccctgcccaactccacgaagaagtacccgaaggttgaccctgacccggctgcggctacggtagccggctatctcaaccagcggggcgtgcaggacggctacatcgccttccggggcgacggcgacatcgtggtcgaggtgtccacggatatgggcaacaactacggcatcgcgtcaggtggtatgagcctcaatgctacggcggacctgccggccttgctgccgggagttggcgcccctggtgtgggggtgcagttcatggacggcgctgtcatggccaccggctccaccaaggccccggtatacttcgagtgggattccgctaaccgccgctgggcagagcgggccgcctacggcaccgattgggtcctgaagaagatgccactggccctgcgctgggatgaggctaccgacacctacagcttgaacgagttggagtatgatcgacgtggctccggcgacgaggatacgaaccccacgttcaacttcgtcacccgaggcatcaccggcatgacgaccttccagggtcgcctcgttctcctgtcgcaggagtacgtctgcatgtcggccagtaacaatccgcaccgctggttcaagaagtcggcagccgcgctgaacgacgatgatcctatcgagatcgcggcccaggggagcctgactgaaccgtacgagcacgcggtcaccttcaacaaggacttgatcgtcttcgccaagaagtaccaggccgtggtccccggtggcggcattgtaactccccgtacggcggttatcagcatcaccacgcagtacgacctcgataccagggcggcacctgccgtgactggccgcagtgtgtacttcgctgcggagcgtgccctgggtttcatgggcctgcatgagatggccccgtcgccgtccacggacagccactacgtcgccgaggacgttaccagccacatcccgagctacatgccggggccggctgagtacatccaggcggcggcctccagcggctacctggtgttcggcaccagcacggcggacgagatgatctgccaccagtacctctggcagggcaacgagaaagtccagaacgccttccaccgatggacgctgcggcatcagatcatcggcgcgtacttcaccggcgacaacctgatggtcctgatccagaagggccaggagatcgccctgggccggatgcacctgaacagcctgccagcccgcgagggtctgcaatatccgaagtacgattactggcggcgtatcgaggcgaccgtcgatggtgagctggagctgaccaagcagcattgggacctgatcaaggatgcctctgccgtataccagctccagcccgtggccggtgcctacatggaacgtacccacctcggcgtgaagcgcgagacgaatacgaaggtgttcctcgacgtgcccgaggccgtagtcggtgccgtgtacgtggtcggctgtgagttctggtccaaggtggagttcactccgccggtgctacgggaccacaacgggctgcccatgaccgcgacccgcgcagtgctccaccggtacagcgtgaacttcggatggactggcgagttcctgtggcgcatcagcgacacggctcgacccaaccagccgtggtacgacacgacgccccttcggttgttcagccggcaactcaatgccggggagcctctggtggatagcgctgtggtgccgctgccggcacgggtcgatatggccacgtccaagttcgagctgagctgccatagtccgtacgacatgaacgtccgggctgtcgagtacaacttcaagtccaaccaaatctaccggagggtgtgatggctttctggctaccactattggccgctggcggcatgtcagcccttcagcagggtatggccaacaaggaagagcgcaagaagatcaaggctgagaacaaggctcgactgaaggcggacctcgacaacctgggcgccgctgcccgcgacatcgccaacctgggcgtcatggccgctagctaccgcaagcaggccgtggcctcgcaggtggaggccaagcgccaggggatgctcgccggcggcagtgccgaggctcaggccggcgcgttcggcgtcaagggtgcatccgtggatgcggtggccctggacatcgagcgcgaggtcggggaggccctgatccagattgacgacaacctggacaaccagatgtggaacctcgccgagcaggcgcactccatccaggctcaggcgaaggccggcctgctggggcagaagagtaccacggcggggcaacggtccccgctggtggccggcctgatgtcggcgggttccctgtacgcaagtcaatacttcaagttcggcgccacgcctaaaggaggcaactgatggcggaatcgcaacgtgcttcccaagagcttgggatcaacgtcggacagacgcaactccagccgggccagagtgctcggcgcggagtgcgcgactccgagatcaactacagcggcccgagcgtaggctcgcagattctcgacggcatcctgggtgccggtcagcagatcgctggcaaatggttcgagcacaacgtgcagcaggaagttctgcgcggtgagcgtgcccgtatggccggcgaggctgaggaggcagtagacagcaacgtactggccaaaccattcgtgaagggcggctggcgcaagcaggactaccgcatcgctcaggccgacttcagcctcaagatgcagcgattcatcgccaacaagggccgggagatgactcccgaggagttccgcaagtacctgtcccaggaggctacgcacgtcctggattcgaccgagggcatgaaccccaacgatgccttacaggcgctggcgcagcagcagaaggccgaggaacagctcttcggcatgcaggctaaggcgtacatggactggtccatcgaccaggccgcccgtggcttccgcacccagggtaacagcatcctggccaaggctgtgcaggctcaggccaccggcgacgaactgtcccggcagctcagcctggaagaggccggcctgttctataccaacatcatgacctccgaggatatcccgctggaggtgcgcgacaaggtaggcatgcagttcctggcggccagcctggacatgaaccagcggggcatctatgagggcctgcgcgatgccgggttcctggacagcatgtccttcgatgatcggcgtgcgctcaacggcctctatgaaaagtcgaaggctcagacccgcgccaaggaatcgatggctaccctgcgggccgacgcggacttccagcagcgggtggccaacggcgccatcacagaccttgccgaggttgaggcgtactcacgaggcatggtcgaggagggccgctggagcgacgctcaggccatctcgttcatgaccaaggccatgaccggcctgggcaacgctcagcgcatgcagggcatcatggcggccttggaagccggagacatcaacgccctccacacgctgggtaccaacgtcaccgaggcgctggagcagtgggacaagatgcaggccgccaacggctcaagcctgactgaccgtctcgtgcagggcacacagctcggcctgcgcctggggaccttccccaagacctacggcgagtccgtaggcagcgcggtgcgcatgatccaggccgccaaggaaggcgaggcaaacccggagctggtcaacacgctgaacagcatcttcgaacaggtggcctcggcccaggagatcaacccatccgccggcaacgtgatgctatccggcatcccggaagccgagcagggcgccgtggcctgggcactcaagcagatgaagatgggcatcgcaccagctcaagctctgcgcgagtttagcgccaacgccgaagtcgtgaagcagatggacgagttcgagaaaggccagaacaccaaggcattcaaggacaacctcggtaagcaggtcaacgacaagttcgtgaacaacatcttcggtcgagcctggaacatgctgaccggcgagagcgacctgagcaacaacgaggccgtcctgagcatgtatcgccgggcgaccatcgacgaggcgaactggctggccagcgaccgcaagcatgcgggtctgctcaccagcgacacgggccgcgaggccctgctggagatcgccgccgccaacgtgcgtaaccgcaccatccaggtaggcgaaggtcggaacctgaaggaaggggacctattcagccgccgcgatagcgcgccgctgatcctgcctcgcggcaccaccgccgagcagctattcgggaccaacgacaccgagaccataggaaccgtcctggccgagcagcacaagccgcatgtcgaaggactcctcggctacaagtcggtagtcgccttcgagtacgaccgcaccagtggcagcctcctggccgtcgagtacgacgagaacggggtcgccctggaccgcacccgtgtggacccacaagcggtgggcaacgaggtgctcaagcgcaactccgacaagctgaacgctatgcggggcgccgagtacggggccaacgtcaaggtcagtggcacggacattcgcatgaacgggggcaacagtgccggcatgctgaagcaggacgtgttcaactggcggaaggaactggctcagttcgaggcttaccgaggggaggcgtataaggatgccgatggttatagtgtgggcctggggcattacctgggcagtggcaatgctggggcaggcactacagtcacgcccgagcaagccgcgcagtggttcgccgaggacaccgaccgcgcactcgaccagggtgtgaggttggccgacgagctgggcgttacgaacaatgcctctatcctgggattggccggtatggccttccagatgggcgaaggacgtgcccggcagttccgtaacaccttccaggcgatcaaggatcgcaacaaggaagccttcgaggctggtgtgcgaaacagcaagtggtacacgcagacgcccaaccgggccgaggcattcatcaagcgcatggcgccccacttcgatacaccgagtcaaatcggtgtcgattggtacagcgccgcaacagcggagtaagacatggcaaagcaattcaagggccgcatgacgcccaagtatccccttgaccaagcacagctcgacgaggcccaagtacagggccaacttgacgcggtgcctaccgtggggttcgacgccctgacgggtggcgagatcggagaacggaacgtggcagcgggccaacgagccaatgcgcgggaactggaacgcatcgtagcggaccaggaactgccggcccttgaccgtgcttccgcactctggaaccagtccaccctcgtcggacgctggggcgatgcgctccagctcgacgcagaccttgcggcgaacagtaccggcgaggtggaccctaacttcgacgctgggacctatggggtccaggcgctccaggcggcaggtatccagccgactgacaactatctccagatcatggcccgtgccggcaatgccgaggacgcggcctacctcctgtcgaggattcaacggtatgagcaggacgagcaaatcgtgcgggacaacccgtactggaacttcgcggctggcatgctggaccctgccgctctggcagttgatgcggttactttcggcgctggccgtgctctgcggctcggtcgcgctggcatggctgctgctggcggcgctgggcaagtcgggtatgttgctgggctggatgccgcaggggccgacgtggatgccggaacctacatcatggctggtgctcttggcgctggcgtgggtgctctgctggggtctggtgcgggacgcattgccgcagaggccccaacgcaaccgcatgtgcccgaagtatcggcgcctactgtcgggctgccagaagtagccatgaccgccgaggaggccgcagcacgcggcttcaaggcaggtgacgtggtagacctgctggacgagggcactgtgctatcccgtgtcagtgcccgcgtggagcaggctgagataccggctattccgcgacgtgacactgccttcggcgacgagctgcatagcctgtcgggccggaagctgtctgaggtcctggaccacctcaagacccacgcagaggtgcccaagccgctccagggcatcgccgccaaggtggctgatactatcaggaccctggagggcctggggcagcgtaccgcgttccgtgtggtgcagggcggtgacactgccagctctgccttcctcaaaccgggtacggcggggattcactccacccagggcctcgacaccttggtccaggtacgcggcagcaccgcacctggccgagttggcaccaacccggtgaccgtgctccacgaggcggttcacgctgccaccgtgggcgtgatgaacgccgccttgcggaatcctggcgcgatgagtccgaaggtggctcaggccatgcagaccctggagaacgtccggggtaacgtgctcaacgccctgaagcaggaccgcgccgccggtcggcaactgtccgagttcgaagagacgctgctagccggtaactccaacaccctggccaacgtcaaggaactggtagcctggggcctgacggatacccgcttccaaaggaccctgaaccgcctccgctacagtgacggcgggccgggcctgtggtcccgcttcgtggagggcatccgcaccctactgggtctgcggtccgatgctgacacggccctgagccgcgtcctggccgcctctgagacgattatggaggccatgcccggctacactaaggcgcaggccaagtgggccaacaagggcgctccggtaaccgaggaggccagcctggagaccatcgtgcggaccacccgtgaacgtgcccgtgagggtgccggcttcgtgaacaggttcttcagcgaggcagacctcctggcacagcctggggagggcgcacggcgactcctgagccgtcttatcgacgacccggtacgtcgggatgggttcagcacgaacgacaacgcagcgagctatctccgccgctatcggaacgagttcgagggttacgtgaagtcctacgacgagatgatggccaaggcaatggctgagcagggtgtgggcctgacggcacgtgcgctgaactcccgccgcgccatggcagtccgggaccagctcaacgagcaggtcacccgcgagctgctgcgccgggaccgcgagtggacggcctacggcagcgtccgtgtggacccgaacctgccgccgaccatcaaggccctggccgaccgctcagacgagattcacggtctgatgggccagcgcgccagggaagccggtgtgcgtggcttcgaggacttcgctccccgaccggggtacttccaccgttcatggaactggtcgaagatggcgcagatggacgaggccgcccctggcctggcccgccgcgccatcagcgaggccgtgttccgtggcatccctgggctggagcgcgccgatgccgataccatcgcacaggccattgtgcagcgggcgcgggatcgggccaccggaatccgctccgagttcatgggcgcgatgggcgtggcggacacggcattcatccggcaggcgctggaggaggccaacgtgtcccaggccaagttcgacagcatcatggccaagatcgagcagaagcagtccgaccagggcaccgtcaagtacggcaagggccggctgtcgctggacatgaccgcagagatcaaccacaac

SEQ ID NO: 2 - DNA, 42717 bp, unidentified
  source 1..42717: mol_type = genomic DNA
actgaccgtcttggacatcggcaccggacgcattcttgccgtcgatccgtggactctcgttgtagtagatgtagcgctcaccgtagaggttacgccggttcgcgaagggcagcggggtgaggcggatggtacgctcaaccccggagatcacgaacttggcctcggccatcgccacagccttgctgcgcagctcatactgtacgtcgagaatctcgtcagcctgaactaccagggtggtgggttggccggcggcgtctttgatccgggtgtaggatagtggagtacctgccggaatcttcgcgccggtgttactctcaaaccccaccgcggattgagctacgatgcccacggtggccagtacctgaccggccagggtgcctattgggaagcgccaccgcttgtgccagtaaatccactccccgtccaggcccgaggtcacgtcgccgttaggggcatacgaggtggtgcgccgaacttcttccggcagggagggcgcggcggggttagggtccgcagtgctggtactcacggccagggcctgggagaacaggtcagaggtatccatggcgcaaatccaatcaagacctgcgttagtgatgaggttgtcgaaggtgtgttgcgccaggacttcacccgtggctttcatatgggtcaccgtgtagcgacccttaactcgcgtctcaaacattggtcagttccgcctgtttaattgctgttgaggtggtgaaggcgtaaggctccacgatatactcagagtatacgaccacaaccttcaactccgcgcctaccactgcggtctgcgacgagaatgcgtaaggttctgcggtgtagtccttaaccgtatcgcgcagtaaaactgcatggatggcaggtcccgtcaggaacccatcgccaccgccgtagccgagctgagtcagcgaccgcagcagcacgcttaccacactggaggtcgcgtggtaggtgtcctctccgggctggttcaacacctcgtgcagggtgtcgcgtgttagcgctgccacgatgttcggcctacaagaccatgcgtcatccgtagccaggatgggatatgggtaggtcgccaagatgggcttgggccgccgaatttgagaggccatgatgcccgcgataatgccgcgcattattcgtcctccatggctccgaacacgatccagtggttaggcccgagacgcttgagggtacacacgccattctcgccgtagagctgcatggtggtgttctgcaaccggttgatggtcacgccggggccggccacgatgttgaggtcgcgcacacccgcctgttcgaagtgaacctcgctgaactcgatccagggtgcatccgggtcttccatctgcatggtcagggtcagcggcttatcagcggtgatgcagcggttccagtaaccacgccagctcgggtcgatgtccgagtcttccgtaacggtgcgaatctcggcgaagcccagggcgcggcgcagcgcttcgttagcggcgtcgagtgcctcctgtgcaaggcggcgggcctcctcggcgatacggatcgcgtcgagaacaccatccagtgcgaggttcgcggtgttgatgccctcctgcacggcgtacagaagctgcttgttgttcgcgtcgatgtagcgaggcaggaacgggatgccctggctgaactgcgtatccggcacttgggcgggggtgtcgcggaagatgcggacctcttggccctgcttaggcacttccgcaagctgaatgttggtgttgtccacccacgtatagtcggtggtgagtatcttgtcgacctggacgaatacgtcctcacgacgcaggaatgggaagtcgagactgaatacagtctcgaccccatctgcaacgtggatggtctcggggttcttgaaccgagccacgctattcccctttgatggattccaacagcaacttggttgccgggaacacgttgacgaaaggcagtgcgcccgccgcgccgttgacgatatcgccagtggctgctgccgggtcgtcgccggttacgaggtctcgaacgcctcggaacacttcgttggagtgttcagccagtccgaagaccggagcagacattcgggagtggccagtgaccacaccccacatatcggcggtgaagcccagaccggcagtgtagccgatgccgtcgatggccatcttgcggatgccttcatcagaggtgtcgaacttgccgttgatcgctgccttggcacccatcatcagcgcggtgagcggatactggaatgcgaggagcgaggccacgccaagcacgccggagttctcataggttccccggaggagcttgttgtgcgcgaaggccacaaagctgcggaactggcccaggatttggccgacaggtgaccgagcaaagcccgagttctgaccgaccctgccgtacagcagcgagtcgtccatgatccgcagtgcggtgttcatgacggtgttcacgtctgcttggctccaggcgccccaattcatcgattgggcgttccttcctctgtatgtgacataaccgcgaacccgcgccaacactggcgtccagtccacgtccttcccgtactgctggagcacgcgaagggctgcttcatccccctgagccgcccgcgccaccttgttcaaggtgaggttggcgttcatacgggattgccagttgtgaatgaacttcatgccgttgagcaccgggacagcctgcttacctgcgtgcaggaagcgatccatgaaggtatcttggctggccaggaaggtgtcgaactgccgcttccagggcttcatccggatatcgttggcgaggttcaggccgaggacggtctgcatctcgtcagcgaggtccgggtcgcgacgcatggcgcccacgaagtctcccaggcgggagttcagcatggccttcatgacgttgaagacgccttgacggtgcgccatcgtggccagctcggcgagctgatacacgcctgagaatcccagcatggtggcgctggtcaggccgctggcccgctgagcaaccgggccgagctgatgctccctcggcacgttgccggtgaagtccccgaagactccccgcagttgccccgtcagctcctgcaccttatcggtgcccaggtgtgctgcctctcgctggtactcccggatgaaggcttcgatctccgagtcccccggcatgcctgcgcgggccaatgctgagcggcccgacatactgccggcgtagttctccatcagccggtccaggtctcggtcgatcaggtcctgcacccgatacacggttccgttgtggttgatctctgcggtcatgtccagcgacagccggcccttgccgtacttgacggtgccctggtcggactgcttctgctcgatcttggccatgatgctgtcgaacttggcctgggacacgttggcctcctccagcgcctgccggatgaatgccgtgtccgccacgcccatcgcgcccatgaactcggagcggattccggtggcccgatcccgcgcccgctgcacaatggcctgtgcgatggtatcggcatcggcgcgctccagcccagggatgccacggaacacggcctcgctgatggcgcggcgggccaggccaggggcggcctcgtccatctgcgccatcttcgaccagttccatgaacggtggaagtaccccggtcggggagcgaagtcctcgaagccacgcacaccggcttccctggcgcgctggcccatcagaccgtgaatctcgtctgagcggtcggccagggccttgatggtcggcggcaggttcgggtccacacggacgctgccgtaggccgtccactcgcggtcccggcgcagcagctcgcgggtgacctgctcgttgagctggtcccggactgccatggcgcggcgggagttcagcgcacgtgccgtcaggcccacaccctgctcagccattgccttggccatcatctcgtcgtaggacttcacgtaaccctcgaactcgttccgatagcggcggagatagctcgctgcgttgtcgttcgtgctgaacccatcccgacgtaccgggtcgtcgataagacggctcaggagtcgccgtgcgccctccccaggctgtgccaggaggtctgcctcgctgaagaacctgttcacgaagccggcaccctcacgggcacgttcacgggtggtccgcacgatggtctccaggctggcctcctcggttaccggagcgcccttgttggcccacttggcctgcgccttagtgtagccgggcatggcctccataatcgtctcagaggcggccaggacgcggctcagggccgtgtcagcatcggaccgcagacccagtagggtgcggatgccctccacgaagcgggaccacaggcccggcccgccgtcactgtagcggaggcggttcagggtcctttggaagcgggtatccgtcaggccccaggctaccagttccttgacgttggccagggtgttggagttaccggctagcagcgtctcttcgaactcggacagttgccgaccggcggcgcggtcctgcttcagggcgttgagcacgttaccccggacgttctccagggtctgcatggcctgagccaccttcggactcatcgcgccaggattccgcaaggcggcgttcatcacgcccacggtggcagcgtgaaccgcctcgtggagcacggtcaccgggttggtgccaactcggccaggtgcggtgctgccgcgtacctggaccaaggtgtcgaggccctgggtggagtgaatccccgccgtacccggtttgaggaaggcagagctggcagtgtcaccgccctgcaccacacggaacgcggtacgctgccccaggccctccagggtcctgatagtatcagccaccttggcggcgatgccctggagcggcttgggcacctctgcgtgggtcttgaggtggtccaggacctcagacagcttccggcccgacaggctatgcagctcgtcgccgaaggcagtgtcacgtcgcggaatagccggtatctcagcctgctccacgcgggcactgacacgggatagcacagtgccctcgtccagcaggtctaccacgtcacctgccttgaagccgcgtgctgcggcctcctcggcggtcatggctacttctggcagcccgacagtaggcgccgatacttcgggcacatgcggttgcgttggggcctctgcggcaatgcgtcccgcaccagaccccagcagagcacccacgccagcgccaagagcaccagccatgatgtaggttccggcatccacgtcggcccctgcggcatccagcccagcaacatacccgacttgcccagcgccgccagcagcagccatgccagcgcgaccgagccgcagagcacggccagcgccgaaagtaaccgcatcaactgccagagcggcagggtccagcatgccagccgcgaagttccagtacgggttgtcccgcacgatttgctcgtcctgctcataccgttgaatcctcgacaggaggtaggccgcgtcctcggcattgccggcacgggccatgatctggagatagttgtcagtcggctggatacctgccgcctggagcgcctggaccccataggtcccagcgtcgaagttagggtccacctcgccggtactgttcgccgcaaggtctgcgtcgagctggagcgcatcgccccagcgtccgacgagggtggactggttccagagtgcggaagcacggtcaagggccggcagttcctggtccgctacgatgcgttccagttcccgcgcattggctcgttggcccgctgccacgttccgttctccgatctcgccacccgtcagggcgtcgaaccccacggtaggcaccgcgtcaagttggccctgtacttgggcctcgtcgagctgtgcttggtcaaggggatacttgggcgtcatgcggcccttgaattgctttgccatgtcttactccgctgttgcggcgctgtaccaatcgacaccgatttgactcggtgtatcgaagtggggcgccatgcgcttgatgaatgcctcggcccggttgggcgtctgcgtgtaccacttgctgtttcgcacaccagcctcgaaggcttccttgttgcgatccttgatcgcctggaaggtgttacggaactgccgggcacgtccttcgcccatctggaaggccataccggccaatcccaggatagaggcattgttcgtaacgcccagctcgtcggccaacctcacaccctggtcgagtgcgcggtcggtgtcctcggcgaaccactgcgcggcttgctcgggcgtgactgtagtgcctgccccagcattgccactgcccaggtaatgccccaggcccacactataaccatcggcatccttatacgcctcccctcggtaagcctcgaactgagccagttccttccgccagttgaacacgtcctgcttcagcatgccggcactgttgcccccgttcatgcgaatgtccgtgccactgaccttgacgttggccccgtactcggcgccccgcatagcgttcagcttgtcggagttgcgcttgagcacctcgttgcccaccgcttgtgggtccacacgggtgcggtccagggcgaccccgttctcgtcgtactcgacggccaggaggctgccactggtgcggtcgtactcgaaggcgactaccgacttgtagccgaggagtccttcgacatgcggcttgtgctgctcggccaggacggttcctatggtctcggtgtcgttggtcccgaatagctgctcggcggtggtgccgcgaggcaggatcagcggcgcgctatcgcggcggctgaataggtccccttccttcaggttccgaccttcgcctacctggatggtgcggttacgcacgttggcggcggcgatctccagcagggcctcgcggcccgtgtcgctggtgagcagacccgcatgcttgcggtcgctggccagccagttcgcctcgtcgatggtcgcccggcgatacatgctcaggacggcctcgttgttgctcaggtcgctctcgccggtcagcatgttccaggctcgaccgaagatgttgttcacgaacttgtcgttgacctgcttaccgaggttgtccttgaatgccttggtgttctggcctttctcgaactcgtccatctgcttcacgacttcggcgttggcgctaaactcgcgcagagcttgagctggtgcgatgcccatcttcatctgcttgagtgcccaggccacggcgccctgctcggcttccgggatgccggatagcatcacgttgccggcggatgggttgatctcctgggccgaggccacctgttcgaagatgctgttcagcgtgttgaccagctccgggtttgcctcgccttccttggcggcctggatcatgcgcaccgcgctgcctacggactcgccgtaggtcttggggaaggtccccaggcgcaggccgagctgtgtgccctgcacgagacggtcagtcaggcttgagccgttggcggcctgcatcttgtcccactgctccagcgcctcggtgacgttggtacccagcgtgtggagggcgttgatgtctccggcttccaaggccgccatgatgccctgcatgcgctgagcgttgcccaggccggtcatggccttggtcatgaacgagatggcctgagcgtcgctccagcggccctcctcgaccatgcctcgtgagtacgcctcaacctcggcaaggtctgtgatggcgccgttggccacccgctgctggaagtccgcgtcggcccgcagggtagccatcgattccttggcgcgggtctgagccttcgacttttcatagaggccgttgagcgcacgccgatcatcgaaggacatgctgtccaggaacccggcatcgcgcaggccctcatagatgccccgctggttcatgtccaggctggccgccaggaactgcatgcctaccttgtcgcgcacctccagcgggatatcctcggaggtcatgatgttggtatagaacaggccggcctcttccaggctgagctgccgggacagttcgtcgccggtggcctgagcctgcacagccttggccaggatgctgttaccctgggtgcggaagccacgggcggcctggtcgatggaccagtccatgtacgccttagcctgcatgccgaagagctgttcctcggccttctgctgctgcgccagcgcctgtaaggcatcgttggggttcatgccctcggtcgaatccaggacgtgcgtagcctcctgggacaggtacttgcggaactcctcgggagtcatctcccggcccttgttggcgatgaatcgctgcatcttgaggctgaagtcggcctgagcgatgcggtagtcctgcttgcgccagccgcccttcacgaatggtttggccagtacgttgctgtctactgcctcctcagcctcgccggccatacgggcacgctcaccgcgcagaacttcctgctgcacgttgtgctcgaaccatttgccagcgatctgctgaccggcacccaggatgccgtcgagaatctgcgagcctacgctcgggccgctgtagttgatctcggagtcgcgcactccgcgccgagcactctggcccggctggagttgcgtctgtccgacgttgatcccaagctcttgggaagcacgttgcgattccgccatcagttgcctcctttaggcgtggcgccgaacttgaagtattgacttgcgtacagggaacccgccgacatcaggccggccaccagcggggaccgttgccccgccgtggtactcttctgccccagcaggccggccttcgcctgagcctggatggagtgcgcctgctcggcgaggttccacatctggttgtccaggttgtcgtcaatctggatcagggcctccccgacctcgcgctcgatgtccagggccaccgcatccacggatgcacccttgacgccgaacgcgccggcctgagcctcggcactgccgccggcgagcatcccctggcgcttggcctccacctgcgaggccacggcctgcttgcggtagctagcggccatgacgcccaggttggcgatgtcgcgggcagcggcgcccaggttgtcgaggtccgccttcagtcgagccttgttctcagccttgatcttcttgcgctcttccttgttggccataccctgctgaagggctgacatgccgccagcggccaatagtggtagccagaaagccatcacaccctccggtagatttggttggacttgaagttgtactcgacagcccggacgttcatgtcgtacggactatggcagctcagctcgaacttggacgtggccatatcgacccgtgccggcagcggcaccacagcgctatccaccagaggctccccggcattgagttgccggctgaacaaccgaaggggcgtcgtgtcgtaccacggctggttgggtcgagccgtgtcgctgatgcgccacaggaactcgccagtccatccgaagttcacgctgtaccggtggagcactgcgcgggtcgcggtcatgggcagcccgttgtggtcccgtagcaccggcggagtgaactccaccttggaccagaactcacagccgaccacgtacacggcaccgactacggcctcgggcacgtcgaggaacaccttcgtattcgtctcgcgcttcacgccgaggtgggtacgttccatgtaggcaccggccacgggctggagctggtatacggcagaggcatccttgatcaggtcccaatgctgcttggtcagctccagctcaccatcgacggtcgcctcgatacgccgccagtaatcgtacttcggatattgcagaccctcgcgggctggcaggctgttcaggtgcatccggcccagggcgatctcctggcccttctggatcaggaccatcaggttgtcgccggtgaagtacgcgccgatgatctgatgccgcagcgtccatcggtggaaggcgttctggactttctcgttgccctgccagaggtactggtggcagatcatctcgtccgccgtgctggtgccgaacaccaggtagccgctggaggccgccgcctggatgtactcagccggccccggcatgtagctcgggatgtggctggtaacgtcctcggcgacgtagtggctgtccgtggacggcgacggggccatctcatgcaggcccatgaaacccagggcacgctccgcagcgaagtacacactgcggccagtcacggcaggtgccgccctggtatcgaggtcgtactgcgtggtgatgctgataaccgccgtacggggagttacaatgccgccaccggggaccacggcctggtacttcttggcgaagacgatcaagtccttgttgaaggtgaccgcgtgctcgtacggttcagtcaggctcccctgggccgcgatctcgataggatcatcgtcgttcagcgcggctgccgacttcttgaaccagcggtgcggattgttactggccgacatgcagacgtactcctgcgacaggagaacgaggcgaccctggaaggtcgtcatgccggtgatgcctcgggtgacgaagttgaacgtggggttcgtatcctcgtcgccggagccacgtcgatcatactccaactcgttcaagctgtaggtgtcggtagcctcatcccagcgcagggccagtggcatcttcttcaggacccaatcggtgccgtaggcggcccgctctgcccagcggcggttagcggaatcccactcgaagtataccggggccttggtggagccggtggccatgacagcgccgtccatgaactgcacccccacaccaggggcgccaactcccggcagcaaggccggcaggtccgccgtagcattgaggctcataccacctgacgcgatgccgtagttgttgcccatatccgtggacacctcgaccacgatgtcgccgtcgccccggaaggcgatgtagccgtcctgcacgccccgctggttgagatagccggctaccgtagccgcagccgggtcagggtcaaccttcgggtacttcttcgtggagttgggcagggcgtactccggggcgccgaagaacttgccgtagagttgccaagcgatgtagcccacgctcgtttggaacggtgcctcagcgaggttggggttcgtgctggcgttgtccggtgtcacgtaggtggccgtgtgactgtaggtggtgcccgtggcgttgtccttgaccttgatggtcagggagaatgccttcgaatactggcctgccttgacgtacagccagccggccttgttggggtctacgcccttgatgtcggtgcggtcggcctcgggcttcacgctcaggttggcgatgaacaggtcatcggccaccgtggcggcccgtagctgcctgtaatcgttggccttgaggtagtcatgcaccaggggctgacccatcagcaggcgaccgtcccgctcgtcgaacaggtacagctcaccacggtgctgcgccaccagcatcgcaatgctgcggccaccgaggttcgtgtggtagaggaacggcctcggccagggctggtcggtatgcaggtgggccatcagctcgataccgctgcgccgccgaagtcctgacacgggatcggataccatgttgatctgctcgctgagctggcccggcaggcgctcgaagggcacctgctggctcacacccatcagcagattgggatacgcggattgcttgtagctcatgctcaggtcctcaagctgcgccgccaccggctgaagctacgcttggcctgggtgttcagcggacgtgatcgggtgtgcatgcgggacagttcgttctgatacgcctgcaattcctgggcgatgacctgggcggtctcgtccggtccaatctcgtgggtgtataccgcgagcgcagcctggtgcgcaatgacgcgctgtgcgatctccgggatacggtcccactcccgagacagcaccaatcggccctcgaccgacttaccgatgcggtcgtcgccggtgttggcatctcgcactcccaggccgtcccactggaggtccggggaatccgggtagaatgccaaggtgcccttgggcaggttgatgcggcccgtgggatcaggtgtcagcttgtgcttccaccaggtgttgaaccaccagccttgggtcagcaactggatgcgttgatcttccagctccgggagggcgatggccatggttggatacgtctcatccatgctcgggatcggcagctcgccgatcttgcgcaggatgacattcactgcgtcgagtagtagcatagggtttctcctaaagcgcaaaaacccacgcagggaatctgcgcgggtcgttaggctttgaagaaaccccacaccgaagtgcggggtttcgtggcatcacgcggtgatgtcgaaggcgccgatacccttcagttcgatggcaccagcggtgtccggacgacgggcaccgatgttgtacatctggaaggtatccaggacccacgagaatttctcgttgtcttcccacagcttggcctggaccggcgccacttgggcggtgatcagggtcttgctcgggaggaacagggcgatctggcgctcggactcctcggcgctcacgttgaagtgacggcccagcgggtgggctgcgattgccttggtggcgaagcgcggagtctccagcaccttgacgccgttgaggatggccacgcgggacttcacgtagtcgttggtcgcgccggttgcctggtactcgacgttcatcagcttgtcgtgctccagcagcaggctgaacacacgcggcgacatcggggtcaggccctcggagtagaccgcatcgcccaggtcgcggtcgatgaaggtctcgactacgcggcggtgcatgcggacgatcttgtcggcagcctgcttggcggtcaggccggtcaggtccagtttctccagcacgcccggcgagaacgcatcttccaggtccaccggcgcgtccatcgcggcagccttgatcacctggatcaggcaggcttggtcgaacttgcgagccagttcctggccgtccagctcggcgacttccttgcgcatgtcgaaggattgggtccactcgtcctggtggtcgaactggtggcggaggtacagcagggtgtcgacggtcaggttccacttgtcgttcacgactcggctgcgctccagctcttcaccggcgcggcggcccttggcctcgacgttacccaggcgatccaggcggaccacgttcgagccacgcaggtcgcggatgttcatcagcggtgcgaacttggaggtgtaggcgaagtgcttatcgacgatgccgaggtgctcttccaggtggatgtcaacgtccgcgttcttgccagcgtagttcggacgggtcaggtcgttcaaaaagctcatacgatgctctctcttttggatgtgggtttaaggccggagtagggcagggtcgttagataccctgcgccatgcctgccttacgacgctcgcgcagcgcagccatctcggcttcggatgcgttcagcggcagcttagatacttccaagcggtactgctcagcgctcagagctgccagtgcaggtgccgcagcacccaggggttggccggtagcctgtaccacggcacccgagccttgtgcgaaggccacaatttgcttcgctgcgtactgcatggcctgggcatcgcccgagtccatcagccgaccgatggcggccttggtggccgggtcagcgtgttggttgaagacgccggcagcctgcttcaggatggcctcaccgccgacggcggcataggtctggctcaggacggctttggtctgcgcatcaacataggtcaggacgcccttggccacgttgatgacgtgctgcgcctgggccgggccgagaacttccttcagatagtgctcgtcgatgaaccgaggatcgcggttctcggcggccttgccgaaggctcggacggtatccagtttgtcagagaacgcctccagatagctgatggagggcgccaactgcgggtcgccttcgaggttccctgccaaggtgcccacgatctccccgttgggagtgaaggccggcggcggcgggacttccaggttctcgggaagaactgcacccgcagccggcggagctaccggggccggctgagcgggtgcttgcggaacaacgggttgacccacggcaggtgccgctaccggctggtagtgcggcgtcatggcgctggtcggaacgggttgcggctgctgagtcgggatggccagttgctgcggcgcacctacctggccgggctggaccggagcctgcggctggatcaccgggttcggcatcacctgcacatgactcggtgtcggcgcggcggcgggcggtacgttggcaaccaggttagcgaggcccggcggcagttgctgttcgttcggttgggacatctatcagactcctgcgagtgcgttggtcatgtcggaagcgccttccagcaaggtctcttgcgcggcctgggcctgcgcggcctgctgacgctgctgctctgcctcggcctgtagctcgtcggcgctcttgtagaactgcgacgtgtctacgctgaaggctgcccaaatcgtgtccatcatcttcggtagcgagatgcggggatcgagctgagcaatcggggccaggccagcgatgacctgggaagcgttgagcatgctctgcacagcggcggagcgggacagggccgggaggcccgtctcgatagccggtttgtgctgcttggtgatcaagccttggagtagcgcatcatccacctcggagaggcagacgtaggccaggggcgactgaaggttctcggccaggagcgagtaagtaccgcccagtgtgttctctgcctcttccgcagtgatgcgtacttcctcggcagtgacgcgctcggcgtcgcgctggttggcaccatacatgaacgcctggttcaagcgaacgactacggcttgcaagctctgctggatagcagccatcttgttgtagtcgccacgctcgtaagcacggacggcttccgcgccacctggcacgtagtcacccatctcggcgtcttggtagtcatcgactaccgcacccttggcctcgtccacgaggttcaggacctccagcgactccagctcgtacaggccgagtttctcgctcagcagggacagcttggcgaagtcgccgatgtagtcctcgacgtggccgcgaccgtagtgctcgccaggggcgaggttccaggtcggcacgatgtacgggcacaggtggataggccagcggccctccttgcccacacgcacgccgtcgatctcgtggtacagctcggcgtattccatcgccgtgcccctcttgcgctgtacgtgggtgtacaggtccacgctacctgaaccggacaggttgcgtcctgcgcgcatcaggtcctgcttgtactcttcatccaggtccttggacttgtagcgctgctttaggacgatatccatccagcggccagtcgcatcccggcgcaccgcataggagcggagcgaccatgcgaccaccgtagcggcggcgctgtctcggtacagcagagcattgccagtcacgatcagtagcttgatcacctgcgtcaggaccgccagggaggcgttctggaacaggcgctgtgttgctttgcgatccacccgagccaaggcagcggtcacttcggtaatgtctgtgtcccggctgtcggcctcgcggcggatcgcatcagtgagttcggatcggaagaacggaatccccgtggggaacagcgatctcgccagcttggcggcgaggttgttcaccaggagggcaccggcggactggaagtcatgctctacgactccccggctgccggacatgggatcgaccatcaggtagggaagcgtggtcttggcgaactcgatggctcgactctccacgctcccatcccgaagtttctcccacagcatagctgcggtggttttcatggcgtacctcgtcagtagttgataccgagggtttgcgatacgcctgtgcccgcctgattccggcgccgtcgcgtgccggtgccagtggcatcggccatcgctcctaggtcaacctgcgccacgttctcggcggtgaggtcaacctgctggtttcgtgcgagctggtccgcctgctgttgcattaggcggttctgctcttccatcttgcgggcatcggattgtgcgccgctcaggtcggtgcccagcaggccatcagcgagtttgccgatgatggtcttgcccagcaccttctttactttcttgcccataaggcttggctctccggtagtggatcgtgtaccggctatcgctttcacgatggctccagcacacgagggggatttgaccccagccggcctgacggtggagttcgcggatgaactcccggaccacgcctgtattgcggtagcgcggtaggacgtactgccactgtgctgtgacgcacgggccgacgtggggatcgtcctcgaacacaatgcaggcaccgccggccaactggccatcgcggaataccaacagctcggttcgatcgttgccctcgatactgtccagcatcgcattcagggcgtcgtctttcgagcggaagagggtgaattcttccaactcctgtattgccagccagcacagcccctggagttccgagggagtgccggcctttgcgtggactcgccagatggacttgttcatcacttcaactccactgcgatggcatcgcgtcggcgcaggcgtactgctcgcaccacgtctcgcctaccggcctggaactggatgtcttccatcgtggttccaggaccgatctgatgttcggggaaggtctgctctaaccactcgatctgctgagaggtgaacgtgacaggacgggccgtacccttgcctgttctcgatccttccactgtgggtgacataaccataggtcggtgggtcttcatagtagccatctatcatatctcctatgctggttagtctattctatctagaatccttcgtagtcatctagtctcatcttctactctacctctactcttcttctaccctctggtcttccctgacctctttctccctgctcccctctacgagggccttggacggatgcacttgctcctatgtgggtgacataatcccctcagcagaagaacgcccaggagtcccgtacagcctccagattcaacgatcctctccggggcggggtagcctctatcccgagctgttttgccagttctacgagcacacaggggccgctgtacatggcgatgaactgctccctgatgtggacgtgcatccgatccacgtctgccgcataggtgcccatgctgtcgtggatggcctggatcgggataccctctgccgcacaggccagggccgtcaggcccaggtggctgctgtccagcccgtggacgaagttcggagcgatgccgttggcgttgcgtaccgggtccagctcgtccttggcctcgtacagggtgacgtactcgacagcctctgcccgcagcctcacccgcacctcctcggtcttcgggtacgactggaacacctgcatgccgagtggcgtgatccagtgcaaatccttggatgcatcaggaagggccttagcgagccgctggagccattccatggcgaagactgccgatggtactgtctcgcgtattgcgtccagtatgagcgttgccatgtagcttcccaggcggtatgacgggataccctcgggaatctccaggccggactcgtccaggtagtccaggcagtggtctaccacgcccttgaacgtggtgccgtataccagcgtcatgcagggcttcttcgtcaggcttcgggatagaccagccttatcccacaatacagcgtagccccgagcctcgccttcagcactttctctgtctcgtgccagagactctgcaacgagaccgagaactcgggagtagatgtcagctttggcaagtccaggtggcagcaggttgacgtaggctccgccgatctcgtctcggagaatggctgagtagtgctggaggccggagcaggttgcatccatgtggacgatgaacccacttcggtaagcctccggctggcctgatgcgtaggccgcccgcagctccagcagacctgcgatggcgcacaggggcgactcgtcttccgggaagagactcggatagttctccggaccttcgttgagtgctcgctggaagtcgtcccatcgctcatcgacccaggctgcccggtcgtcgaagtacaccttgtcacatccgagggagttggcgacgtggactttgagccagtacaggccgcgcttaccgagggcacgcttttcgtggaatcgcagacacgccttggcgatgtcggacccctggggattcggtgtgccccaatagtacatgcggccacgggagtcaacgtgcatcgggaagtacactgccttgccatgatgctctcgaacaactcggtagagtgcagcaaattcgcgaagcttggcggtatgctctcgctccccggtgtaccaccggtggacggagcgtttccaacggttgaaggcctccagctcttgctcactggcattctccttggcccactcgtcgccgagcgggaactcaggtttgtccgggtaggtgcgctgggggatgcccagcacgccgccaccggaggtgaagacgcgctcgatgatctcgtacacgtcgtggttgatctcgtaggccaccgattgcagcgcgttgaccgcctcgtacaccttgggcatcttgtcccggcccaggtggcgtagctgcatctggcgcgcccgcttggtctggtgcttggtacggcgcactagcacatggtgcttctgcgccttagcgctgtagtaaccgccatcgcaccagtcgttccacggtcgcggcggtgccagcatcacgctacggcctgggcctccccaggtcatcgccgccgaagggtcttgcaggaactccttggcttccggcgacggctccaggtggacgctcgtaccgccccgacctgtgaagcggttcggctcgaacaggccgcactgtatcagcggatcaccaatgaacttgccgaggcgcaggtagtcgccatccggcaggtcgatacgtgcctcttccggcagtaccgcgtccagaagagcgtccatcgtcttctggatgtgccggacgctgcgagtcctgctggtcttgaggtagtccagcgtccggtcgtaatagggttggttgaccttgaaggccaaccgcacttcgatctcgcgacagagcatcttacccatgtgggtgtaatacttcgtcgctgtgatcgttggatagttgatgagcatcgacagcccggcccgcagtgccatgactgcgaggtcctgggcgtcgatgatccgcagcaggtgccgcagctttgctgccggccccgccgccttcgcttcctggtgggcgaagatcgcttcggtcacgatggggagcatccgcatcaacatgatgcgcgccctcgggatgcggtcgatggacccttgggcaatcgccttttccaaggcaatgcgggcgtcattctgcgccgccccgaccagggcctcttcgtgggcgatctgctgctgtatcaggtccattccgtctcctatcgtctttcgattacgcgcccgatatcctcgggaccccactcggcctcggccaggctaaccgccccatccagcgtcatcgctcggtagtcacgccattccccgcagctcagaatctcagcgcggaaccagcgcagttccaccagcttcacttcccgctccaggcgctccgccatctcccggagaatgtccgggagtatgacatcgctccagtcctgatggctgaccatcgccggcgtgatgtacgctgtgacgtagttgaccccgatgccccgctcgttgaaggcccagatgacccgaacaccttcatcggtctcgtgctgtcgggtacaccaacagattttactcattacctttctcccggtccatcagggcccgctcggcggcggccattgcgttgaatgcctcatgcaccaggtgcatcaggttggactcgtcatccagcggtccgtcgatcagccgcttggactcgtgccggtgttgggcggacttgaactcgcccaccgtcatcttcttccagtcgtgcggcagataccccttgacctcggcagcccattgcatcattcgagcaagctcccgcttcagcagcgggaacccctcgactaccaggtgcatgggaagcttaccgaccttgcgttcttccagactcgcacctttgcggtacggttcagtcgtgatcgtcgactcgtaagagtccgggaatgctaggctcatgctacctccttagttgctcagcagggctttgcgctgttccgaggtgttgcgggtgtaccgcccccggctccagccaccacagccgccgcagtgatagtgctcgtacttgccggtctgcgtatgcacccagccctcttgcttgacatccgtgtcgccgcacttcgggcagcggatggtcggctcggcgtcattgaagtacacggccacgttgggatggccgacgaaccacgggcgcatcagggtgtacagctcctccatcgatcgtacgtcgtcgatgttgtacaggcgcatctcctcccaggcttccgggttgtcctggaggcaggctgcccacaggtcgaatccggggaacttgccgtggaggcgcttcttgatggtgcatgccttgtgggtcatgtactccagcttgcggctggtgaacgcgaattgctgcttggcgatgatcaaggtgtcgatcaccttgaacggtctcggcggcggcatcttgttcaggaagaaccgggcgttgatcttgggcacgtcgaagcgcttgccgttctggacgatgatgatgtcggcctcgtccagcagcttatgcagggcgaccagcaggtgcatgtcgtccagggggtcaccctggcagtccatgtagatcacctcgtcgctgtgcatccacttcgcacagaacgacaggatggtccagtcccgcttgatctggttgaggcccacgttctgcttccagagcgaccagacccagccctcgataggcgaggtctcgatgtccaggctcagcaccttcggaccctggcctaccacgttgcccacggcgccagggaacttgcgcactacctcggcagccttgcggcccagccagtgcatcgcgcccttcttggcgtacatgccgcgcgtcctgctgtcgtggaagcccagcttgatgcaccagttgcggaagcactggcggctcacctcgccgaagcgcgaatgctcggtcaggtgctcggcacccttcttgaggcccagctcgacatagacgtttcgcaggtactcattggtgaattgcttgcggagtttgctcatacgttcctcgcgttgtgctttgcgacggccatcgccgccttgcgtttggcggctgcctgccggcgcttggccagcttcgcttcgtgtttctcctcgtcggtcttgtgcagggggtagatcagcggatgcttcggcccctccagatacgtcaggagggcacgaaggtaggggatgatgtcggaatacttcatcgacttgcatccccaggaacctgccgcattcgttatcttgccttctgcggtgttacaggaccggtgcaggacgccccgcaccagccccgtttcgtggtcgtggtccatcaccgcttcgcccttcacgctgatatcgatgggcttgccgcagagcgggcacagcttgttctgctcggcccatagcttcagggtgaaggtgcgctgttgactgcgcggtatctggtagaccttcggctcactcgtcataatcgctctccctccgcttctggagcagcgcctcgtggtaggcgtccagctcgatgatccactggcggaaggccggacgaaggtcgcggcttaacagatactgcgctgcgttgtcggtaggcgttcggcgcatccacagcacctcggcctctgccagcgggttttgcttgatcttggcgtacgcctccaggatcatgtcgatggcctcgtcctcatccgtgatcggatggaggatgtcgaaggccgtcttcataccgcagagcttaccgttgaatcgatcgatccctcggatgttgtcagcggtgtcgccgccgagccactgcgccaagaagaacttccgtccatggcccttgagcttgaactggccggaaggcgtgtacgcttccttgaggtagccgaatccgccctcgatcctgctcacacacgccgtatcgatctcccaatacgggtagatcgtcatccgcaggtctttgtcgtcggaccggatgatggccttgtcctgcatggcgtaggcgtccatcatcatgccgtcgtccgcctcgaagaacgtgtgcaggatgacatcgatcccctccggcgccccgcctcgctcatgcacgtccgccacggcccgccgcagtggctccagcagcgcgggctttgccttgcccttgcgctggccctggtacggtttcatggtcggatacgtgtcgcggtacgccttcgccccacctgctgccgtgaggtgaacccgtgtccctgtgcagtgcgctaggaactgctgctccaaaatgagcttccagaatcttcggagtgcagtgtccagggtcttagcagtggccgcagccacataggcgggtccgtcggcgtcacacaccaacgtcccgcctgccatgctgcggtcgaactgcgcggatagtcctgccaggaactcttccgatggcaggcgcattagacctgcggtactgccggcactaccgggaccgccgggacttcgaccgctgccggagccgccgtctgagccacctggggcacgtcaggcagcacgttctgtgcctcggcagtacctaccacaggggcggccacattcgccacctggggcacgctgggggccgtctgagccactgcctggggaacagccgggacagccggtgctgccgctacgccggcgtcggcggccacgttgggcactgccggcaggttgctgcctgcggcctgggtcgtcggcttgatgatcagatcatcgccgccgcccaacatgatgtgcagggccgagccggggaagttggtggccgagcgaatggtctcttgcaggaagttcttggacttgccgttgtccgaggtgccttcgatgaacagggcgtcccaggtctccttggtcggcgcgtcgaagaagaaatactgcaacaggtccatcggcagttccggcacgttatacgggctgccatcgaccgggttatagggcttcatgatgccgccccaatcgatgtcgttgcgttccttaccggcgttgttgcccttggtgatcttggtgcgcttgatcgggatgatgaacgcctggccgagcatctgagcgaagtgggtatgctgcccgctccagttcatcttgtcgaaggccagcttggtcttggacttttcgttgttgccgagggtcatctcgaaggtacggaacaggccgggcttgatcgagccgtcggcctcgtaggtgtggaacaggtcgtccgggcggctctgcgggttaccggcctgcgggttcacgtcgccccacaatgcgaagcccaggcggatttgaggcgccggattcttgagcttgccctggaattccttggcgtggtcacccagctcgatgtagatgcagaagcggcccatggcggtgcccgccgggaagatgcgaccgccgccaccgccggtggaggtttcggacatgtcgatggttgcggtctcggcagccttgttggccagggcgagggcggcttgcagagcgttgagttgttgagtcatgcgtggtctctctcgtgtcgaatgaagatttaaggccggagtaggctagggtcggcctagtcccggatcacgtccatgttgaacatgttgggtcccatctcggccaccgccgggaagggaacgtccgcgatgtcgtagcccaatcgctcgctcatgtagcgggcagcgtcggccatgatgtcgcgcacgccacggttgacctcggcggcggtgtccttgtggcagtcggtgtacacggcatcgtgtacgttgttgatcaggaactcggtgaccataaatcctgggcgatgcagcatccaacggaagatgcgccctacgctcacggtcatcatgaacccagcctcgccctggttccagtagttggcgatctgcgtgtccttgaagtccatgaccgtcttgcgctgttccttgtcccagcgctcctgttggcggaagctgtagcaggtgccaccaggcgcttgccagaatccccggcggtactggcgccagttgccatccggccccatctcgctgaaggcgcctgccggcatctggtcctcggccttgtacattacgaggctggtggcctctgcactgtcgcggacgatctgccggaatgcgatggactctgggaacagggccgcctcgttgtccaggaattcctgggcctcttccacggtacagccggtgttgaatgcgataccagccgcactcgcgccgtactgcgccgagaatgccttgggcttgatgttctttcgagcctgcatcatgcgaccgtgccacgggtggttggggtccttcttgatggccacgagctggtcgtagtcgaacccgttccagttgttgtgcttccctgccaggcggtacaagtgcatgtcagtgccggccatcagtttcgccaggaggttccgatccttcgacagggccgccaacatcaccacctccagggcggtatagtcggtctcgccgatcatcccgtccgcgccgaagcgagacacgaacatctccttcacgcggctgccggcttccgggtcgtcctcgtccttcgacgggagctgctggaggttcgggcggctggacgacagacgcgttgtcgccgtcgccgtcgtattcagcgaatggtggatgatgccgtcgtcgtccacgtactggagcatccccttcgtgtccttaatcgtcccatccttgttgtaggtgtgggtgatgtagaacgaggagttgtccttgtgcagctcggccaggcgcatcaacagcttggccgcctcgaagccctgtttctccagagccttgagggcgtcgccgctggtgctgaacacgggcgacccatccgccagggtgagggcgcactggaactccgggcgtttgcccaggaatttctcacgcactacttccggaaggttggtcaggttgatcaggccggggaaccggaatcgctggtcatcatcccacttggtcgccgggatgtccgtatcctcccggaacaccttgacgctgcccttgttcttgccagcggagaacgtgatgaccgggccgtgcttggtcgccagctcggtgatggtgggccagtgccactcaccctggtcggtcacttcatggatcgggacccgaactgaggtactctcgattggagtcccccgcttggccgtaccgaagcgcacgaagtcggctttctccatccggccatcttcgtatggcacccggcccttgtaccgcacctcgccaccgtagagccatgcgctcatatggtagaggctggtatacttgaactcgaagtattccgggaagtcgggcatcagcttcttcagctcggcctcgatcccggccacctcttccagttgcttggcgtggttcaccttggcgacttcgaggtccaccttcaggccggcacactccatcgccgagaaaccgatcagggcctcgcagcgctccaggtagccagcccacatgccacgggcctgaagcttcatcagctggccgtagaacacgagggcggtattctcgatgtcgccgcacgggccggacaggtactcgctcagcaggtcctggtccatctccgaggtgagcacaccctggtcccacagcatcttgatgccgtccaccttgtgggtgccgccgtacttcggagccagctcgtcgagtgccgggtacagccacgtctgatgactcagcagatactcggcttgctgggtacaccagacccggccaccgcgtcgcaagaaggccaggtactcgtcccggtagcgggtgaagaaccagttcgattcgaacatggcattgtgagctacgatcacgtccacgccgtcgaggttgaaccagcggttgttcgggtcttcggcttcggcccggctgcggaagcgatgttccaccttctggccgaccttgccgtcaacatcgtcccgccagccggccatgacgatgtagttgcgggggtcaaagggcgacgccttgcgccccttgtgctcgtagctctcggtttcgaggtcgaggattcggatagtcgtcatttgctgtaccagttgctttgactgtactgctgcgccttgaccagtagaccttccagcacacggcggggaatctcctgcatcaggtagcggaccattccttcacgtccccatatggtcagttggtacagggagaccgcgtggcagaatcccatacggcccagcttcgcatggtcgtagtcaattcgaatcgacagctcttccgcttgcgggtccatatgggccttggtgcggaggccggggaacagcaggtccaggggttcgtggatatccgccagcaagcagcggatcatgcgttcttcctcggtgggcattctcatactttgactcctacctgtcgcagattgcgacgcagacgtcgcatgacccggtgcaacttacggcgaccggcgccgagggattggatgtcccgcgcatgatgccgaacttcggacccaacgtggtcccaagtccctgccatgacgcagatgcggaatgttccgtcctggctgatgaacacggaacccatgacgtacttcggatacagcagcgaatcccggttggtggcgtggtataccatatcttccgggtagttgcggttatgggactttcgaatcttcataccttcactccagggttactggccaggtcgcggaagcgactgaagctgggatggcggagggtgttggctgagcgttccatcgcggagacctcggcgatgcgtccatagttcggcatggcctcgtcgatgcagccgttgaggtgggcgcaggtcaggagctggatgtgctcctcactcaggccggtggcgccaacggtgccggaaccatcttccagctccacacggtagcccacgacgcggcccacgttcttgccagtcttgcccatcacgtacccgacgatacgcccgtccacggtgatctccggcttgcgcttgtagcagccagcaaccttgccgttgcggtaggtcaggctcgggtctttctccatcgacccctcgaagcccatggcgcggtggtagccgtaccagcgtagtaccgcctccatagaacggcaggattgtgcggctacctggaagaagtacggggtgtcgccccgccggcaatcttccatgaggctgcggaccatggcgcggcgctcatcgtatatgaggtgggacttgcgcgatttgcggagcacgccgatatgggtggcgtcgaataccgcgaagtgcaggcacttcagctcggcctcggtcagcggggtcttgcgggccatgcgcccggtcgcctcactgaagggcatgccttccaggtacatctcacagtccaacaccagaccggagtccaggccgggctgggacagtttcgcgatgatgcgatcctccaggccgtccagggcagggaagcggcggccgctgcgggataccacgccgtgcgcacccacgatggcacggcacccgtcgatcttaggctcgacgatcacgtacccgtgcttcttgatgatggcctcgacggccttgtcgttctgatctacgccgcgccagatgcctttctcgatatccaataccacgtcgcgcttgctcatcacacgttctcccatccgtagtacgcggccttggcccgcatcttttcgcatcgctccggcagtcgcgagccggaaccaacttccttgttcacgccccaggtaacgtccttgtgcaggtacacacccagtcgcgggccgccctcggggtccggccagttgtacgcgatgcccacttggttgatggtgaagtcgaacgactccatcacccgaccgaggctgtcggcatcgtagtagttgaagtccacgtccatgccttccaggccacggcagcccaccagggatatcacgcccttgaagataccgccctcacctgcgtcggcgtactcggtactccagccaccgtcccggacgaagcgcgggtccagggtaggaagcacgctgttgatgagcacttcagcctgatactgcgtcatgccgtacagggcgatgtccacgtcctttggagtggcgccatgcatgaggtcgcgagggaacccaccggccagggcgacgccctcgttgggccgtgcatcagagtacaggcgcagcaacagggccttgaccccggtcggcagtgcaatggaacccagtggaatttctttggtgccttcgagcacccggctatgcttagcttgcatggtctacactctcaaagaaacgacaccgtgcggcgtcgaagttaatcatagcctccacgttcgaaggcttcccgtccatctggaacttgttcttcggcagggacaggccgcgcatgacctgttgatccgcaccgttgagacggcccaggtggatttgcacgtccacagcaccctgtaccgccgtcttcgaatccttgaggcaggactgcggtgggaacaactggtcgtgaccgtcgttgctgatctgccacgtcatgaagctgatgaagtcgtgacgcaccgccatctcgcggacctcggccaccttgtactccatctcgtcggtgcggttctggtccttgcgctggccacctttgacgtgggccatcatgtcccaaaacaccaccgccggcttcatcgcgtcaatgacctgctcggcctgggccagggacccaccgtggaagtccttgatgcggatcagctcagagtcgccgccgattttctcggcgtacatcctgcgaacctcctccgggtccagggcaagaatctcgcccacggtcatgcccagggctgccgagtacaggcgcggcttgatccgccggcccttgccctcgttgttcagccacaggatgggccgcccagggtcgaagtaccgcttgagctgcggcgcgatatggacagcgatccaggccatgaacgaggtcttgcccgcatcaggcggcgctgccaccagcaccgaggccccggcgtggaggcccttcatgtacgccggaagcaccagccccggcagcttgatgccgtggtcaccctgctcctccgccaggatatcaaacacgtcgtccgtcacatagtcggtcggcgtactgaccccctcgcggcgcagggcctcgtcgctcagccggcgcagctcatacgccaggtcgatgtcttcgccctggttgtactgcgccaggagggcatccaccctgcctgaaaaatccagttcgttgagctgggacacaacgccctgtagcgagtccgggtctaccggcttgtccagttggttgacgaggttcaggaccaccgccagttgctccggctggtagccacctcgcagctttatcagttcgcgtagcgcctgcgggtctaccttctgatgcgctgggtagaccttccagtattgctcgatccagtcgatgacaaagcacgtctccggccccatcatcccttcaggcaccacactccgcaacgtgcggaagcggtccttgtcactcagtgcgtgtagcgtcaatacgtccaattactaggctccttatctgctcgcgggtcaggtccttgggatcgaacccgtccggcgtgggtattacttggccttcgataagcagggaccggagccggcgcatcacgcctgcactaccacggacacctgccgggtcgccatccaagaagatgaaggcgcgcttgcaggtctgctgcaacatgatcgccgccagcctgtcgcgcagccttgtaccgttcagaccgacagcaaagacttcgggacaggcccaccgcaccttcagcgccgacaagtagtcttccgtcagcacccatggcctgcccattgataattcctggggccatccatggtaatccggggcaggatacccgtagcccacccacttgggattttggtcggcagtagcgcgcccaatccagcccgcgttggtagggaagataagccgatgctgcctttcgctgtacagcagcggcagccctggcgtcatcacgttgtagtcgatacccttggacagcagcaaaccataaagcgattgatagcagtcggcttgcgtccagtccgaggcatcctcgggccagggcatgaagcgttcttgatccgcgcattgtaccctccgcacatgcgttttctcgaccacaccaccctcctgacaggagtagcagtaagccacccagcggtcaggcaggttcttgcaggtcatgttggtcccgccccggctcatgctcttgcatcccaggacgtgtcggaaccggcctacctgcccaaccgccagggattgcgcttgctttagccaggagtcgcggcgcagtgccattggtaccattcctcccacaaaggccgcagcccacctcgggcctcgaacatgtcctggaggtgccaggtcatgcgggcgccgtaggcgggccgccgttgttctgtgtgagcagcacgcccagggccaccagactgaaggcgactccgatgaccagcggtttgttctcgataagccatgtcatcacctcatacgtcatggccgggtgccctcatgtgcaacacgtccggctctcctgctgtccagttcgcctcgcggtgggtggtgctccagcccaagtcggcgtagaacggctccaggaactcgaagcaggtcagatactcggcacccgccagctcggcggcccgcaccagctcagcgccgataccctgcctgctgtgtcggtcatcaacgcacagggccttcagttcaccgcccactacgaggcaggaacctaccatcagacctgacaggtcgaaggcaccgagggccagcacgcctcccttcttgcgccagatgtcgctatcttgccagccactccggcggaggtggagcacacactcggcgatactcgcactcagctccccggctggactcaggctttcccggagcgggtggtacttccgctgccagaggaaccactgccaccagttctcggcgttgctcggggcttggatgctgaatacgtggatcgtcctgatttgaatcaggccgggatgcaggctcagcggatacaggctcgtcttgctcatcttcgatctccctcaacttgcgctggccgaagtcaatcaggtcctgcgccatgtaatgcacaaggctgccggcacacgccgccaccttgtcccaggttgcccgcttaccgtcgatgcacgggaagacagcctcgtcctccagctcgacgccgaagcggtatccgttgtaatgcgtgaaatggtattgcatgttcgtgatcctccagactcacacgagagggcgctctaggaacgccctcggatttgaccccggagtaggccctggtcgcttagacgagcaggtacgtcagcacgctacccacgacgccgccggcgatggtggctgcgaaggttgctgcctgccaggtgtccttagccgccgccttcgcccgctcacgggcctcggcctcagccttcgccacggaagcgcggaaggtataccgcacgccggtcagcttgctgatgagctgacagacggccttggtcggggccaccgtcagcaatcgctgagtctccgcgccgtcccaatacaggccggcccgttgacctacctccaccagccgggtcaaaccctgcttgaggccgaacagttcagcgcccatctcgttattccggtccgcaagcttccgtacccggctgcgcagcggtccgtccatttctattccggcatcgcgcagggcacggtttaccgccagcttggttacgtgcagatcgtgtagacgtacctcgaagtccttggcggacagcgggccggccttcttcgataccagcgggaataccttgagcagcagtttttcgtactcatcggcgcgcttcgcgtcggcctggcacaagctggccgctacccgcgcctctagatcggcatagccacaggtgctgacgcgctccacgttatccaggcgcacctccaccttaccaccgtcacaggtgacgccgctcacacgggcggtgtaagtcccgcccgaagcctgtttcttgggcgtataggcgtgggcgaatgcccggctcttggccacccggcgcatctccggggataccttggcacacggcacgccgaacatgctggccgccagcttggtgaagtgatcgttgcattccattgtcagactcctgccagtttcagggttacggccagacctgcggtcagcaggcatacccaggccatgatggttgccttgcgagcgcggcgctcttgtgcctcgtgggcatcgtgcgctgcgttcaagtcgttctggagcagacggatcgtcgcctgatggctgcgaatctcgtcgatctcccagcggcgcgcccgctcggcggcctggaggcggcggctcagggtgtcgatatcctgggcgcgctcctcgcatacagccagggcggattccaggcgatcttccagggcctggatggcgggtgccttctgtacgctcacgctgcgtaccgggccgctgatgtgctcggggttgtgcttgctcacgttgactcctcctatggtatggctagctcgcaataggcccggcagggccaggcctattacgtgcgggccttactcgccttgggcgatggcttcgtccagggtctcggcggacgctgccggggcctgcactgcgcggatggcaccggccttcacgtccagcagcttggccggggcgctgtcgctgaagcgcaccagtacctgatagacgccggcgactacgctgatgacttcgccgctcagcacttcggctttctcgcccttgccgtggtcgaaggtgatcacgtcgccggcaacgaggctggacaggcgctcggcggtttgcagggcgacgaccgcttcgttgtagacctcggtcagcttggtcagggcgttgtggtggaagacgacgttgttgcggaagtcttcgacggtggccggcttcttgatgagcttggcgcccaggacggttgcgacggtggtttcggtggtggtgttggtcatgatgtagctcctagaggttggttggttcgcggcaaggaatggccacggtggaaggctggcgcaccagccttcgccttggtcactcggcggtgagtgtcacctgggtccccttgtcggcgagggccatgcgccacccgtcgttgcgcagcacggtgggacgcggaccggtcaccttggcagggccgtcgtcatggataaccacgggcagcactgcgggacggcccgtgctgtcccaagctgctacgccgatcaccagtgtgccgcgcttagcctcgggctgcactacccgatacatctcaccggaacgcaattccgtgaggtcgaagagacggcgttgctcgcggtcggtgttgtgggtatgggtgcggatcatgttacctccggtaggttatttgatgttcaggtgacgcttcagcccggtcagcaggccccggcctactgcacgtagtgccaggaatgtgcccacgatgattatgagtggccagaagcacccgatcacgcatgcgtcctggaactgcacttccgtcgggttctcgaacggcggcgacactgcgatgcagtagcaggcgcctgctagtatgccgaggcaacagtacaagccgagtacaagcagcgcggcgatcattggccggcctccccttgaacaagtttgatgtactcacccgcacccaggcggcggcaccgccagtctgtgttgagaatggccgtacccaccgcgtactgcgcggggttcatgctgtgcagtacgatgactgcctgagcgagggcgggcgtctgcttggtcgccagcacaacggcgccctctgccacgctaggcgtcaccaccttgtagagttcacctggtgacaggcgtcctacggacaagactggcggcgccgggtcttcaggcttgacatatatggtcttgacggtcattactcgccctccttcacgaggtcagtgcgatgcacctcttgtacttcacaggccgggtagatagcgaccgcgccgccgaggaaccagagttcgacgaaggcgtggccggcgacgatgctgtcggctaccacctggcgagtagttccgtccttgagacggacgacgtaggtaggattcatatgcgcttgctccagttcacgatgaggaaccggctcccaagcaaggccgatcggcgatgcttgcgaagccagcgtttggccgccttgcgtgagtagaatcgcaatggacgcacaggtcgcttgcgactccacacgaaggcacagcctcctgatgggctgacggctatgatgagccacttcatttacgggtcggtagctgtctgatgaaccgcacgttacgggcctcggcctcgataaggcgcaaggtacgctcgcagcgtacgtggtagatcgtcatacagcgggacggtcgggttatggcttcaatgatgcccttggtgcctgccgcgtcggcacccaggtagcggtcgctgtagttcaccagccccacgcggtggccgatacggtagggatcacgcgaggacatggtacgaggttcctgcaatgtcgaagatcgggcgcccgttcgcgcagcccttgcggtattcagcgttgatccagccatacgcctggcaggtgacgtgcccggacagcgggctaccctgtaccagcagcacgtcgaatccttcagagtccaggtcccggctcaggcgatacgcttcgtcatagcggttcacagttacgccggcgcccactaccacgaacccgcctggggtcaggacgtgcgcggtattcaggtcacccatacggaagccatgggcgcacagcgccttgtcggctgcgttgaatgcgttcgacgggtccttggggattgcgatcaacagagtattcaaagcttgcatggtttagttctcgcttgtgatgagtccagcaatggccccggagtaggcgagggtcgcccgccagggccatgacttgagtcaccgcttcaggaggtggatgaagagtaccgtcaggccgctgaaccacaacatgcgcagttcatcctcgccgaggttgaggccgagttcgaggaagggaagggcgatccagaagtccatggtcactcccccttcgcctggacggcctgctcgccgtacgggaactgagccgggcggctgtactgtgccagggcgatttggcgttgcagacgttgcttgaagctcatcgtgtttctccagttgtcattgattccagcggaacgcccgcttagcaggcgttcgacttgagtcaatgggcagcagcgcgcttgctctgctcagcgataggtgcagccttggcggccagcgcttccaggtcacccagcagttccatgccgacgatcaccttgcccttggtctgagcctggagcacctgctttttgatcgtggccagggcagcagccaggttgaactcctggtccagcgctttctcaggcttgaagctgtaccacgggctgttggtggcgccgacgagatcggtcttgccgaacttgttgtacaggaagggtaggtccttgttcgatttcttgtcagtgttaacctgtaccttgccgtgcagcaccaaccactcgaccagcgcattgcggcggctgcccttcggcatggcttcatacagcgccttgactacggtcacgtcgccgcactggtcgatgtggtggatgatcgacaggccggtcagttggatggcttcgtccagttccttgccacggacacggatggcgtcgatagcgcggttgatctcttcggtgccacggaatgcgattacggttttggagattgcgttggtcatggtatgtacctcagatggatttgttcaggtaagcagcggcggccaggtagccagcactgcggggagtggtcagggtatcgacgcggggctgcttagcttgcgcctgctcagccttgcggaagatcgggcagtcggcgcctttcggcatcctgtgcgctagatcaatccggcgtgccttgtcgcggcgagccttggcggccttgcgttgacgcggcgtcagttcattcacacgtggcattacaaacccttcccttgcgacttcttagcgttccacccctttaggatgttccgcgccttgccttcgctacccttcacgaaagccttctgttcagggttgtggtagcgtcctggcgctggctccgggtcggtagcgtagcgcacgtcacgcatcttgcgaagctctttgcgcccttcgacgttatcctgtgcgatgagcttagtacgtttggcttcccagtcccgccagtacgctacctgagcagcaaagggtgacttgggagccttagccttgaagtgtgccatcggcaatcctcactaggtctgtctcttgaatcccctcggtggaagggcctcaagggacaaaccttggcattggcatagtccctgtagtatcagcggttctggcttgtcctgcgcatactcttcgggatcgtcttcactcatcccccgtaccctttgcgctatctgcctggccttgttcaatcggcccgccgatactacccagcatactgtcagtcgcgattaaccgggtattctagtcccgatcccactgacactctattcgttcccaccggacctaccataggccctttgcttaaccgtggacggggaggcttcccgctcagactcttttgggtgagtcttcagcacccgacaggtattccctggaaccctgcctaaccagttgcagcttcggtcaacctaccgcaccagtccatgtaccgctggtgaagcttcgaacctctaccgccagatggctcagccatcctttcgtcttgccgcgcatgttagagacttgcgcttgtcttgtcaatcctctgtcggggattagttcgtccagttctccggcataggcccttttgctgaggggccatcaggtggtgcgaactgtaccgcgtgtcctgcaccgtgtcaatccctgcgatgatgcctgccggccttacacatcgttggtcatgccctaagagtttgccgtgtcccttgcgcctatggcttgtgccgcgcttggaaggttgcaatctcccgtcgttctggctgcgcatcctaccgatgtcctggcagggtgtcaacccctgtctccaggctgcctgtagaggcgttgttgcgtgaagacagggcgaactctacagacctgccgcccacgtgtcaatacccgcgccagggcgctccctggagccttcccacgcgtatagagacccacgcgtgcgaggcttagtctggctagccaggattatcgttcccaggtaacgcaaatccaccacccagggagcagccacccagccagggccaccaccctgaaacccgcgtggcactaaggctgcggttatgtcacacacaatggacaaataggcgtccatcagcgccagcggcgcgaccgaggcaggccgagggagtggcgagggtaagacagcaggaccagcggtagcgccagggagacagacccagggagcaggactagacaagccaggtagaggcgagtagagtacgcggcctagagggaacaacccaggtaggaccagggaagctccagggcagaggcagccaggcagagggcaagggcacagcccaagcacaagaggcaaggccagccactcccgcaaccaccaccagaccagagggcagaggccccaggaggaacgagatgctgagcagacaggacagagccgagcgagcctggcaccagcacgacgcagcatggcagcggaagctagccaggtgggcagcagaggatgagcagcacagcccgtacccagcggccagggccagggccaaggatgaccggaggctagcgctggtggcgcaccgcagggcgctgagtatgagccgatggaccgccaccccgccaggggcttgacactcccggcaggatgcgtagaatgggcggcgaagggcagggaagcccaccgccacccggcgaagccggaagctcccagggatgacccaggcaccacccaggcaatgcgaggggatggcccaccagacggagggcctacgggggaagggtgggctgatcagagtcgggagggttctcacacgacgatatcaaaattggacccggagtaactactcccagcccaggccagccaatccagccagccttccagccgacctcaataaaattccagtagttccagtggagcacccgactatgcaggtgctcggcttgagctactcgatcacttgtagaccagggccttggcggtctcgacagcagccatcagctcgtcgagatgcgcgaccagttcagcgcgcagcttggtctcgttgtagccagaacccagggccgcttcttccagcggacggatcaggttctcgatggtgccggcgaaggcgcggaggtctttctgagttgcagcggcgaaggttgccatggttcagttccttgtgttatggatggagtcaggttggacggggctgtagctcagcccgccggtgcggtgtatacgaccttggtgatagcaccgttggctacggtcaccttcacggaaccaccgccgtccacgggcagggtgtcaccgttcttcaccttgtaggcggtgagcgggtccggtggagtagcgccaccctcgccgcccagggcggtggctgctgcgatcacagcggtggccttggccttgacatcggcctcgtccatgtcgtgcagggcgatgcggttgtcggtgccgggctggcatacctggtagaaggtcaggccggtgttacggccagcgaggtattggtcacgggtgttcgccatggtcagtctccttgattcagggcgttgcataggtccagggcgtcctgataggccgctacagcgcggatcaggccagcctgggtggtagggtcaatcagtgggtgttcgcacagcacagcgggcgccggggcggttgcacaggctgtcaacgacagcagcaggcacaggccggtcagcccacgggcggttctggtccagggcacggtccacctcctggcgctgggtgttggtcttggcggcaacctcctggacgtggcgctgtaaggtggcatagcgcacctccagggcctccgcacgggccgactgccgcttgatctcctcctgggcgatacccaaggcccggtagctctgaacgaagccgtatgaggctcccagggctaccacagcaaggacgagtattgcgacgatggttcgaggcattgcttgatctccgcgttgcggcgattcacgaggcccttggatacgaccttctggccgtcgatcgtgaccttgttccacatggccagggcttggcagccctcagtggcgcggccttggttgaagcgcttgaacgctgtgctggttgtacagactggacccacgttgtagcagaagaacgtcagggcggtttgctcgttgacgttcagcggcaccttgatggcgtccaggacgatgcgctcgaagcgctggtagtccttgagcgtcatctggtagcactgctccggtgtggctttgtcacccatcttgaccccggcagtggtgccagagcagatggtgggtacgccggcgatgtctcggtaggcagtggtctcgctaccttccagggcgacaaggccggcgagggcagccgcaagggctgcgccgcgcaggggcttgttcacttcttgaacctccggcgaagctccgcgatgctatcgagcatcttcgggagcagggtgatgagctgggcgcccacgtagagcgcggtgagtaccgcagcacagaggctggcgatctcatagggcgagtaaacggcgatccccacgccggtgacggcgagggtgcctttgcccgcctcggtggcggtatcgagcatcatagtcttcgtccttttgggcggcccttgcgacgctcccggcccatgccgagagaccgaaggacagacttagtgtaacccatcgggttgttcagccattccttcttggcagcctcttcacgagcgcgggttgcggcttcgtcgtcctttacgagcgtgggtgctagctcgcggacaaggccctcaagggcatcgatccggtcgtccttcggcagtgagcctcggtcggtggtgatgttgtgaatctggtggaacacggagcgctcattgcgcttgtccgctgggtactgctgacaggccacatggtcggaatccatcgccgatacgtggaagatcagacggtgccgctgcatgatgggccgcagggtgtcgatgatgcgacgctctttctgtccggacttctggcggtcttctacgccgatcccctcatagcggggcttgttggtgtccgggtcgatggatcgcatgtggttgcggaagagctggccaactgcaccagcgccgaggtttttctcgacatagatcaccttgacgccataacgcgcagccagggcaatacatttctccaggttctcctcggcaaagccacccttccagccgccgatgctcacgacgtggatgtacgggccaagagtcccgcccacggcatacgacagctcgtcgccaccgtcgccggcagggtccacgaacatcgtcatttgctggagtggtgcccagccgccagccatcagcgccggcaggtacagctcaggtttgatgaccgggaatcggtgggcgtcgaacttgagcttgaagcgctcatcggcagcccaggccacttgctctggcacgctctcatgcgtggcgtcgatgaacagcaggtcgcgcagcttgagctgcatacgctgctcgtcggcgaggctggtgtccagcatgtactgaagctggaagccctcggggccttggtcaagctccttgtcgagcaggtcctcttcgttgtagcgctgcggatcggcagcccagccacgggtcccatccaggcccttgccggtgcgcgggttgtggcctttctcctccaggcgggcaatgcgcgccaggatggaaggtgcgagccagtcaccgtagcgttcctgctcatccagggtcgggaagcggcccggccagatgcgcatcaggaagccccgcgccggcaggccgttgtagatcgactcacgggactgcggcgtgcccaggtagagaatcttaccgtgggtacagatagaggtgaactcctgcgactgtcgcgtcagcttggcccgctcggtggcggtgaggccgttcttcgtggtctcgatgtcgtcagggatcaggatgtcagcccggtagccctggagggcagcggtgatcccgatgcagttgatggaggccgatttctcgacgcccttcaatgcccagttcacgtcgaagctggtggccgaggtacggtcacccatgcgggcctcggggcgcaggtacgccagaaggtcccagtgcatgatcagcttcgtgatcaactggccgttctcctcggccttgtcaccggagccggataccagcatggcgcgggtagccgggttctgagtgatgcaccagaccacgtagatacaggcgatggtggacttggcctcgccacgctgtgcagcgaccatcgccttgttgggcgagtcctgcatgaagtcggcgatgtcgagctgcatccacgtcatcttgaagccgaggaacagcatggcgtccaggcagaagtcccggaagcgcgggtacatgtcccgcacctcgtgggctatctggaatcgttcttgcggcgtcatgctgcctcctagtgggtgtacagtcgttccatctcatcgtcggtctcaccggcgatgaagccctccagggcgatacggcggttctccgcctgcgcctgccgcatttcctcacggagccggtcgatgttgatggtgtcggacggatcgcaggtgatctcgttgtccttgaggaacttggtggcggcagcgatatccgatgcggggatcgggatgtcgttgtccatgtaccacttgaagttgcgttcgatggcggtgcagaccagctcgtgaagcaggcccagccgctcagcactcgcggtctgctttttgctcattacatgtgccctctgaattggacttggaagcgtaggttggttcccatgccgcacttgaccagaggccggaacaccttgccggtgtccacctccaggtgctcctgggtgtagttctcgttctgcgtgcgaacgtacatgttaccgcctcgggtgtagggtacgatgacctgtgcccacgcagttgcgccggggcgcttgtcgtcgagggctaccttggcatagtccacttggcccagctcaactacgatacgacggccctgctgcacgttgaagtacgatagggcgccggtcttgtctgcgcggacgaacacaaagacgtagttcatattgctgtcgaagtccaaggatatcgtcgagatacccgcgtcgatgccatcgccaatgcgcacttcgttggtgccgtcctcccagccgaggtaggtgccgtcattccgcagcatggtgcgccatacccggacgaatagcccctcggaggggtcctggatggcgacccctccgtcgcagaagtcgagcacgtcgctgatgtcacgacgtgccctggcacctacaaacttcgacttggccttgggatcgaggtcttcgttgaagtcgtagatcagtgccatgggttatgccctcgccaccgagaactccattgtaatggagaactcctgagtgttgttcttgactacgggagggtcgatggtgagtgcgtagttccgcccattgtaaatctttaggtccttacagccggtgataccccccggcatgttgccgttatctacggtggcccgtagcataagctgacccttgtaggtgccgcgagtatatcgcgggtacagcttcaccc

SEQ ID NO: 3 - DNA, 42717 bp, unidentified
  source 1..42717: mol_type = genomic DNA
gaggagttccgcaagtacctgtcccaggaggctacgcacgtcctggattcgaccgagggcatgaaccccaacgatgccttacaggcgctggcgcagcagcagaaggccgaggaacagctcttcggcatgcaggctaaggcgtacatggactggtccatcgaccaggccgcccgtggcttccgcacccagggtaacagcatcctggccaaggctgtgcaggctcaggccaccggcgacgaactgtcccggcagctcagcctggaagaggccggcctgttctataccaacatcatgacctccgaggatatcccgctggaggtgcgcgacaaggtaggcatgcagttcctggcggccagcctggacatgaaccagcggggcatctatgagggcctgcgcgatgccgggttcctggacagcatgtccttcgatgatcggcgtgcgctcaacggcctctatgaaaagtcgaaggctcagacccgcgccaaggaatcgatggctaccctgcgggccgacgcggacttccagcagcgggtggccaacggcgccatcacagaccttgccgaggttgaggcgtactcacgaggcatggtcgaggagggccgctggagcgacgctcaggccatctcgttcatgaccaaggccatgaccggcctgggcaacgctcagcgcatgcagggcatcatggcggccttggaagccggagacatcaacgccctccacacgctgggtaccaacgtcaccgaggcgctggagcagtgggacaagatgcaggccgccaacggctcaagcctgactgaccgtctcgtgcagggcacacagctcggcctgcgcctggggaccttccccaagacctacggcgagtccgtaggcagcgcggtgcgcatgatccaggccgccaaggaaggcgaggcaaacccggagctggtcaacacgctgaacagcatcttcgaacaggtggcctcggcccaggagatcaacccatccgccggcaacgtgatgctatccggcatcccggaagccgagcagggcgccgtggcctgggcactcaagcagatgaagatgggcatcgcaccagctcaagctctgcgcgagtttagcgccaacgccgaagtcgtgaagcagatggacgagttcgagaaaggccagaacaccaaggcattcaaggacaacctcggtaagcaggtcaacgacaagttcgtgaacaacatcttcggtcgagcctggaacatgctgaccggcgagagcgacctgagcaacaacgaggccgtcctgagcatgtatcgccgggcgaccatcgacgaggcgaactggctggccagcgaccgcaagcatgcgggtctgctcaccagcgacacgggccgcgaggccctgctggagatcgccgccgccaacgtgcgtaaccgcaccatccaggtaggcgaaggtcggaacctgaaggaaggggacctattcagccgccgcgatagcgcgccgctgatcctgcctcgcggcaccaccgccgagcagctattcgggaccaacgacaccgagaccataggaaccgtcctggccgagcagcacaagccgcatgtcgaaggactcctcggctacaagtcggtagtcgccttcgagtacgaccgcaccagtggcagcctcctggccgtcgagtacgacgagaacggggtcgccctggaccgcacccgtgtggacccacaagcggtgggcaacgaggtgctcaagcgcaactccgacaagctgaacgctatgcggggcgccgagtacggggccaacgtcaaggtcagtggcacggacattcgcatgaacgggggcaacagtgccggcatgctgaagcaggacgtgttcaactggcggaaggaactggctcagttcgaggcttaccgaggggaggcgtataaggatgccgatggttatagtgtgggcctggggcattacctgggcagtggcaatgctggggcaggcactacagtcacgcccgagcaagccgcgcagtggttcgccgaggacaccgaccgcgcactcgaccagggtgtgaggttggccgacgagctgggcgttacgaacaatgcctctatcctgggattggccggtatggccttccagatgggcgaaggacgtgcccggcagttccgtaacaccttccaggcgatcaaggatcgcaacaaggaagccttcgaggctggtgtgcgaaacagcaagtggtacacgcagacgcccaaccgggccgaggcattcatcaagcgcatggcgccccacttcgatacaccgagtcaaatcggtgtcgattggtacagcgccgcaacagcggagtaagacatggcaaagcaattcaagggccgcatgacgcccaagtatccccttgaccaagcacagctcgacgaggcccaagtacagggccaacttgacgcggtgcctaccgtggggttcgacgccctgacgggtggcgagatcggagaacggaacgtggcagcgggccaacgagccaatgcgcgggaactggaacgcatcgtagcggaccaggaactgccggcccttgaccgtgcttccgcactctggaaccagtccaccctcgtcggacgctggggcgatgcgctccagctcgacgcagaccttgcggcgaacagtaccggcgaggtggaccctaacttcgacgctgggacctatggggtccaggcgctccaggcggcaggtatccagccgactgacaactatctccagatcatggcccgtgccggcaatgccgaggacgcggcctacctcctgtcgaggattcaacggtatgagcaggacgagcaaatcgtgcgggacaacccgtactggaacttcgcggctggcatgctggaccctgccgctctggcagttgatgcggttactttcggcgctggccgtgctctgcggctcggtcgcgctggcatggctgctgctggcggcgctgggcaagtcgggtatgttgctgggctggatgccgcaggggccgacgtggatgccggaacctacatcatggctggtgctcttggcgctggcgtgggtgctctgctggggtctggtgcgggacgcattgccgcagaggccccaacgcaaccgcatgtgcccgaagtatcggcgcctactgtcgggctgccagaagtagccatgaccgccgaggaggccgcagcacgcggcttcaaggcaggtgacgtggtagacctgctggacgagggcactgtgctatcccgtgtcagtgcccgcgtggagcaggctgagataccggctattccgcgacgtgacactgccttcggcgacgagctgcatagcctgtcgggccggaagctgtctgaggtcctggaccacctcaagacccacgcagaggtgcccaagccgctccagggcatcgccgccaaggtggctgatactatcaggaccctggagggcctggggcagcgtaccgcgttccgtgtggtgcagggcggtgacactgccagctctgccttcctcaaaccgggtacggcggggattcactccacccagggcctcgacaccttggtccaggtacgcggcagcaccgcacctggccgagttggcaccaacccggtgaccgtgctccacgaggcggttcacgctgccaccgtgggcgtgatgaacgccgccttgcggaatcctggcgcgatgagtccgaaggtggctcaggccatgcagaccctggagaacgtccggggtaacgtgctcaacgccctgaagcaggaccgcgccgccggtcggcaactgtccgagttcgaagagacgctgctagccggtaactccaacaccctggccaacgtcaaggaactggtagcctggggcctgacggatacccgcttccaaaggaccctgaaccgcctccgctacagtgacggcgggccgggcctgtggtcccgcttcgtggagggcatccgcaccctactgggtctgcggtccgatgctgacacggccctgagccgcgtcctggccgcctctgagacgattatggaggccatgcccggctacactaaggcgcaggccaagtgggccaacaagggcgctccggtaaccgaggaggccagcctggagaccatcgtgcggaccacccgtgaacgtgcccgtgagggtgccggcttcgtgaacaggttcttcagcgaggcagacctcctggcacagcctggggagggcgcacggcgactcctgagccgtcttatcgacgacccggtacgtcgggatgggttcagcacgaacgacaacgcagcgagctatctccgccgctatcggaacgagttcgagggttacgtgaagtcctacgacgagatgatggccaaggcaatggctgagcagggtgtgggcctgacggcacgtgcgctgaactcccgccgcgccatggcagtccgggaccagctcaacgagcaggtcacccgcgagctgctgcgccgggaccgcgagtggacggcctacggcagcgtccgtgtggacccgaacctgccgccgaccatcaaggccctggccgaccgctcagacgagattcacggtctgatgggccagcgcgccagggaagccggtgtgcgtggcttcgaggacttcgctccccgaccggggtacttccaccgttcatggaactggtcgaagatggcgcagatggacgaggccgcccctggcctggcccgccgcgccatcagcgaggccgtgttccgtggcatccctgggctggagcgcgccgatgccgataccatcgcacaggccattgtgcagcgggcgcgggatcgggccaccggaatccgctccgagttcatgggcgcgatgggcgtggcggacacggcattcatccggcaggcgctggaggaggccaacgtgtcccaggccaagttcgacagcatcatggccaagatcgagcagaagcagtccgaccagggcaccgtcaagtacggcaagggccggctgtcgctggacatgaccgcagagatcaaccacaacggaaccgtgtatcgggtgcaggacctgatcgaccgagacctggaccggctgatggagaactacgccggcagtatgtcgggccgctcagcattggcccgcgcaggcatgccgggggactcggagatcgaagccttcatccgggagtaccagcgagaggcagcacacctgggcaccgataaggtgcaggagctgacggggcaactgcggggagtcttcggggacttcaccggcaacgtgccgagggagcatcagctcggcccggttgctcagcgggccagcggcctgaccagcgccaccatgctgggattctcaggcgtgtatcagctcgccgagctggccacgatggcgcaccgtcaaggcgtcttcaacgtcatgaaggccatgctgaactcccgcctgggagacttcgtgggcgccatgcgtcgcgacccggacctcgctgacgagatgcagaccgtcctcggcctgaacctcgccaacgatatccggatgaagccctggaagcggcagttcgacaccttcctggccagccaagataccttcatggatcgcttcctgcacgcaggtaagcaggctgtcccggtgctcaacggcatgaagttcattcacaactggcaatcccgtatgaacgccaacctcaccttgaacaaggtggcgcgggcggctcagggggatgaagcagcccttcgcgtgctccagcagtacgggaaggacgtggactggacgccagtgttggcgcgggttcgcggttatgtcacatacagaggaaggaacgcccaatcgatgaattggggcgcctggagccaagcagacgtgaacaccgtcatgaacaccgcactgcggatcatggacgactcgctgctgtacggcagggtcggtcagaactcgggctttgctcggtcacctgtcggccaaatcctgggccagttccgcagctttgtggccttcgcgcacaacaagctcctccggggaacctatgagaactccggcgtgcttggcgtggcctcgctcctcgcattccagtatccgctcaccgcgctgatgatgggtgccaaggcagcgatcaacggcaagttcgacacctctgatgaaggcatccgcaagatggccatcgacggcatcggctacactgccggtctgggcttcaccgccgatatgtggggtgtggtcactggccactcccgaatgtctgctccggtcttcggactggctgaacactccaacgaagtgttccgaggcgttcgagacctcgtaaccggcgacgacccggcagcagccactggcgatatcgtcaacggcgcggcgggcgcactgcctttcgtcaacgtgttcccggcaaccaagttgctgttggaatccatcaaaggggaatagcgtggctcggttcaagaaccccgagaccatccacgttgcagatggggtcgagactgtattcagtctcgacttcccattcctgcgtcgtgaggacgtattcgtccaggtcgacaagatactcaccaccgactatacgtgggtggacaacaccaacattcagcttgcggaagtgcctaagcagggccaagaggtccgcatcttccgcgacacccccgcccaagtgccggatacgcagttcagccagggcatcccgttcctgcctcgctacatcgacgcgaacaacaagcagcttctgtacgccgtgcaggagggcatcaacaccgcgaacctcgcactggatggtgttctcgacgcgatccgtatcgccgaggaggcccgccgccttgcacaggaggcactcgacgccgctaacgaagcgctgcgccgcgccctgggcttcgccgagattcgcaccgttacggaagactcggacatcgacccgagctggcgtggttactggaaccgctgcatcaccgctgataagccgctgaccctgaccatgcagatggaagacccggatgcaccctggatcgagttcagcgaggttcacttcgaacaggcgggtgtgcgcgacctcaacatcgtggccggccccggcgtgaccatcaaccggttgcagaacaccaccatgcagctctacggcgagaatggcgtgtgtaccctcaagcgtctcgggcctaaccactggatcgtgttcggagccatggaggacgaataatgcgcggcattatcgcgggcatcatggcctctcaaattcggcggcccaagcccatcttggcgacctacccatatcccatcctggctacggatgacgcatggtcttgtaggccgaacatcgtggcagcgctaacacgcgacaccctgcacgaggtgttgaaccagcccggagaggacacctaccacgcgacctccagtgtggtaagcgtgctgctgcggtcgctgactcagctcggctacggcggtggcgatgggttcctgacgggacctgccatccatgcagttttactgcgcgatacggttaaggactacaccgcagaaccttacgcattctcgtcgcagaccgcagtggtaggcgcggagttgaaggttgtggtcgtatactctgagtatatcgtggagccttacgccttcaccacctcaacagcaattaaacaggcggaactgaccaatgtttgagacgcgagttaagggtcgctacacggtgacccatatgaaagccacgggtgaagtcctggcgcaacacaccttcgacaacctcatcactaacgcaggtcttgattggatttgcgccatggatacctctgacctgttctcccaggccctggccgtgagtaccagcactgcggaccctaaccccgccgcgccctccctgccggaagaagttcggcgcaccacctcgtatgcccctaacggcgacgtgacctcgggcctggacggggagtggatttactggcacaagcggtggcgcttcccaataggcaccctggccggtcaggtactggccaccgtgggcatcgtagctcaatccgcggtggggtttgagagtaacaccggcgcgaagattccggcaggtactccactatcctacacccggatcaaagacgccgccggccaacccaccaccctggtagttcaggctgacgagattctcgacgtacagtatgagctgcgcagcaaggctgtggcgatggccgaggccaagttcgtgatctccggggttgagcgtaccatccgcctcaccccgctgcccttcgcgaaccggcgtaacctctacggtgagcgctacatcttctacaacgagagtccacggatcgacggcaagaatgcgtccggtgccgatgtccaagacggtcagtgggtgaagctgtacccgcgatatactcgcggcacctacaagggtcagcttatgctacgggccaccgtagataacggcaacatgccggggggtatcaccggctgtaaggacctaaagatttacaatgggcggaactacgcactcaccatcgaccctcccgtagtcaagaacaacactcaggagttctccattacaatggagttctcggtggcgagggcataacccatggcactgatctacgacttcaacgaagacctcgatcccaaggccaagtcgaagtttgtaggtgccagggcacgtcgtgacatcagcgacgtgctcgacttctgcgacggaggggtcgccatccaggacccctccgaggggctattcgtccgggtatggcgcaccatgctgcggaatgacggcacctacctcggctgggaggacggcaccaacgaagtgcgcattggcgatggcatcgacgcgggtatctcgacgatatccttggacttcgacagcaatatgaactacgtctttgtgttcgtccgcgcagacaagaccggcgccctatcgtacttcaacgtgcagcagggccgtcgtatcgtagttgagctgggccaagtggactatgccaaggtagccctcgacgacaagcgccccggcgcaactgcgtgggcacaggtcatcgtaccctacacccgaggcggtaacatgtacgttcgcacgcagaacgagaactacacccaggagcacctggaggtggacaccggcaaggtgttccggcctctggtcaagtgcggcatgggaaccaacctacgcttccaagtccaattcagagggcacatgtaatgagcaaaaagcagaccgcgagtgctgagcggctgggcctgcttcacgagctggtctgcaccgccatcgaacgcaacttcaagtggtacatggacaacgacatcccgatccccgcatcggatatcgctgccgccaccaagttcctcaaggacaacgagatcacctgcgatccgtccgacaccatcaacatcgaccggctccgtgaggaaatgcggcaggcgcaggcggagaaccgccgtatcgccctggagggcttcatcgccggtgagaccgacgatgagatggaacgactgtacacccactaggaggcagcatgacgccgcaagaacgattccagatagcccacgaggtgcgggacatgtacccgcgcttccgggacttctgcctggacgccatgctgttcctcggcttcaagatgacgtggatgcagctcgacatcgccgacttcatgcaggactcgcccaacaaggcgatggtcgctgcacagcgtggcgaggccaagtccaccatcgcctgtatctacgtggtctggtgcatcactcagaacccggctacccgcgccatgctggtatccggctccggtgacaaggccgaggagaacggccagttgatcacgaagctgatcatgcactgggaccttctggcgtacctgcgccccgaggcccgcatgggtgaccgtacctcggccaccagcttcgacgtgaactgggcattgaagggcgtcgagaaatcggcctccatcaactgcatcgggatcaccgctgccctccagggctaccgggctgacatcctgatccctgacgacatcgagaccacgaagaacggcctcaccgccaccgagcgggccaagctgacgcgacagtcgcaggagttcacctctatctgtacccacggtaagattctctacctgggcacgccgcagtcccgtgagtcgatctacaacggcctgccggcgcggggcttcctgatgcgcatctggccgggccgcttcccgaccctggatgagcaggaacgctacggtgactggctcgcaccttccatcctggcgcgcattgcccgcctggaggagaaaggccacaacccgcgcaccggcaagggcctggatgggacccgtggctgggctgccgatccgcagcgctacaacgaagaggacctgctcgacaaggagcttgaccaaggccccgagggcttccagcttcagtacatgctggacaccagcctcgccgacgagcagcgtatgcagctcaagctgcgcgacctgctgttcatcgacgccacgcatgagagcgtgccagagcaagtggcctgggctgccgatgagcgcttcaagctcaagttcgacgcccaccgattcccggtcatcaaacctgagctgtacctgccggcgctgatggctggcggctgggcaccactccagcaaatgacgatgttcgtggaccctgccggcgacggtggcgacgagctgtcgtatgccgtgggcgggactcttggcccgtacatccacgtcgtgagcatcggcggctggaagggtggctttgccgaggagaacctggagaaatgtattgccctggctgcgcgttatggcgtcaaggtgatctatgtcgagaaaaacctcggcgctggtgcagttggccagctcttccgcaaccacatgcgatccatcgacccggacaccaacaagccccgctatgaggggatcggcgtagaagaccgccagaagtccggacagaaagagcgtcgcatcatcgacaccctgcggcccatcatgcagcggcaccgtctgatcttccacgtatcggcgatggattccgaccatgtggcctgtcagcagtacccagcggacaagcgcaatgagcgctccgtgttccaccagattcacaacatcaccaccgaccgaggctcactgccgaaggacgaccggatcgatgcccttgagggccttgtccgcgagctagcacccacgctcgtaaaggacgacgaagccgcaacccgcgctcgtgaagaggctgccaagaaggaatggctgaacaacccgatgggttacactaagtctgtccttcggtctctcggcatgggccgggagcgtcgcaagggccgcccaaaaggacgaagactatgatgctcgataccgccaccgaggcgggcaaaggcaccctcgccgtcaccggcgtggggatcgccgtttactcgccctatgagatcgccagcctctgtgctgcggtactcaccgcgctctacgtgggcgcccagctcatcaccctgctcccgaagatgctcgatagcatcgcggagcttcgccggaggttcaagaagtgaacaagcccctgcgcggcgcagcccttgcggctgccctcgccggccttgtcgccctggaaggtagcgagaccactgcctaccgagacatcgccggcgtacccaccatctgctctggcaccactgccggggtcaagatgggtgacaaagccacaccggagcagtgctaccagatgacgctcaaggactaccagcgcttcgagcgcatcgtcctggacgccatcaaggtgccgctgaacgtcaacgagcaaaccgccctgacgttcttctgctacaacgtgggtccagtctgtacaaccagcacagcgttcaagcgcttcaaccaaggccgcgccactgagggctgccaagccctggccatgtggaacaaggtcacgatcgacggccagaaggtcgtatccaagggcctcgtgaatcgccgcaacgcggagatcaagcaatgcctcgaaccatcgtcgcaatactcgtccttgctgtggtagccctgggagcctcatacggcttcgttcagagctaccgggccttgggtatcgcccaggaggagatcaagcggcagtcggcccgtgcggaggccctggaggtgcgctatgccaccttacagcgccacgtccaggaggttgccgccaagaccaacacccagcgccaggaggtggaccgtgccctggaccagaaccgcccgtgggctgaccggcctgtgcctgctgctgtcgttgacagcctgtgcaaccgccccggcgcccgctgtgctgtgcgaacacccactgattgaccctaccacccaggctggcctgatccgcgctgtagcggcctatcaggacgccctggacctatgcaacgccctgaatcaaggagactgaccatggcgaacacccgtgaccaatacctcgctggccgtaacaccggcctgaccttctaccaggtatgccagcccggcaccgacaaccgcatcgccctgcacgacatggacgaggccgatgtcaaggccaaggccaccgctgtgatcgcagcagccaccgccctgggcggcgagggtggcgctactccaccggacccgctcaccgcctacaaggtgaagaacggtgacaccctgcccgtggacggcggtggttccgtgaaggtgaccgtagccaacggtgctatcaccaaggtcgtatacaccgcaccggcgggctgagctacagccccgtccaacctgactccatccataacacaaggaactgaaccatggcaaccttcgccgctgcaactcagaaagacctccgcgccttcgccggcaccatcgagaacctgatccgtccgctggaagaagcggccctgggttctggctacaacgagaccaagctgcgcgctgaactggtcgcgcatctcgacgagctgatggctgctgtcgagaccgccaaggccctggtctacaagtgatcgagtagctcaagccgagcacctgcatagtcgggtgctccactggaactactggaattttattgaggtcggctggaaggctggctggattggctggcctgggctgggagtagttactccgggtccaattttgatatcgtcgtgtgagaaccctcccgactctgatcagcccacccttcccccgtaggccctccgtctggtgggccatcccctcgcattgcctgggtggtgcctgggtcatccctgggagcttccggcttcgccgggtggcggtgggcttccctgcccttcgccgcccattctacgcatcctgccgggagtgtcaagcccctggcggggtggcggtccatcggctcatactcagcgccctgcggtgcgccaccagcgctagcctccggtcatccttggccctggccctggccgctgggtacgggctgtgctgctcatcctctgctgcccacctggctagcttccgctgccatgctgcgtcgtgctggtgccaggctcgctcggctctgtcctgtctgctcagcatctcgttcctcctggggcctctgccctctggtctggtggtggttgcgggagtggctggccttgcctcttgtgcttgggctgtgcccttgccctctgcctggctgcctctgccctggagcttccctggtcctacctgggttgttccctctaggccgcgtactctactcgcctctacctggcttgtctagtcctgctccctgggtctgtctccctggcgctaccgctggtcctgctgtcttaccctcgccactccctcggcctgcctcggtcgcgccgctggcgctgatggacgcctatttgtccattgtgtgtgacataaccgcagccttagtgccacgcgggtttcagggtggtggccctggctgggtggctgctccctgggtggtggatttgcgttacctgggaacgataatcctggctagccagactaagcctcgcacgcgtgggtctctatacgcgtgggaaggctccagggagcgccctggcgcgggtattgacacgtgggcggcaggtctgtagagttcgccctgtcttcacgcaacaacgcctctacaggcagcctggagacaggggttgacaccctgccaggacatcggtaggatgcgcagccagaacgacgggagattgcaaccttccaagcgcggcacaagccataggcgcaagggacacggcaaactcttagggcatgaccaacgatgtgtaaggccggcaggcatcatcgcagggattgacacggtgcaggacacgcggtacagttcgcaccacctgatggcccctcagcaaaagggcctatgccggagaactggacgaactaatccccgacagaggattgacaagacaagcgcaagtctctaacatgcgcggcaagacgaaaggatggctgagccatctggcggtagaggttcgaagcttcaccagcggtacatggactggtgcggtaggttgaccgaagctgcaactggttaggcagggttccagggaatacctgtcgggtgctgaagactcacccaaaagagtctgagcgggaagcctccccgtccacggttaagcaaagggcctatggtaggtccggtgggaacgaatagagtgtcagtgggatcgggactagaatacccggttaatcgcgactgacagtatgctgggtagtatcggcgggccgattgaacaaggccaggcagatagcgcaaagggtacgggggatgagtgaagacgatcccgaagagtatgcgcaggacaagccagaaccgctgatactacagggactatgccaatgccaaggtttgtcccttgaggcccttccaccgaggggattcaagagacagacctagtgaggattgccgatggcacacttcaaggctaaggctcccaagtcaccctttgctgctcaggtagcgtactggcgggactgggaagccaaacgtactaagctcatcgcacaggataacgtcgaagggcgcaaagagcttcgcaagatgcgtgacgtgcgctacgctaccgacccggagccagcgccaggacgctaccacaaccctgaacagaaggctttcgtgaagggtagcgaaggcaaggcgcggaacatcctaaaggggtggaacgctaagaagtcgcaagggaagggtttgtaatgccacgtgtgaatgaactgacgccgcgtcaacgcaaggccgccaaggctcgccgcgacaaggcacgccggattgatctagcgcacaggatgccgaaaggcgccgactgcccgatcttccgcaaggctgagcaggcgcaagctaagcagccccgcgtcgataccctgaccactccccgcagtgctggctacctggccgccgctgcttacctgaacaaatccatctgaggtacataccatgaccaacgcaatctccaaaaccgtaatcgcattccgtggcaccgaagagatcaaccgcgctatcgacgccatccgtgtccgtggcaaggaactggacgaagccatccaactgaccggcctgtcgatcatccaccacatcgaccagtgcggcgacgtgaccgtagtcaaggcgctgtatgaagccatgccgaagggcagccgccgcaatgcgctggtcgagtggttggtgctgcacggcaaggtacaggttaacactgacaagaaatcgaacaaggacctacccttcctgtacaacaagttcggcaagaccgatctcgtcggcgccaccaacagcccgtggtacagcttcaagcctgagaaagcgctggaccaggagttcaacctggctgctgccctggccacgatcaaaaagcaggtgctccaggctcagaccaagggcaaggtgatcgtcggcatggaactgctgggtgacctggaagcgctggccgccaaggctgcacctatcgctgagcagagcaagcgcgctgctgcccattgactcaagtcgaacgcctgctaagcgggcgttccgctggaatcaatgacaactggagaaacacgatgagcttcaagcaacgtctgcaacgccaaatcgccctggcacagtacagccgcccggctcagttcccgtacggcgagcaggccgtccaggcgaagggggagtgaccatggacttctggatcgcccttcccttcctcgaactcggcctcaacctcggcgaggatgaactgcgcatgttgtggttcagcggcctgacggtactcttcatccacctcctgaagcggtgactcaagtcatggccctggcgggcgaccctcgcctactccggggccattgctggactcatcacaagcgagaactaaaccatgcaagctttgaatactctgttgatcgcaatccccaaggacccgtcgaacgcattcaacgcagccgacaaggcgctgtgcgcccatggcttccgtatgggtgacctgaataccgcgcacgtcctgaccccaggcgggttcgtggtagtgggcgccggcgtaactgtgaaccgctatgacgaagcgtatcgcctgagccgggacctggactctgaaggattcgacgtgctgctggtacagggtagcccgctgtccgggcacgtcacctgccaggcgtatggctggatcaacgctgaataccgcaagggctgcgcgaacgggcgcccgatcttcgacattgcaggaacctcgtaccatgtcctcgcgtgatccctaccgtatcggccaccgcgtggggctggtgaactacagcgaccgctacctgggtgccgacgcggcaggcaccaagggcatcattgaagccataacccgaccgtcccgctgtatgacgatctaccacgtacgctgcgagcgtaccttgcgccttatcgaggccgaggcccgtaacgtgcggttcatcagacagctaccgacccgtaaatgaagtggctcatcatagccgtcagcccatcaggaggctgtgccttcgtgtggagtcgcaagcgacctgtgcgtccattgcgattctactcacgcaaggcggccaaacgctggcttcgcaagcatcgccgatcggccttgcttgggagccggttcctcatcgtgaactggagcaagcgcatatgaatcctacctacgtcgtccgtctcaaggacggaactactcgccaggtggtagccgacagcatcgtcgccggccacgccttcgtcgaactctggttcctcggcggcgcggtcgctatctacccggcctgtgaagtacaagaggtgcatcgcactgacctcgtgaaggagggcgagtaatgaccgtcaagaccatatatgtcaagcctgaagacccggcgccgccagtcttgtccgtaggacgcctgtcaccaggtgaactctacaaggtggtgacgcctagcgtggcagagggcgccgttgtgctggcgaccaagcagacgcccgccctcgctcaggcagtcatcgtactgcacagcatgaaccccgcgcagtacgcggtgggtacggccattctcaacacagactggcggtgccgccgcctgggtgcgggtgagtacatcaaacttgttcaaggggaggccggccaatgatcgccgcgctgcttgtactcggcttgtactgttgcctcggcatactagcaggcgcctgctactgcatcgcagtgtcgccgccgttcgagaacccgacggaagtgcagttccaggacgcatgcgtgatcgggtgcttctggccactcataatcatcgtgggcacattcctggcactacgtgcagtaggccggggcctgctgaccgggctgaagcgtcacctgaacatcaaataacctaccggaggtaacatgatccgcacccatacccacaacaccgaccgcgagcaacgccgtctcttcgacctcacggaattgcgttccggtgagatgtatcgggtagtgcagcccgaggctaagcgcggcacactggtgatcggcgtagcagcttgggacagcacgggccgtcccgcagtgctgcccgtggttatccatgacgacggccctgccaaggtgaccggtccgcgtcccaccgtgctgcgcaacgacgggtggcgcatggccctcgccgacaaggggacccaggtgacactcaccgccgagtgaccaaggcgaaggctggtgcgccagccttccaccgtggccattccttgccgcgaaccaaccaacctctaggagctacatcatgaccaacaccaccaccgaaaccaccgtcgcaaccgtcctgggcgccaagctcatcaagaagccggccaccgtcgaagacttccgcaacaacgtcgtcttccaccacaacgccctgaccaagctgaccgaggtctacaacgaagcggtcgtcgccctgcaaaccgccgagcgcctgtccagcctcgttgccggcgacgtgatcaccttcgaccacggcaagggcgagaaagccgaagtgctgagcggcgaagtcatcagcgtagtcgccggcgtctatcaggtactggtgcgcttcagcgacagcgccccggccaagctgctggacgtgaaggccggtgccatccgcgcagtgcaggccccggcagcgtccgccgagaccctggacgaagccatcgcccaaggcgagtaaggcccgcacgtaataggcctggccctgccgggcctattgcgagctagccataccataggaggagtcaacgtgagcaagcacaaccccgagcacatcagcggcccggtacgcagcgtgagcgtacagaaggcacccgccatccaggccctggaagatcgcctggaatccgccctggctgtatgcgaggagcgcgcccaggatatcgacaccctgagccgccgcctccaggccgccgagcgggcgcgccgctgggagatcgacgagattcgcagccatcaggcgacgatccgtctgctccagaacgacttgaacgcagcgcacgatgcccacgaggcacaagagcgccgcgctcgcaaggcaaccatcatggcctgggtatgcctgctgaccgcaggtctggccgtaaccctgaaactggcaggagtctgacaatggaatgcaacgatcacttcaccaagctggcggccagcatgttcggcgtgccgtgtgccaaggtatccccggagatgcgccgggtggccaagagccgggcattcgcccacgcctatacgcccaagaaacaggcttcgggcgggacttacaccgcccgtgtgagcggcgtcacctgtgacggtggtaaggtggaggtgcgcctggataacgtggagcgcgtcagcacctgtggctatgccgatctagaggcgcgggtagcggccagcttgtgccaggccgacgcgaagcgcgccgatgagtacgaaaaactgctgctcaaggtattcccgctggtatcgaagaaggccggcccgctgtccgccaaggacttcgaggtacgtctacacgatctgcacgtaaccaagctggcggtaaaccgtgccctgcgcgatgccggaatagaaatggacggaccgctgcgcagccgggtacggaagcttgcggaccggaataacgagatgggcgctgaactgttcggcctcaagcagggtttgacccggctggtggaggtaggtcaacgggccggcctgtattgggacggcgcggagactcagcgattgctgacggtggccccgaccaaggccgtctgtcagctcatcagcaagctgaccggcgtgcggtataccttccgcgcttccgtggcgaaggctgaggccgaggcccgtgagcgggcgaaggcggcggctaaggacacctggcaggcagcaaccttcgcagccaccatcgccggcggcgtcgtgggtagcgtgctgacgtacctgctcgtctaagcgaccagggcctactccggggtcaaatccgagggcgttcctagagcgccctctcgtgtgagtctggaggatcacgaacatgcaataccatttcacgcattacaacggataccgcttcggcgtcgagctggaggacgaggctgtcttcccgtgcatcgacggtaagcgggcaacctgggacaaggtggcggcgtgtgccggcagccttgtgcattacatggcgcaggacctgattgacttcggccagcgcaagttgagggagatcgaagatgagcaagacgagcctgtatccgctgagcctgcatcccggcctgattcaaatcaggacgatccacgtattcagcatccaagccccgagcaacgccgagaactggtggcagtggttcctctggcagcggaagtaccacccgctccgggaaagcctgagtccagccggggagctgagtgcgagtatcgccgagtgtgtgctccacctccgccggagtggctggcaagatagcgacatctggcgcaagaagggaggcgtgctggccctcggtgccttcgacctgtcaggtctgatggtaggttcctgcctcgtagtgggcggtgaactgaaggccctgtgcgttgatgaccgacacagcaggcagggtatcggcgctgagctggtgcgggccgccgagctggcgggtgccgagtatctgacctgcttcgagttcctggagccgttctacgccgacttgggctggagcaccacccaccgcgaggcgaactggacagcaggagagccggacgtgttgcacatgagggcacccggccatgacgtatgaggtgatgacatggcttatcgagaacaaaccgctggtcatcggagtcgccttcagtctggtggccctgggcgtgctgctcacacagaacaacggcggcccgcctacggcgcccgcatgacctggcacctccaggacatgttcgaggcccgaggtgggctgcggcctttgtgggaggaatggtaccaatggcactgcgccgcgactcctggctaaagcaagcgcaatccctggcggttgggcaggtaggccggttccgacacgtcctgggatgcaagagcatgagccggggcgggaccaacatgacctgcaagaacctgcctgaccgctgggtggcttactgctactcctgtcaggagggtggtgtggtcgagaaaacgcatgtgcggagggtacaatgcgcggatcaagaacgcttcatgccctggcccgaggatgcctcggactggacgcaagccgactgctatcaatcgctttatggtttgctgctgtccaagggtatcgactacaacgtgatgacgccagggctgccgctgctgtacagcgaaaggcagcatcggcttatcttccctaccaacgcgggctggattgggcgcgctactgccgaccaaaatcccaagtgggtgggctacgggtatcctgccccggattaccatggatggccccaggaattatcaatgggcaggccatgggtgctgacggaagactacttgtcggcgctgaaggtgcggtgggcctgtcccgaagtctttgctgtcggtctgaacggtacaaggctgcgcgacaggctggcggcgatcatgttgcagcagacctgcaagcgcgccttcatcttcttggatggcgacccggcaggtgtccgtggtagtgcaggcgtgatgcgccggctccggtccctgcttatcgaaggccaagtaatacccacgccggacgggttcgatcccaaggacctgacccgcgagcagataaggagcctagtaattggacgtattgacgctacacgcactgagtgacaaggaccgcttccgcacgttgcggagtgtggtgcctgaagggatgatggggccggagacgtgctttgtcatcgactggatcgagcaatactggaaggtctacccagcgcatcagaaggtagacccgcaggcgctacgcgaactgataaagctgcgaggtggctaccagccggagcaactggcggtggtcctgaacctcgtcaaccaactggacaagccggtagacccggactcgctacagggcgttgtgtcccagctcaacgaactggatttttcaggcagggtggatgccctcctggcgcagtacaaccagggcgaagacatcgacctggcgtatgagctgcgccggctgagcgacgaggccctgcgccgcgagggggtcagtacgccgaccgactatgtgacggacgacgtgtttgatatcctggcggaggagcagggtgaccacggcatcaagctgccggggctggtgcttccggcgtacatgaagggcctccacgccggggcctcggtgctggtggcagcgccgcctgatgcgggcaagacctcgttcatggcctggatcgctgtccatatcgcgccgcagctcaagcggtacttcgaccctgggcggcccatcctgtggctgaacaacgagggcaagggccggcggatcaagccgcgcctgtactcggcagccctgggcatgaccgtgggcgagattcttgccctggacccggaggaggttcgcaggatgtacgccgagaaaatcggcggcgactctgagctgatccgcatcaaggacttccacggtgggtccctggcccaggccgagcaggtcattgacgcgatgaagccggcggtggtgttttgggacatgatggcccacgtcaaaggtggccagcgcaaggaccagaaccgcaccgacgagatggagtacaaggtggccgaggtccgcgagatggcggtgcgtcacgacttcatcagcttcatgacgtggcagatcagcaacgacggtcacgaccagttgttcccaccgcagtcctgcctcaaggattcgaagacggcggtacagggtgctgtggacgtgcaaatccacctgggccgtctcaacggtgcggatcaacaggtcatgcgcggcctgtccctgccgaagaacaagttccagatggacgggaagccttcgaacgtggaggctatgattaacttcgacgccgcacggtgtcgtttctttgagagtgtagaccatgcaagctaagcatagccgggtgctcgaaggcaccaaagaaattccactgggttccattgcactgccgaccggggtcaaggccctgttgctgcgcctgtactctgatgcacggcccaacgagggcgtcgccctggccggtgggttccctcgcgacctcatgcatggcgccactccaaaggacgtggacatcgccctgtacggcatgacgcagtatcaggctgaagtgctcatcaacagcgtgcttcctaccctggacccgcgcttcgtccgggacggtggctggagtaccgagtacgccgacgcaggtgagggcggtatcttcaagggcgtgatatccctggtgggctgccgtggcctggaaggcatggacgtggacttcaactactacgatgccgacagcctcggtcgggtgatggagtcgttcgacttcaccatcaaccaagtgggcatcgcgtacaactggccggaccccgagggcggcccgcgactgggtgtgtacctgcacaaggacgttacctggggcgtgaacaaggaagttggttccggctcgcgactgccggagcgatgcgaaaagatgcgggccaaggccgcgtactacggatgggagaacgtgtgatgagcaagcgcgacgtggtattggatatcgagaaaggcatctggcgcggcgtagatcagaacgacaaggccgtcgaggccatcatcaagaagcacgggtacgtgatcgtcgagcctaagatcgacgggtgccgtgccatcgtgggtgcgcacggcgtggtatcccgcagcggccgccgcttccctgccctggacggcctggaggatcgcatcatcgcgaaactgtcccagcccggcctggactccggtctggtgttggactgtgagatgtacctggaaggcatgcccttcagtgaggcgaccgggcgcatggcccgcaagaccccgctgaccgaggccgagctgaagtgcctgcacttcgcggtattcgacgccacccatatcggcgtgctccgcaaatcgcgcaagtcccacctcatatacgatgagcgccgcgccatggtccgcagcctcatggaagattgccggcggggcgacaccccgtacttcttccaggtagccgcacaatcctgccgttctatggaggcggtactacgctggtacggctaccaccgcgccatgggcttcgaggggtcgatggagaaagacccgagcctgacctaccgcaacggcaaggttgctggctgctacaagcgcaagccggagatcaccgtggacgggcgtatcgtcgggtacgtgatgggcaagactggcaagaacgtgggccgcgtcgtgggctaccgtgtggagctggaagatggttccggcaccgttggcgccaccggcctgagtgaggagcacatccagctcctgacctgcgcccacctcaacggctgcatcgacgaggccatgccgaactatggacgcatcgccgaggtctccgcgatggaacgctcagccaacaccctccgccatcccagcttcagtcgcttccgcgacctggccagtaaccctggagtgaaggtatgaagattcgaaagtcccataaccgcaactacccggaagatatggtataccacgccaccaaccgggattcgctgctgtatccgaagtacgtcatgggttccgtgttcatcagccaggacggaacattccgcatctgcgtcatggcagggacttgggaccacgttgggtccgaagttcggcatcatgcgcgggacatccaatccctcggcgccggtcgccgtaagttgcaccgggtcatgcgacgtctgcgtcgcaatctgcgacaggtaggagtcaaagtatgagaatgcccaccgaggaagaacgcatgatccgctgcttgctggcggatatccacgaacccctggacctgctgttccccggcctccgcaccaaggcccatatggacccgcaagcggaagagctgtcgattcgaattgactacgaccatgcgaagctgggccgtatgggattctgccacgcggtctccctgtaccaactgaccatatggggacgtgaaggaatggtccgctacctgatgcaggagattccccgccgtgtgctggaaggtctactggtcaaggcgcagcagtacagtcaaagcaactggtacagcaaatgacgactatccgaatcctcgacctcgaaaccgagagctacgagcacaaggggcgcaaggcgtcgccctttgacccccgcaactacatcgtcatggccggctggcgggacgatgttgacggcaaggtcggccagaaggtggaacatcgcttccgcagccgggccgaagccgaagacccgaacaaccgctggttcaacctcgacggcgtggacgtgatcgtagctcacaatgccatgttcgaatcgaactggttcttcacccgctaccgggacgagtacctggccttcttgcgacgcggtggccgggtctggtgtacccagcaagccgagtatctgctgagtcatcagacgtggctgtacccggcactcgacgagctggctccgaagtacggcggcacccacaaggtggacggcatcaagatgctgtgggaccagggtgtgctcacctcggagatggaccaggacctgctgagcgagtacctgtccggcccgtgcggcgacatcgagaataccgccctcgtgttctacggccagctgatgaagcttcaggcccgtggcatgtgggctggctacctggagcgctgcgaggccctgatcggtttctcggcgatggagtgtgccggcctgaaggtggacctcgaagtcgccaaggtgaaccacgccaagcaactggaagaggtggccgggatcgaggccgagctgaagaagctgatgcccgacttcccggaatacttcgagttcaagtataccagcctctaccatatgagcgcatggctctacggtggcgaggtgcggtacaagggccgggtgccatacgaagatggccggatggagaaagccgacttcgtgcgcttcggtacggccaagcgggggactccaatcgagagtacctcagttcgggtcccgatccatgaagtgaccgaccagggtgagtggcactggcccaccatcaccgagctggcgaccaagcacggcccggtcatcacgttctccgctggcaagaacaagggcagcgtcaaggtgttccgggaggatacggacatcccggcgaccaagtgggatgatgaccagcgattccggttccccggcctgatcaacctgaccaaccttccggaagtagtgcgtgagaaattcctgggcaaacgcccggagttccagtgcgccctcaccctggcggatgggtcgcccgtgttcagcaccagcggcgacgccctcaaggctctggagaaacagggcttcgaggcggccaagctgttgatgcgcctggccgagctgcacaaggacaactcctcgttctacatcacccacacctacaacaaggatgggacgattaaggacacgaaggggatgctccagtacgtggacgacgacggcatcatccaccattcgctgaatacgacggcgacggcgacaacgcgtctgtcgtccagccgcccgaacctccagcagctcccgtcgaaggacgaggacgacccggaagccggcagccgcgtgaaggagatgttcgtgtctcgcttcggcgcggacgggatgatcggcgagaccgactataccgccctggaggtggtgatgttggcggccctgtcgaaggatcggaacctcctggcgaaactgatggccggcactgacatgcacttgtaccgcctggcagggaagcacaacaactggaacgggttcgactacgaccagctcgtggccatcaagaaggaccccaaccacccgtggcacggtcgcatgatgcaggctcgaaagaacatcaagcccaaggcattctcggcgcagtacggcgcgagtgcggctggtatcgcattcaacaccggctgtaccgtggaagaggcccaggaattcctggacaacgaggcggccctgttcccagagtccatcgcattccggcagatcgtccgcgacagtgcagaggccaccagcctcgtaatgtacaaggccgaggaccagatgccggcaggcgccttcagcgagatggggccggatggcaactggcgccagtaccgccggggattctggcaagcgcctggtggcacctgctacagcttccgccaacaggagcgctgggacaaggaacagcgcaagacggtcatggacttcaaggacacgcagatcgccaactactggaaccagggcgaggctgggttcatgatgaccgtgagcgtagggcgcatcttccgttggatgctgcatcgcccaggatttatggtcaccgagttcctgatcaacaacgtacacgatgccgtgtacaccgactgccacaaggacaccgccgccgaggtcaaccgtggcgtgcgcgacatcatggccgacgctgcccgctacatgagcgagcgattgggctacgacatcgcggacgttcccttcccggcggtggccgagatgggacccaacatgttcaacatggacgtgatccgggactaggccgaccctagcctactccggccttaaatcttcattcgacacgagagagaccacgcatgactcaacaactcaacgctctgcaagccgccctcgccctggccaacaaggctgccgagaccgcaaccatcgacatgtccgaaacctccaccggcggtggcggcggtcgcatcttcccggcgggcaccgccatgggccgcttctgcatctacatcgagctgggtgaccacgccaaggaattccagggcaagctcaagaatccggcgcctcaaatccgcctgggcttcgcattgtggggcgacgtgaacccgcaggccggtaacccgcagagccgcccggacgacctgttccacacctacgaggccgacggctcgatcaagcccggcctgttccgtaccttcgagatgaccctcggcaacaacgaaaagtccaagaccaagctggccttcgacaagatgaactggagcgggcagcatacccacttcgctcagatgctcggccaggcgttcatcatcccgatcaagcgcaccaagatcaccaagggcaacaacgccggtaaggaacgcaacgacatcgattggggcggcatcatgaagccctataacccggtcgatggcagcccgtataacgtgccggaactgccgatggacctgttgcagtatttcttcttcgacgcgccgaccaaggagacctgggacgccctgttcatcgaaggcacctcggacaacggcaagtccaagaacttcctgcaagagaccattcgctcggccaccaacttccccggctcggccctgcacatcatgttgggcggcggcgatgatctgatcatcaagccgacgacccaggccgcaggcagcaacctgccggcagtgcccaacgtggccgccgacgccggcgtagcggcagcaccggctgtcccggctgttccccaggcagtggctcagacggcccccagcgtgccccaggtggcgaatgtggccgcccctgtggtaggtactgccgaggcacagaacgtgctgcctgacgtgccccaggtggctcagacggcggctccggcagcggtcgaagtcccggcggtcccggtagtgccggcagtaccgcaggtctaatgcgcctgccatcggaagagttcctggcaggactatccgcgcagttcgaccgcagcatggcaggcgggacgttggtgtgtgacgccgacggacccgcctatgtggctgcggccactgctaagaccctggacactgcactccgaagattctggaagctcattttggagcagcagttcctagcgcactgcacagggacacgggttcacctcacggcagcaggtggggcgaaggcgtaccgcgacacgtatccgaccatgaaaccgtaccagggccagcgcaagggcaaggcaaagcccgcgctgctggagccactgcggcgggccgtggcggacgtgcatgagcgaggcggggcgccggaggggatcgatgtcatcctgcacacgttcttcgaggcggacgacggcatgatgatggacgcctacgccatgcaggacaaggccatcatccggtccgacgacaaagacctgcggatgacgatctacccgtattgggagatcgatacggcgtgtgtgagcaggatcgagggcggattcggctacctcaaggaagcgtacacgccttccggccagttcaagctcaagggccatggacggaagttcttcttggcgcagtggctcggcggcgacaccgctgacaacatccgagggatcgatcgattcaacggtaagctctgcggtatgaagacggccttcgacatcctccatccgatcacggatgaggacgaggccatcgacatgatcctggaggcgtacgccaagatcaagcaaaacccgctggcagaggccgaggtgctgtggatgcgccgaacgcctaccgacaacgcagcgcagtatctgttaagccgcgaccttcgtccggccttccgccagtggatcatcgagctggacgcctaccacgaggcgctgctccagaagcggagggagagcgattatgacgagtgagccgaaggtctaccagataccgcgcagtcaacagcgcaccttcaccctgaagctatgggccgagcagaacaagctgtgcccgctctgcggcaagcccatcgatatcagcgtgaagggcgaagcggtgatggaccacgaccacgaaacggggctggtgcggggcgtcctgcaccggtcctgtaacaccgcagaaggcaagataacgaatgcggcaggttcctggggatgcaagtcgatgaagtattccgacatcatcccctaccttcgtgccctcctgacgtatctggaggggccgaagcatccgctgatctaccccctgcacaagaccgacgaggagaaacacgaagcgaagctggccaagcgccggcaggcagccgccaaacgcaaggcggcgatggccgtcgcaaagcacaacgcgaggaacgtatgagcaaactccgcaagcaattcaccaatgagtacctgcgaaacgtctatgtcgagctgggcctcaagaagggtgccgagcacctgaccgagcattcgcgcttcggcgaggtgagccgccagtgcttccgcaactggtgcatcaagctgggcttccacgacagcaggacgcgcggcatgtacgccaagaagggcgcgatgcactggctgggccgcaaggctgccgaggtagtgcgcaagttccctggcgccgtgggcaacgtggtaggccagggtccgaaggtgctgagcctggacatcgagacctcgcctatcgagggctgggtctggtcgctctggaagcagaacgtgggcctcaaccagatcaagcgggactggaccatcctgtcgttctgtgcgaagtggatgcacagcgacgaggtgatctacatggactgccagggtgaccccctggacgacatgcacctgctggtcgccctgcataagctgctggacgaggccgacatcatcatcgtccagaacggcaagcgcttcgacgtgcccaagatcaacgcccggttcttcctgaacaagatgccgccgccgagaccgttcaaggtgatcgacaccttgatcatcgccaagcagcaattcgcgttcaccagccgcaagctggagtacatgacccacaaggcatgcaccatcaagaagcgcctccacggcaagttccccggattcgacctgtgggcagcctgcctccaggacaacccggaagcctgggaggagatgcgcctgtacaacatcgacgacgtacgatcgatggaggagctgtacaccctgatgcgcccgtggttcgtcggccatcccaacgtggccgtgtacttcaatgacgccgagccgaccatccgctgcccgaagtgcggcgacacggatgtcaagcaagagggctgggtgcatacgcagaccggcaagtacgagcactatcactgcggcggctgtggtggctggagccgggggcggtacacccgcaacacctcggaacagcgcaaagccctgctgagcaactaaggaggtagcatgagcctagcattcccggactcttacgagtcgacgatcacgactgaaccgtaccgcaaaggtgcgagtctggaagaacgcaaggtcggtaagcttcccatgcacctggtagtcgaggggttcccgctgctgaagcgggagcttgctcgaatgatgcaatgggctgccgaggtcaaggggtatctgccgcacgactggaagaagatgacggtgggcgagttcaagtccgcccaacaccggcacgagtccaagcggctgatcgacggaccgctggatgacgagtccaacctgatgcacctggtgcatgaggcattcaacgcaatggccgccgccgagcgggccctgatggaccgggagaaaggtaatgagtaaaatctgttggtgtacccgacagcacgagaccgatgaaggtgttcgggtcatctgggccttcaacgagcggggcatcggggtcaactacgtcacagcgtacatcacgccggcgatggtcagccatcaggactggagcgatgtcatactcccggacattctccgggagatggcggagcgcctggagcgggaagtgaagctggtggaactgcgctggttccgcgctgagattctgagctgcggggaatggcgtgactaccgagcgatgacgctggatggggcggttagcctggccgaggccgagtggggtcccgaggatatcgggcgcgtaatcgaaagacgataggagacggaatggacctgatacagcagcagatcgcccacgaagaggccctggtcggggcggcgcagaatgacgcccgcattgccttggaaaaggcgattgcccaagggtccatcgaccgcatcccgagggcgcgcatcatgttgatgcggatgctccccatcgtgaccgaagcgatcttcgcccaccaggaagcgaaggcggcggggccggcagcaaagctgcggcacctgctgcggatcatcgacgcccaggacctcgcagtcatggcactgcgggccgggctgtcgatgctcatcaactatccaacgatcacagcgacgaagtattacacccacatgggtaagatgctctgtcgcgagatcgaagtgcggttggccttcaaggtcaaccaaccctattacgaccggacgctggactacctcaagaccagcaggactcgcagcgtccggcacatccagaagacgatggacgctcttctggacgcggtactgccggaagaggcacgtatcgacctgccggatggcgactacctgcgcctcggcaagttcattggtgatccgctgatacagtgcggcctgttcgagccgaaccgcttcacaggtcggggcggtacgagcgtccacctggagccgtcgccggaagccaaggagttcctgcaagacccttcggcggcgatgacctggggaggcccaggccgtagcgtgatgctggcaccgccgcgaccgtggaacgactggtgcgatggcggttactacagcgctaaggcgcagaagcaccatgtgctagtgcgccgtaccaagcaccagaccaagcgggcgcgccagatgcagctacgccacctgggccgggacaagatgcccaaggtgtacgaggcggtcaacgcgctgcaatcggtggcctacgagatcaaccacgacgtgtacgagatcatcgagcgcgtcttcacctccggtggcggcgtgctgggcatcccccagcgcacctacccggacaaacctgagttcccgctcggcgacgagtgggccaaggagaatgccagtgagcaagagctggaggccttcaaccgttggaaacgctccgtccaccggtggtacaccggggagcgagagcataccgccaagcttcgcgaatttgctgcactctaccgagttgttcgagagcatcatggcaaggcagtgtacttcccgatgcacgttgactcccgtggccgcatgtactattggggcacaccgaatccccaggggtccgacatcgccaaggcgtgtctgcgattccacgaaaagcgtgccctcggtaagcgcggcctgtactggctcaaagtccacgtcgccaactccctcggatgtgacaaggtgtacttcgacgaccgggcagcctgggtcgatgagcgatgggacgacttccagcgagcactcaacgaaggtccggagaactatccgagtctcttcccggaagacgagtcgcccctgtgcgccatcgcaggtctgctggagctgcgggcggcctacgcatcaggccagccggaggcttaccgaagtgggttcatcgtccacatggatgcaacctgctccggcctccagcactactcagccattctccgagacgagatcggcggagcctacgtcaacctgctgccacctggacttgccaaagctgacatctactcccgagttctcggtctcgttgcagagtctctggcacgagacagagaaagtgctgaaggcgaggctcggggctacgctgtattgtgggataaggctggtctatcccgaagcctgacgaagaagccctgcatgacgctggtatacggcaccacgttcaagggcgtggtagaccactgcctggactacctggacgagtccggcctggagattcccgagggtatcccgtcataccgcctgggaagctacatggcaacgctcatactggacgcaatacgcgagacagtaccatcggcagtcttcgccatggaatggctccagcggctcgctaaggcccttcctgatgcatccaaggatttgcactggatcacgccactcggcatgcaggtgttccagtcgtacccgaagaccgaggaggtgcgggtgaggctgcgggcagaggctgtcgagtacgtcaccctgtacgaggccaaggacgagctggacccggtacgcaacgccaacggcatcgctccgaacttcgtccacgggctggacagcagccacctgggcctgacggccctggcctgtgcggcagagggtatcccgatccaggccatccacgacagcatgggcacctatgcggcagacgtggatcggatgcacgtccacatcagggagcagttcatcgccatgtacagcggcccctgtgtgctcgtagaactggcaaaacagctcgggatagaggctaccccgccccggagaggatcgttgaatctggaggctgtacgggactcctgggcgttcttctgctgaggggattatgtcacccacataggagcaagtgcatccgtccaaggccctcgtagaggggagcagggagaaagaggtcagggaagaccagagggtagaagaagagtagaggtagagtagaagatgagactagatgactacgaaggattctagatagaatagactaaccagcataggagatatgatagatggctactatgaagacccaccgacctatggttatgtcacccacagtggaaggatcgagaacaggcaagggtacggcccgtcctgtcacgttcacctctcagcagatcgagtggttagagcagaccttccccgaacatcagatcggtcctggaaccacgatggaagacatccagttccaggccggtaggcgagacgtggtgcgagcagtacgcctgcgccgacgcgatgccatcgcagtggagttgaagtgatgaacaagtccatctggcgagtccacgcaaaggccggcactccctcggaactccaggggctgtgctggctggcaatacaggagttggaagaattcaccctcttccgctcgaaagacgacgccctgaatgcgatgctggacagtatcgagggcaacgatcgaaccgagctgttggtattccgcgatggccagttggccggcggtgcctgcattgtgttcgaggacgatccccacgtcggcccgtgcgtcacagcacagtggcagtacgtcctaccgcgctaccgcaatacaggcgtggtccgggagttcatccgcgaactccaccgtcaggccggctggggtcaaatccccctcgtgtgctggagccatcgtgaaagcgatagccggtacacgatccactaccggagagccaagccttatgggcaagaaagtaaagaaggtgctgggcaagaccatcatcggcaaactcgctgatggcctgctgggcaccgacctgagcggcgcacaatccgatgcccgcaagatggaagagcagaaccgcctaatgcaacagcaggcggaccagctcgcacgaaaccagcaggttgacctcaccgccgagaacgtggcgcaggttgacctaggagcgatggccgatgccactggcaccggcacgcgacggcgccggaatcaggcgggcacaggcgtatcgcaaaccctcggtatcaactactgacgaggtacgccatgaaaaccaccgcagctatgctgtgggagaaacttcgggatgggagcgtggagagtcgagccatcgagttcgccaagaccacgcttccctacctgatggtcgatcccatgtccggcagccggggagtcgtagagcatgacttccagtccgccggtgccctcctggtgaacaacctcgccgccaagctggcgagatcgctgttccccacggggattccgttcttccgatccgaactcactgatgcgatccgccgcgaggccgacagccgggacacagacattaccgaagtgaccgctgccttggctcgggtggatcgcaaagcaacacagcgcctgttccagaacgcctccctggcggtcctgacgcaggtgatcaagctactgatcgtgactggcaatgctctgctgtaccgagacagcgccgccgctacggtggtcgcatggtcgctccgctcctatgcggtgcgccgggatgcgactggccgctggatggatatcgtcctaaagcagcgctacaagtccaaggacctggatgaagagtacaagcaggacctgatgcgcgcaggacgcaacctgtccggttcaggtagcgtggacctgtacacccacgtacagcgcaagaggggcacggcgatggaatacgccgagctgtaccacgagatcgacggcgtgcgtgtgggcaaggagggccgctggcctatccacctgtgcccgtacatcgtgccgacctggaacctcgcccctggcgagcactacggtcgcggccacgtcgaggactacatcggcgacttcgccaagctgtccctgctgagcgagaaactcggcctgtacgagctggagtcgctggaggtcctgaacctcgtggacgaggccaagggtgcggtagtcgatgactaccaagacgccgagatgggtgactacgtgccaggtggcgcggaagccgtccgtgcttacgagcgtggcgactacaacaagatggctgctatccagcagagcttgcaagccgtagtcgttcgcttgaaccaggcgttcatgtatggtgccaaccagcgcgacgccgagcgcgtcactgccgaggaagtacgcatcactgcggaagaggcagagaacacactgggcggtacttactcgctcctggccgagaaccttcagtcgcccctggcctacgtctgcctctccgaggtggatgatgcgctactccaaggcttgatcaccaagcagcacaaaccggctatcgagacgggcctcccggccctgtcccgctccgccgctgtgcagagcatgctcaacgcttcccaggtcatcgctggcctggccccgattgctcagctcgatccccgcatctcgctaccgaagatgatggacacgatttgggcagccttcagcgtagacacgtcgcagttctacaagagcgccgacgagctacaggccgaggcagagcagcagcgtcagcaggccgcgcaggcccaggccgcgcaagagaccttgctggaaggcgcttccgacatgaccaacgcactcgcaggagtctgatagatgtcccaaccgaacgaacagcaactgccgccgggcctcgctaacctggttgccaacgtaccgcccgccgccgcgccgacaccgagtcatgtgcaggtgatgccgaacccggtgatccagccgcaggctccggtccagcccggccaggtaggtgcgccgcagcaactggccatcccgactcagcagccgcaacccgttccgaccagcgccatgacgccgcactaccagccggtagcggcacctgccgtgggtcaacccgttgttccgcaagcacccgctcagccggccccggtagctccgccggctgcgggtgcagttcttcccgagaacctggaagtcccgccgccgccggccttcactcccaacggggagatcgtgggcaccttggcagggaacctcgaaggcgacccgcagttggcgccctccatcagctatctggaggcgttctctgacaaactggataccgtccgagccttcggcaaggccgccgagaaccgcgatcctcggttcatcgacgagcactatctgaaggaagttctcggcccggcccaggcgcagcacgtcatcaacgtggccaagggcgtcctgacctatgttgatgcgcagaccaaagccgtcctgagccagacctatgccgccgtcggcggtgaggccatcctgaagcaggctgccggcgtcttcaaccaacacgctgacccggccaccaaggccgccatcggtcggctgatggactcgggcgatgcccaggccatgcagtacgcagcgaagcaaattgtggccttcgcacaaggctcgggtgccgtggtacaggctaccggccaacccctgggtgctgcggcacctgcactggcagctctgagcgctgagcagtaccgcttggaagtatctaagctgccgctgaacgcatccgaagccgagatggctgcgctgcgcgagcgtcgtaaggcaggcatggcgcagggtatctaacgaccctgccctactccggccttaaacccacatccaaaagagagagcatcgtatgagctttttgaacgacctgacccgtccgaactacgctggcaagaacgcggacgttgacatccacctggaagagcacctcggcatcgtcgataagcacttcgcctacacctccaagttcgcaccgctgatgaacatccgcgacctgcgtggctcgaacgtggtccgcctggatcgcctgggtaacgtcgaggccaagggccgccgcgccggtgaagagctggagcgcagccgagtcgtgaacgacaagtggaacctgaccgtcgacaccctgctgtacctccgccaccagttcgaccaccaggacgagtggacccaatccttcgacatgcgcaaggaagtcgccgagctggacggccaggaactggctcgcaagttcgaccaagcctgcctgatccaggtgatcaaggctgccgcgatggacgcgccggtggacctggaagatgcgttctcgccgggcgtgctggagaaactggacctgaccggcctgaccgccaagcaggctgccgacaagatcgtccgcatgcaccgccgcgtagtcgagaccttcatcgaccgcgacctgggcgatgcggtctactccgagggcctgaccccgatgtcgccgcgtgtgttcagcctgctgctggagcacgacaagctgatgaacgtcgagtaccaggcaaccggcgcgaccaacgactacgtgaagtcccgcgtggccatcctcaacggcgtcaaggtgctggagactccgcgcttcgccaccaaggcaatcgcagcccacccgctgggccgtcacttcaacgtgagcgccgaggagtccgagcgccagatcgccctgttcctcccgagcaagaccctgatcaccgcccaagtggcgccggtccaggccaagctgtgggaagacaacgagaaattctcgtgggtcctggataccttccagatgtacaacatcggtgcccgtcgtccggacaccgctggtgccatcgaactgaagggtatcggcgccttcgacatcaccgcgtgatgccacgaaaccccgcacttcggtgtggggtttcttcaaagcctaacgacccgcgcagattccctgcgtgggtttttgcgctttaggagaaaccctatgctactactcgacgcagtgaatgtcatcctgcgcaagatcggcgagctgccgatcccgagcatggatgagacgtatccaaccatggccatcgccctcccggagctggaagatcaacgcatccagttgctgacccaaggctggtggttcaacacctggtggaagcacaagctgacacctgatcccacgggccgcatcaacctgcccaagggcaccttggcattctacccggattccccggacctccagtgggacggcctgggagtgcgagatgccaacaccggcgacgaccgcatcggtaagtcggtcgagggccgattggtgctgtctcgggagtgggaccgtatcccggagatcgcacagcgcgtcattgcgcaccaggctgcgctcgcggtatacacccacgagattggaccggacgagaccgcccaggtcatcgcccaggaattgcaggcgtatcagaacgaactgtcccgcatgcacacccgatcacgtccgctgaacacccaggccaagcgtagcttcagccggtggcggcgcagcttgaggacctgagcatgagctacaagcaatccgcgtatcccaatctgctgatgggtgtgagccagcaggtgcccttcgagcgcctgccgggccagctcagcgagcagatcaacatggtatccgatcccgtgtcaggacttcggcggcgcagcggtatcgagctgatggcccacctgcataccgaccagccctggccgaggccgttcctctaccacacgaacctcggtggccgcagcattgcgatgctggtggcgcagcaccgtggtgagctgtacctgttcgacgagcgggacggtcgcctgctgatgggtcagcccctggtgcatgactacctcaaggccaacgattacaggcagctacgggccgccacggtggccgatgacctgttcatcgccaacctgagcgtgaagcccgaggccgaccgcaccgacatcaagggcgtagaccccaacaaggccggctggctgtacgtcaaggcaggccagtattcgaaggcattctccctgaccatcaaggtcaaggacaacgccacgggcaccacctacagtcacacggccacctacgtgacaccggacaacgccagcacgaaccccaacctcgctgaggcaccgttccaaacgagcgtgggctacatcgcttggcaactctacggcaagttcttcggcgccccggagtacgccctgcccaactccacgaagaagtacccgaaggttgaccctgacccggctgcggctacggtagccggctatctcaaccagcggggcgtgcaggacggctacatcgccttccggggcgacggcgacatcgtggtcgaggtgtccacggatatgggcaacaactacggcatcgcgtcaggtggtatgagcctcaatgctacggcggacctgccggccttgctgccgggagttggcgcccctggtgtgggggtgcagttcatggacggcgctgtcatggccaccggctccaccaaggccccggtatacttcgagtgggattccgctaaccgccgctgggcagagcgggccgcctacggcaccgattgggtcctgaagaagatgccactggccctgcgctgggatgaggctaccgacacctacagcttgaacgagttggagtatgatcgacgtggctccggcgacgaggatacgaaccccacgttcaacttcgtcacccgaggcatcaccggcatgacgaccttccagggtcgcctcgttctcctgtcgcaggagtacgtctgcatgtcggccagtaacaatccgcaccgctggttcaagaagtcggcagccgcgctgaacgacgatgatcctatcgagatcgcggcccaggggagcctgactgaaccgtacgagcacgcggtcaccttcaacaaggacttgatcgtcttcgccaagaagtaccaggccgtggtccccggtggcggcattgtaactccccgtacggcggttatcagcatcaccacgcagtacgacctcgataccagggcggcacctgccgtgactggccgcagtgtgtacttcgctgcggagcgtgccctgggtttcatgggcctgcatgagatggccccgtcgccgtccacggacagccactacgtcgccgaggacgttaccagccacatcccgagctacatgccggggccggctgagtacatccaggcggcggcctccagcggctacctggtgttcggcaccagcacggcggacgagatgatctgccaccagtacctctggcagggcaacgagaaagtccagaacgccttccaccgatggacgctgcggcatcagatcatcggcgcgtacttcaccggcgacaacctgatggtcctgatccagaagggccaggagatcgccctgggccggatgcacctgaacagcctgccagcccgcgagggtctgcaatatccgaagtacgattactggcggcgtatcgaggcgaccgtcgatggtgagctggagctgaccaagcagcattgggacctgatcaaggatgcctctgccgtataccagctccagcccgtggccggtgcctacatggaacgtacccacctcggcgtgaagcgcgagacgaatacgaaggtgttcctcgacgtgcccgaggccgtagtcggtgccgtgtacgtggtcggctgtgagttctggtccaaggtggagttcactccgccggtgctacgggaccacaacgggctgcccatgaccgcgacccgcgcagtgctccaccggtacagcgtgaacttcggatggactggcgagttcctgtggcgcatcagcgacacggctcgacccaaccagccgtggtacgacacgacgccccttcggttgttcagccggcaactcaatgccggggagcctctggtggatagcgctgtggtgccgctgccggcacgggtcgatatggccacgtccaagttcgagctgagctgccatagtccgtacgacatgaacgtccgggctgtcgagtacaacttcaagtccaaccaaatctaccggagggtgtgatggctttctggctaccactattggccgctggcggcatgtcagcccttcagcagggtatggccaacaaggaagagcgcaagaagatcaaggctgagaacaaggctcgactgaaggcggacctcgacaacctgggcgccgctgcccgcgacatcgccaacctgggcgtcatggccgctagctaccgcaagcaggccgtggcctcgcaggtggaggccaagcgccaggggatgctcgccggcggcagtgccgaggctcaggccggcgcgttcggcgtcaagggtgcatccgtggatgcggtggccctggacatcgagcgcgaggtcggggaggccctgatccagattgacgacaacctggacaaccagatgtggaacctcgccgagcaggcgcactccatccaggctcaggcgaaggccggcctgctggggcagaagagtaccacggcggggcaacggtccccgctggtggccggcctgatgtcggcgggttccctgtacgcaagtcaatacttcaagttcggcgccacgcctaaaggaggcaactgatggcggaatcgcaacgtgcttcccaagagcttgggatcaacgtcggacagacgcaactccagccgggccagagtgctcggcgcggagtgcgcgactccgagatcaactacagcggcccgagcgtaggctcgcagattctcgacggcatcctgggtgccggtcagcagatcgctggcaaatggttcgagcacaacgtgcagcaggaagttctgcgcggtgagcgtgcccgtatggccggcgaggctgaggaggcagtagacagcaacgtactggccaaaccattcgtgaagggcggctggcgcaagcaggactaccgcatcgctcaggccgacttcagcctcaagatgcagcgattcatcgccaacaagggccgggagatgactccc

SEQ ID NO: 4 - DNA, 42717 bp, unidentified
  source 1..42717: mol_type = genomic DNA
actcgaccagcgcattgcggcggctgcccttcggcatggcttcatacagcgccttgactacggtcacgtcgccgcactggtcgatgtggtggatgatcgacaggccggtcagttggatggcttcgtccagttccttgccacggacacggatggcgtcgatagcgcggttgatctcttcggtgccacggaatgcgattacggttttggagattgcgttggtcatggtatgtacctcagatggatttgttcaggtaagcagcggcggccaggtagccagcactgcggggagtggtcagggtatcgacgcggggctgcttagcttgcgcctgctcagccttgcggaagatcgggcagtcggcgcctttcggcatcctgtgcgctagatcaatccggcgtgccttgtcgcggcgagccttggcggccttgcgttgacgcggcgtcagttcattcacacgtggcattacaaacccttcccttgcgacttcttagcgttccacccctttaggatgttccgcgccttgccttcgctacccttcacgaaagccttctgttcagggttgtggtagcgtcctggcgctggctccgggtcggtagcgtagcgcacgtcacgcatcttgcgaagctctttgcgcccttcgacgttatcctgtgcgatgagcttagtacgtttggcttcccagtcccgccagtacgctacctgagcagcaaagggtgacttgggagccttagccttgaagtgtgccatcggcaatcctcactaggtctgtctcttgaatcccctcggtggaagggcctcaagggacaaaccttggcattggcatagtccctgtagtatcagcggttctggcttgtcctgcgcatactcttcgggatcgtcttcactcatcccccgtaccctttgcgctatctgcctggccttgttcaatcggcccgccgatactacccagcatactgtcagtcgcgattaaccgggtattctagtcccgatcccactgacactctattcgttcccaccggacctaccataggccctttgcttaaccgtggacggggaggcttcccgctcagactcttttgggtgagtcttcagcacccgacaggtattccctggaaccctgcctaaccagttgcagcttcggtcaacctaccgcaccagtccatgtaccgctggtgaagcttcgaacctctaccgccagatggctcagccatcctttcgtcttgccgcgcatgttagagacttgcgcttgtcttgtcaatcctctgtcggggattagttcgtccagttctccggcataggcccttttgctgaggggccatcaggtggtgcgaactgtaccgcgtgtcctgcaccgtgtcaatccctgcgatgatgcctgccggccttacacatcgttggtcatgccctaagagtttgccgtgtcccttgcgcctatggcttgtgccgcgcttggaaggttgcaatctcccgtcgttctggctgcgcatcctaccgatgtcctggcagggtgtcaacccctgtctccaggctgcctgtagaggcgttgttgcgtgaagacagggcgaactctacagacctgccgcccacgtgtcaatacccgcgccagggcgctccctggagccttcccacgcgtatagagacccacgcgtgcgaggcttagtctggctagccaggattatcgttcccaggtaacgcaaatccaccacccagggagcagccacccagccagggccaccaccctgaaacccgcgtggcactaaggctgcggttatgtcacacacaatggacaaataggcgtccatcagcgccagcggcgcgaccgaggcaggccgagggagtggcgagggtaagacagcaggaccagcggtagcgccagggagacagacccagggagcaggactagacaagccaggtagaggcgagtagagtacgcggcctagagggaacaacccaggtaggaccagggaagctccagggcagaggcagccaggcagagggcaagggcacagcccaagcacaagaggcaaggccagccactcccgcaaccaccaccagaccagagggcagaggccccaggaggaacgagatgctgagcagacaggacagagccgagcgagcctggcaccagcacgacgcagcatggcagcggaagctagccaggtgggcagcagaggatgagcagcacagcccgtacccagcggccagggccagggccaaggatgaccggaggctagcgctggtggcgcaccgcagggcgctgagtatgagccgatggaccgccaccccgccaggggcttgacactcccggcaggatgcgtagaatgggcggcgaagggcagggaagcccaccgccacccggcgaagccggaagctcccagggatgacccaggcaccacccaggcaatgcgaggggatggcccaccagacggagggcctacgggggaagggtgggctgatcagagtcgggagggttctcacacgacgatatcaaaattggacccggagtaactactcccagcccaggccagccaatccagccagccttccagccgacctcaataaaattccagtagttccagtggagcacccgactatgcaggtgctcggcttgagctactcgatcacttgtagaccagggccttggcggtctcgacagcagccatcagctcgtcgagatgcgcgaccagttcagcgcgcagcttggtctcgttgtagccagaacccagggccgcttcttccagcggacggatcaggttctcgatggtgccggcgaaggcgcggaggtctttctgagttgcagcggcgaaggttgccatggttcagttccttgtgttatggatggagtcaggttggacggggctgtagctcagcccgccggtgcggtgtatacgaccttggtgatagcaccgttggctacggtcaccttcacggaaccaccgccgtccacgggcagggtgtcaccgttcttcaccttgtaggcggtgagcgggtccggtggagtagcgccaccctcgccgcccagggcggtggctgctgcgatcacagcggtggccttggccttgacatcggcctcgtccatgtcgtgcagggcgatgcggttgtcggtgccgggctggcatacctggtagaaggtcaggccggtgttacggccagcgaggtattggtcacgggtgttcgccatggtcagtctccttgattcagggcgttgcataggtccagggcgtcctgataggccgctacagcgcggatcaggccagcctgggtggtagggtcaatcagtgggtgttcgcacagcacagcgggcgccggggcggttgcacaggctgtcaacgacagcagcaggcacaggccggtcagcccacgggcggttctggtccagggcacggtccacctcctggcgctgggtgttggtcttggcggcaacctcctggacgtggcgctgtaaggtggcatagcgcacctccagggcctccgcacgggccgactgccgcttgatctcctcctgggcgatacccaaggcccggtagctctgaacgaagccgtatgaggctcccagggctaccacagcaaggacgagtattgcgacgatggttcgaggcattgcttgatctccgcgttgcggcgattcacgaggcccttggatacgaccttctggccgtcgatcgtgaccttgttccacatggccagggcttggcagccctcagtggcgcggccttggttgaagcgcttgaacgctgtgctggttgtacagactggacccacgttgtagcagaagaacgtcagggcggtttgctcgttgacgttcagcggcaccttgatggcgtccaggacgatgcgctcgaagcgctggtagtccttgagcgtcatctggtagcactgctccggtgtggctttgtcacccatcttgaccccggcagtggtgccagagcagatggtgggtacgccggcgatgtctcggtaggcagtggtctcgctaccttccagggcgacaaggccggcgagggcagccgcaagggctgcgccgcgcaggggcttgttcacttcttgaacctccggcgaagctccgcgatgctatcgagcatcttcgggagcagggtgatgagctgggcgcccacgtagagcgcggtgagtaccgcagcacagaggctggcgatctcatagggcgagtaaacggcgatccccacgccggtgacggcgagggtgcctttgcccgcctcggtggcggtatcgagcatcatagtcttcgtccttttgggcggcccttgcgacgctcccggcccatgccgagagaccgaaggacagacttagtgtaacccatcgggttgttcagccattccttcttggcagcctcttcacgagcgcgggttgcggcttcgtcgtcctttacgagcgtgggtgctagctcgcggacaaggccctcaagggcatcgatccggtcgtccttcggcagtgagcctcggtcggtggtgatgttgtgaatctggtggaacacggagcgctcattgcgcttgtccgctgggtactgctgacaggccacatggtcggaatccatcgccgatacgtggaagatcagacggtgccgctgcatgatgggccgcagggtgtcgatgatgcgacgctctttctgtccggacttctggcggtcttctacgccgatcccctcatagcggggcttgttggtgtccgggtcgatggatcgcatgtggttgcggaagagctggccaactgcaccagcgccgaggtttttctcgacatagatcaccttgacgccataacgcgcagccagggcaatacatttctccaggttctcctcggcaaagccacccttccagccgccgatgctcacgacgtggatgtacgggccaagagtcccgcccacggcatacgacagctcgtcgccaccgtcgccggcagggtccacgaacatcgtcatttgctggagtggtgcccagccgccagccatcagcgccggcaggtacagctcaggtttgatgaccgggaatcggtgggcgtcgaacttgagcttgaagcgctcatcggcagcccaggccacttgctctggcacgctctcatgcgtggcgtcgatgaacagcaggtcgcgcagcttgagctgcatacgctgctcgtcggcgaggctggtgtccagcatgtactgaagctggaagccctcggggccttggtcaagctccttgtcgagcaggtcctcttcgttgtagcgctgcggatcggcagcccagccacgggtcccatccaggcccttgccggtgcgcgggttgtggcctttctcctccaggcgggcaatgcgcgccaggatggaaggtgcgagccagtcaccgtagcgttcctgctcatccagggtcgggaagcggcccggccagatgcgcatcaggaagccccgcgccggcaggccgttgtagatcgactcacgggactgcggcgtgcccaggtagagaatcttaccgtgggtacagatagaggtgaactcctgcgactgtcgcgtcagcttggcccgctcggtggcggtgaggccgttcttcgtggtctcgatgtcgtcagggatcaggatgtcagcccggtagccctggagggcagcggtgatcccgatgcagttgatggaggccgatttctcgacgcccttcaatgcccagttcacgtcgaagctggtggccgaggtacggtcacccatgcgggcctcggggcgcaggtacgccagaaggtcccagtgcatgatcagcttcgtgatcaactggccgttctcctcggccttgtcaccggagccggataccagcatggcgcgggtagccgggttctgagtgatgcaccagaccacgtagatacaggcgatggtggacttggcctcgccacgctgtgcagcgaccatcgccttgttgggcgagtcctgcatgaagtcggcgatgtcgagctgcatccacgtcatcttgaagccgaggaacagcatggcgtccaggcagaagtcccggaagcgcgggtacatgtcccgcacctcgtgggctatctggaatcgttcttgcggcgtcatgctgcctcctagtgggtgtacagtcgttccatctcatcgtcggtctcaccggcgatgaagccctccagggcgatacggcggttctccgcctgcgcctgccgcatttcctcacggagccggtcgatgttgatggtgtcggacggatcgcaggtgatctcgttgtccttgaggaacttggtggcggcagcgatatccgatgcggggatcgggatgtcgttgtccatgtaccacttgaagttgcgttcgatggcggtgcagaccagctcgtgaagcaggcccagccgctcagcactcgcggtctgctttttgctcattacatgtgccctctgaattggacttggaagcgtaggttggttcccatgccgcacttgaccagaggccggaacaccttgccggtgtccacctccaggtgctcctgggtgtagttctcgttctgcgtgcgaacgtacatgttaccgcctcgggtgtagggtacgatgacctgtgcccacgcagttgcgccggggcgcttgtcgtcgagggctaccttggcatagtccacttggcccagctcaactacgatacgacggccctgctgcacgttgaagtacgatagggcgccggtcttgtctgcgcggacgaacacaaagacgtagttcatattgctgtcgaagtccaaggatatcgtcgagatacccgcgtcgatgccatcgccaatgcgcacttcgttggtgccgtcctcccagccgaggtaggtgccgtcattccgcagcatggtgcgccatacccggacgaatagcccctcggaggggtcctggatggcgacccctccgtcgcagaagtcgagcacgtcgctgatgtcacgacgtgccctggcacctacaaacttcgacttggccttgggatcgaggtcttcgttgaagtcgtagatcagtgccatgggttatgccctcgccaccgagaactccattgtaatggagaactcctgagtgttgttcttgactacgggagggtcgatggtgagtgcgtagttccgcccattgtaaatctttaggtccttacagccggtgataccccccggcatgttgccgttatctacggtggcccgtagcataagctgacccttgtaggtgccgcgagtatatcgcgggtacagcttcacccactgaccgtcttggacatcggcaccggacgcattcttgccgtcgatccgtggactctcgttgtagaagatgtagcgctcaccgtagaggttacgccggttcgcgaagggcagcggggtgaggcggatggtacgctcaaccccggagatcacgaacttggcctcggccatcgccacagccttgctgcgcagctcatactgtacgtcgagaatctcgtcagcctgaactaccagggtggtgggttggccggcggcgtctttgatccgggtgtaggatagtggagtacctgccggaatcttcgcgccggtgttattctcaaaccccaccgcggattgagctacgatgcccacggtggccagtacctgaccggccagggtgcctattgggaagcgccaccgcttgtgccagtaaatccactccccgtccaggcccgaggtcacgtcgccgttaggggcatacgaggtggtgcgccgaacttcttccggcagggagggcgcggcggggttagggtccgcagtgctggtactcacggccagggcctgggagaacaggtcagaggtatccatggcgcaaatccaatcaagacctgcgttagtgatgaggttgtcgaaggtgtgttgcgccaggacttcacccgtggctttcatatgggtcaccgtgtagcgacccttaactcgcgtctcaaacattggtcagttccgcctgtttaattgctgttgaggtggtgaaggcgtaaggctccacgatatactcagagtatacgaccacaaccttcaactccgcgcctaccactgcggtctgcgacgagaatgcgtaaggttctgcggtgtagtccttaaccgtatcgcgcagtaaaactgcatggatggcaggtcccgtcaggaacccatcgccaccgccgtagccgagctgagtcagcgaccgcagcagcacgcttaccacactggaggtcgcgtggtaggtgtcctctccgggctggttcaacacctcgtgcagggtgtcgcgtgttagcgctgccacgatgttcggcctacaagaccatgcgtcatccgtagccaggatgggatatgggtaggtcgccaagatgggcttgggccgccgaatttgagaggccatgatgcccgcgataatgccgcgcattattcgtcctccatggctccgaacacgatccagtggttaggcccgagacgcttgagggtacacacgccattctcgccgtagagctgcatggtggtgttctgcaaccggttgatggtcacgccggggccggccacgatgttgaggtcgcgcacacccgcctgttcgaagtgaacctcgctgaactcgatccagggtgcatccgggtcttccatctgcatggtcagggtcagcggcttatcagcggtgatgcagcggttccagtaaccacgccagctcgggtcgatgtccgagtcttccgtaacggtgcgaatctcggcgaagcccagggcgcggcgcagcgcttcgttagcggcgtcgagtgcctcctgtgcaaggcggcgggcctcctcggcgatacggatcgcgtcgagaacaccatccagtgcgaggttcgcggtgttgatgccctcctgcacggcgtacagaagctgcttgttgttcgcgtcgatgtagcgaggcaggaacgggatgccctggctgaactgcgtatccggcacttgggcgggggtgtcgcggaagatgcggacctcttggccctgcttaggcacttccgcaagctgaatgttggtgttgtccacccacgtatagtcggtggtgagtatcttgtcgacctggacgaatacgtcctcacgacgcaggaatgggaagtcgagactgaatacagtctcgaccccatctgcaacgtggatggtctcggggttcttgaaccgagccacgctattcccctttgatggattccaacagcaacttggttgccgggaacacgttgacgaaaggcagtgcgcccgccgcgccgttgacgatatcgccagtggctgctgccgggtcgtcgccggttacgaggtctcgaacgcctcggaacacttcgttggagtgttcagccagtccgaagaccggagcagacattcgggagtggccagtgaccacaccccacatatcggcggtgaagcccagaccggcagtgtagccgatgccgtcgatggccatcttgcggatgccttcatcagaggtgtcgaacttgccgttgatcgctgccttggcacccatcatcagcgcggtgagcggatactggaatgcgaggagcgaggccacgccaagcacgccggagttctcataggttccccggaggagcttgttgtgcgcgaaggccacaaagctgcggaactggcccaggatttggccgacaggtgaccgagcaaagcccgagttctgaccgaccctgccgtacagcagcgagtcgtccatgatccgcagtgcggtgttcatgacggtgttcacgtctgcttggctccaggcgccccaattcatcgattgggcgttccttcctctgtatgtgacataaccgcgaacccgcgccaacactggcgtccagtccacgtccttcccgtactgctggagcacgcgaagggctgcttcatccccctgagccgcccgcgccaccttgttcaaggtgaggttggcgttcatacgggattgccagttgtgaatgaacttcatgccgttgagcaccgggacagcctgcttacctgcgtgcaggaagcgatccatgaaggtatcttggctggccaggaaggtgtcgaactgccgcttccagggcttcatccggatatcgttggcgaggttcaggccgaggacggtctgcatctcgtcagcgaggtccgggtcgcgacgcatggcgcccacgaagtctcccaggcgggagttcagcatggccttcatgacgttgaagacgccttgacggtgcgccatcgtggccagctcggcgagctgatacacgcctgagaatcccagcatggtggcgctggtcaggccgctggcccgctgagcaaccgggccgagctgatgctccctcggcacgttgccggtgaagtccccgaagactccccgcagttgccccgtcagctcctgcaccttatcggtgcccaggtgtgctgcctctcgctggtactcccggatgaaggcttcgatctccgagtcccccggcatgcctgcgcgggccaatgctgagcggcccgacatactgccggcgtagttctccatcagccggtccaggtctcggtcgatcaggtcctgcacccgatacacggttccgttgtggttgatctctgcggtcatgtccagcgacagccggcccttgccgtacttgacggtgccctggtcggactgcttctgctcgatcttggccatgatgctgtcgaacttggcctgggacacgttggcctcctccagcgcctgccggatgaatgccgtgtccgccacgcccatcgcgcccatgaactcggagcggattccggtggcccgatcccgcgcccgctgcacaatggcctgtgcgatggtatcggcatcggcgcgctccagcccagggatgccacggaacacggcctcgctgatggcgcggcgggccaggccaggggcggcctcgtccatctgcgccatcttcgaccagttccatgaacggtggaagtaccccggtcggggagcgaagtcctcgaagccacgcacaccggcttccctggcgcgctggcccatcagaccgtgaatctcgtctgagcggtcggccagggccttgatggtcggcggcaggttcgggtccacacggacgctgccgtaggccgtccactcgcggtcccggcgcagcagctcgcgggtgacctgctcgttgagctggtcccggactgccatggcgcggcgggagttcagcgcacgtgccgtcaggcccacaccctgctcagccattgccttggccatcatctcgtcgtaggacttcacgtaaccctcgaactcgttccgatagcggcggagatagctcgctgcgttgtcgttcgtgctgaacccatcccgacgtaccgggtcgtcgataagacggctcaggagtcgccgtgcgccctccccaggctgtgccaggaggtctgcctcgctgaagaacctgttcacgaagccggcaccctcacgggcacgttcacgggtggtccgcacgatggtctccaggctggcctcctcggttaccggagcgcccttgttggcccacttggcctgcgccttagtgtagccgggcatggcctccataatcgtctcagaggcggccaggacgcggctcagggccgtgtcagcatcggaccgcagacccagtagggtgcggatgccctccacgaagcgggaccacaggcccggcccgccgtcactgtagcggaggcggttcagggtcctttggaagcgggtatccgtcaggccccaggctaccagttccttgacgttggccagggtgttggagttaccggctagcagcgtctcttcgaactcggacagttgccgaccggcggcgcggtcctgcttcagggcgttgagcacgttaccccggacgttctccagggtctgcatggcctgagccaccttcggactcatcgcgccaggattccgcaaggcggcgttcatcacgcccacggtggcagcgtgaaccgcctcgtggagcacggtcaccgggttggtgccaactcggccaggtgcggtgctgccgcgtacctggaccaaggtgtcgaggccctgggtggagtgaatccccgccgtacccggtttgaggaaggcagagctggcagtgtcaccgccctgcaccacacggaacgcggtacgctgccccaggccctccagggtcctgatagtatcagccaccttggcggcgatgccctggagcggcttgggcacctctgcgtgggtcttgaggtggtccaggacctcagacagcttccggcccgacaggctatgcagctcgtcgccgaaggcagtgtcacgtcgcggaatagccggtatctcagcctgctccacgcgggcactgacacgggatagcacagtgccctcgtccagcaggtctaccacgtcacctgccttgaagccgcgtgctgcggcctcctcggcggtcatggctacttctggcagcccgacagtaggcgccgatacttcgggcacatgcggttgcgttggggcctctgcggcaatgcgtcccgcaccagaccccagcagagcacccacgccagcgccaagagcaccagccatgatgtaggttccggcatccacgtcggcccctgcggcatccagcccagcaacatacccgacttgcccagcgccgccagcagcagccatgccagcgcgaccgagccgcagagcacggccagcgccgaaagtaaccgcatcaactgccagagcggcagggtccagcatgccagccgcgaagttccagtacgggttgtcccgcacgatttgctcgtcctgctcataccgttgaatcctcgacaggaggtaggccgcgtcctcggcattgccggcacgggccatgatctggagatagttgtcagtcggctggatacctgccgcctggagcgcctggaccccataggtcccagcgtcgaagttagggtccacctcgccggtactgttcgccgcaaggtctgcgtcgagctggagcgcatcgccccagcgtccgacgagggtggactggttccagagtgcggaagcacggtcaagggccggcagttcctggtccgctacgatgcgttccagttcccgcgcattggctcgttggcccgctgccacgttccgttctccgatctcgccacccgtcagggcgtcgaaccccacggtaggcaccgcgtcaagttggccctgtacttgggcctcgtcgagctgtgcttggtcaaggggatacttgggcgtcatgcggcccttgaattgctttgccatgtcttactccgctgttgcggcgctgtaccaatcgacaccgatttgactcggtgtatcgaagtggggcgccatgcgcttgatgaatgcctcggcccggttgggcgtctgcgtgtaccacttgctgtttcgcacaccagcctcgaaggcttccttgttgcgatccttgatcgcctggaaggtgttacggaactgccgggcacgtccttcgcccatctggaaggccataccggccaatcccaggatagaggcattgttcgtaacgcccagctcgtcggccaacctcacaccctggtcgagtgcgcggtcggtgtcctcggcgaaccactgcgcggcttgctcgggcgtgactgtagtgcctgccccagcattgccactgcccaggtaatgccccaggcccacactataaccatcggcatccttatacgcctcccctcggtaagcctcgaactgagccagttccttccgccagttgaacacgtcctgcttcagcatgccggcactgttgcccccgttcatgcgaatgtccgtgccactgaccttgacgttggccccgtactcggcgccccgcatagcgttcagcttgtcggagttgcgcttgagcacctcgttgcccaccgcttgtgggtccacacgggtgcggtccagggcgaccccgttctcgtcgtactcgacggccaggaggctgccactggtgcggtcgtactcgaaggcgactaccgacttgtagccgaggagtccttcgacatgcggcttgtgctgctcggccaggacggttcctatggtctcggtgtcgttggtcccgaatagctgctcggcggtggtgccgcgaggcaggatcagcggcgcgctatcgcggcggctgaataggtccccttccttcaggttccgaccttcgcctacctggatggtgcggttacgcacgttggcggcggcgatctccagcagggcctcgcggcccgtgtcgctggtgagcagacccgcatgcttgcggtcgctggccagccagttcgcctcgtcgatggtcgcccggcgatacatgctcaggacggcctcgttgttgctcaggtcgctctcgccggtcagcatgttccaggctcgaccgaagatgttgttcacgaacttgtcgttgacctgcttaccgaggttgtccttgaatgccttggtgttctggcctttctcgaactcgtccatctgcttcacgacttcggcgttggcgctaaactcgcgcagagcttgagctggtgcgatgcccatcttcatctgcttgagtgcccaggccacggcgccctgctcggcttccgggatgccggatagcatcacgttgccggcggatgggttgatctcctgggccgaggccacctgttcgaagatgctgttcagcgtgttgaccagctccgggtttgcctcgccttccttggcggcctggatcatgcgcaccgcgctgcctacggactcgccgtaggtcttggggaaggtccccaggcgcaggccgagctgtgtgccctgcacgagacggtcagtcaggcttgagccgttggcggcctgcatcttgtcccactgctccagcgcctcggtgacgttggtacccagcgtgtggagggcgttgatgtctccggcttccaaggccgccatgatgccctgcatgcgctgagcgttgcccaggccggtcatggccttggtcatgaacgagatggcctgagcgtcgctccagcggccctcctcgaccatgcctcgtgagtacgcctcaacctcggcaaggtctgtgatggcgccgttggccacccgctgctggaagtccgcgtcggcccgcagggtagccatcgattccttggcgcgggtctgagccttcgacttttcatagaggccgttgagcgcacgccgatcatcgaaggacatgctgtccaggaacccggcatcgcgcaggccctcatagatgccccgctggttcatgtccaggctggccgccaggaactgcatgcctaccttgtcgcgcacctccagcgggatatcctcggaggtcatgatgttggtatagaacaggccggcctcttccaggctgagctgccgggacagttcgtcgccggtggcctgagcctgcacagccttggccaggatgctgttaccctgggtgcggaagccacgggcggcctggtcgatggaccagtccatgtacgccttagcctgcatgccgaagagctgttcctcggccttctgctgctgcgccagcgcctgtaaggcatcgttggggttcatgccctcggtcgaatccaggacgtgcgtagcctcctgggacaggtacttgcggaactcctcgggagtcatctcccggcccttgttggcgatgaatcgctgcatcttgaggctgaagtcggcctgagcgatgcggtagtcctgcttgcgccagccgcccttcacgaatggtttggccagtacgttgctgtctactgcctcctcagcctcgccggccatacgggcacgctcaccgcgcagaacttcctgctgcacgttgtgctcgaaccatttgccagcgatctgctgaccggcacccaggatgccgtcgagaatctgcgagcctacgctcgggccgctgtagttgatctcggagtcgcgcactccgcgccgagcactctggcccggctggagttgcgtctgtccgacgttgatcccaagctcttgggaagcacgttgcgattccgccatcagttgcctcctttaggcgtggcgccgaacttgaagtattgacttgcgtacagggaacccgccgacatcaggccggccaccagcggggaccgttgccccgccgtggtactcttctgccccagcaggccggccttcgcctgagcctggatggagtgcgcctgctcggcgaggttccacatctggttgtccaggttgtcgtcaatctggatcagggcctccccgacctcgcgctcgatgtccagggccaccgcatccacggatgcacccttgacgccgaacgcgccggcctgagcctcggcactgccgccggcgagcatcccctggcgcttggcctccacctgcgaggccacggcctgcttgcggtagctagcggccatgacgcccaggttggcgatgtcgcgggcagcggcgcccaggttgtcgaggtccgccttcagtcgagccttgttctcagccttgatcttcttgcgctcttccttgttggccataccctgctgaagggctgacatgccgccagcggccaatagtggtagccagaaagccatcacaccctccggtagatttggttggacttgaagttgtactcgacagcccggacgttcatgtcgtacggactatggcagctcagctcgaacttggacgtggccatatcgacccgtgccggcagcggcaccacagcgctatccaccagaggctccccggcattgagttgccggctgaacaaccgaaggggcgtcgtgtcgtaccacggctggttgggtcgagccgtgtcgctgatgcgccacaggaactcgccagtccatccgaagttcacgctgtaccggtggagcactgcgcgggtcgcggtcatgggcagcccgttgtggtcccgtagcaccggcggagtgaactccaccttggaccagaactcacagccgaccacgtacacggcaccgactacggcctcgggcacgtcgaggaacaccttcgtattcgtctcgcgcttcacgccgaggtgggtacgttccatgtaggcaccggccacgggctggagctggtatacggcagaggcatccttgatcaggtcccaatgctgcttggtcagctccagctcaccatcgacggtcgcctcgatacgccgccagtaatcgtacttcggatattgcagaccctcgcgggctggcaggctgttcaggtgcatccggcccagggcgatctcctggcccttctggatcaggaccatcaggttgtcgccggtgaagtacgcgccgatgatctgatgccgcagcgtccatcggtggaaggcgttctggactttctcgttgccctgccagaggtactggtggcagatcatctcgtccgccgtgctggtgccgaacaccaggtagccgctggaggccgccgcctggatgtactcagccggccccggcatgtagctcgggatgtggctggtaacgtcctcggcgacgtagtggctgtccgtggacggcgacggggccatctcatgcaggcccatgaaacccagggcacgctccgcagcgaagtacacactgcggccagtcacggcaggtgccgccctggtatcgaggtcgtactgcgtggtgatgctgataaccgccgtacggggagttacaatgccgccaccggggaccacggcctggtacttcttggcgaagacgatcaagtccttgttgaaggtgaccgcgtgctcgtacggttcagtcaggctcccctgggccgcgatctcgataggatcatcgtcgttcagcgcggctgccgacttcttgaaccagcggtgcggattgttactggccgacatgcagacgtactcctgcgacaggagaacgaggcgaccctggaaggtcgtcatgccggtgatgcctcgggtgacgaagttgaacgtggggttcgtatcctcgtcgccggagccacgtcgatcatactccaactcgttcaagctgtaggtgtcggtagcctcatcccagcgcagggccagtggcatcttcttcaggacccaatcggtgccgtaggcggcccgctctgcccagcggcggttagcggaatcccactcgaagtataccggggccttggtggagccggtggccatgacagcgccgtccatgaactgcacccccacaccaggggcgccaactcccggcagcaaggccggcaggtccgccgtagcattgaggctcataccacctgacgcgatgccgtagttgttgcccatatccgtggacacctcgaccacgatgtcgccgtcgccccggaaggcgatgtagccgtcctgcacgccccgctggttgagatagccggctaccgtagccgcagccgggtcagggtcaaccttcgggtacttcttcgtggagttgggcagggcgtactccggggcgccgaagaacttgccgtagagttgccaagcgatgtagcccacgctcgtttggaacggtgcctcagcgaggttggggttcgtgctggcgttgtccggtgtcacgtaggtggccgtgtgactgtaggtggtgcccgtggcgttgtccttgaccttgatggtcagggagaatgccttcgaatactggcctgccttgacgtacagccagccggccttgttggggtctacgcccttgatgtcggtgcggtcggcctcgggcttcacgctcaggttggcgatgaacaggtcatcggccaccgtggcggcccgtagctgcctgtaatcgttggccttgaggtagtcatgcaccaggggctgacccatcagcaggcgaccgtcccgctcgtcgaacaggtacagctcaccacggtgctgcgccaccagcatcgcaatgctgcggccaccgaggttcgtgtggtagaggaacggcctcggccagggctggtcggtatgcaggtgggccatcagctcgataccgctgcgccgccgaagtcctgacacgggatcggataccatgttgatctgctcgctgagctggcccggcaggcgctcgaagggcacctgctggctcacacccatcagcagattgggatacgcggattgcttgtagctcatgctcaggtcctcaagctgcgccgccaccggctgaagctacgcttggcctgggtgttcagcggacgtgatcgggtgtgcatgcgggacagttcgttctgatacgcctgcaattcctgggcgatgacctgggcggtctcgtccggtccaatctcgtgggtgtataccgcgagcgcagcctggtgcgcaatgacgcgctgtgcgatctccgggatacggtcccactcccgagacagcaccaatcggccctcgaccgacttaccgatgcggtcgtcgccggtgttggcatctcgcactcccaggccgtcccactggaggtccggggaatccgggtagaatgccaaggtgcccttgggcaggttgatgcggcccgtgggatcaggtgtcagcttgtgcttccaccaggtgttgaaccaccagccttgggtcagcaactggatgcgttgatcttccagctccgggagggcgatggccatggttggatacgtctcatccatgctcgggatcggcagctcgccgatcttgcgcaggatgacattcactgcgtcgagtagtagcatagggtttctcctaaagcgcaaaaacccacgcagggaatctgcgcgggtcgttaggctttgaagaaaccccacaccgaagtgcggggtttcgtggcatcacgcggtgatgtcgaaggcgccgatacccttcagttcgatggcaccagcggtgtccggacgacgggcaccgatgttgtacatctggaaggtatccaggacccacgagaatttctcgttgtcttcccacagcttggcctggaccggcgccacttgggcggtgatcagggtcttgctcgggaggaacagggcgatctggcgctcggactcctcggcgctcacgttgaagtgacggcccagcgggtgggctgcgattgccttggtggcgaagcgcggagtctccagcaccttgacgccgttgaggatggccacgcgggacttcacgtagtcgttggtcgcgccggttgcctggtactcgacgttcatcagcttgtcgtgctccagcagcaggctgaacacacgcggcgacatcggggtcaggccctcggagtagaccgcatcgcccaggtcgcggtcgatgaaggtctcgactacgcggcggtgcatgcggacgatcttgtcggcagcctgcttggcggtcaggccggtcaggtccagtttctccagcacgcccggcgagaacgcatcttccaggtccaccggcgcgtccatcgcggcagccttgatcacctggatcaggcaggcttggtcgaacttgcgagccagttcctggccgtccagctcggcgacttccttgcgcatgtcgaaggattgggtccactcgtcctggtggtcgaactggtggcggaggtacagcagggtgtcgacggtcaggttccacttgtcgttcacgactcggctgcgctccagctcttcaccggcgcggcggcccttggcctcgacgttacccaggcgatccaggcggaccacgttcgagccacgcaggtcgcggatgttcatcagcggtgcgaacttggaggtgtaggcgaagtgcttatcgacgatgccgaggtgctcttccaggtggatgtcaacgtccgcgttcttgccagcgtagttcggacgggtcaggtcgttcaaaaagctcatacgatgctctctcttttggatgtgggtttaaggccggagtagggcagggtcgttagataccctgcgccatgcctgccttacgacgctcgcgcagcgcagccatctcggcttcggatgcgttcagcggcagcttagatacttccaagcggtactgctcagcgctcagagctgccagtgcaggtgccgcagcacccaggggttggccggtagcctgtaccacggcacccgagccttgtgcgaaggccacaatttgcttcgctgcgtactgcatggcctgggcatcgcccgagtccatcagccgaccgatggcggccttggtggccgggtcagcgtgttggttgaagacgccggcagcctgcttcaggatggcctcaccgccgacggcggcataggtctggctcaggacggctttggtctgcgcatcaacataggtcaggacgcccttggccacgttgatgacgtgctgcgcctgggccgggccgagaacttccttcagatagtgctcgtcgatgaaccgaggatcgcggttctcggcggccttgccgaaggctcggacggtatccagtttgtcagagaacgcctccagatagctgatggagggcgccaactgcgggtcgccttcgaggttccctgccaaggtgcccacgatctccccgttgggagtgaaggccggcggcggcgggacttccaggttctcgggaagaactgcacccgcagccggcggagctaccggggccggctgagcgggtgcttgcggaacaacgggttgacccacggcaggtgccgctaccggctggtagtgcggcgtcatggcgctggtcggaacgggttgcggctgctgagtcgggatggccagttgctgcggcgcacctacctggccgggctggaccggagcctgcggctggatcaccgggttcggcatcacctgcacatgactcggtgtcggcgcggcggcgggcggtacgttggcaaccaggttagcgaggcccggcggcagttgctgttcgttcggttgggacatctatcagactcctgcgagtgcgttggtcatgtcggaagcgccttccagcaaggtctcttgcgcggcctgggcctgcgcggcctgctgacgctgctgctctgcctcggcctgtagctcgtcggcgctcttgtagaactgcgacgtgtctacgctgaaggctgcccaaatcgtgtccatcatcttcggtagcgagatgcggggatcgagctgagcaatcggggccaggccagcgatgacctgggaagcgttgagcatgctctgcacagcggcggagcgggacagggccgggaggcccgtctcgatagccggtttgtgctgcttggtgatcaagccttggagtagcgcatcatccacctcggagaggcagacgtaggccaggggcgactgaaggttctcggccaggagcgagtaagtaccgcccagtgtgttctctgcctcttccgcagtgatgcgtacttcctcggcagtgacgcgctcggcgtcgcgctggttggcaccatacatgaacgcctggttcaagcgaacgactacggcttgcaagctctgctggatagcagccatcttgttgtagtcgccacgctcgtaagcacggacggcttccgcgccacctggcacgtagtcacccatctcggcgtcttggtagtcatcgactaccgcacccttggcctcgtccacgaggttcaggacctccagcgactccagctcgtacaggccgagtttctcgctcagcagggacagcttggcgaagtcgccgatgtagtcctcgacgtggccgcgaccgtagtgctcgccaggggcgaggttccaggtcggcacgatgtacgggcacaggtggataggccagcggccctccttgcccacacgcacgccgtcgatctcgtggtacagctcggcgtattccatcgccgtgcccctcttgcgctgtacgtgggtgtacaggtccacgctacctgaaccggacaggttgcgtcctgcgcgcatcaggtcctgcttgtactcttcatccaggtccttggacttgtagcgctgctttaggacgatatccatccagcggccagtcgcatcccggcgcaccgcataggagcggagcgaccatgcgaccaccgtagcggcggcgctgtctcggtacagcagagcattgccagtcacgatcagtagcttgatcacctgcgtcaggaccgccagggaggcgttctggaacaggcgctgtgttgctttgcgatccacccgagccaaggcagcggtcacttcggtaatgtctgtgtcccggctgtcggcctcgcggcggatcgcatcagtgagttcggatcggaagaacggaatccccgtggggaacagcgatctcgccagcttggcggcgaggttgttcaccaggagggcaccggcggactggaagtcatgctctacgactccccggctgccggacatgggatcgaccatcaggtagggaagcgtggtcttggcgaactcgatggctcgactctccacgctcccatcccgaagtttctcccacagcatagctgcggtggttttcatggcgtacctcgtcagtagttgataccgagggtttgcgatacgcctgtgcccgcctgattccggcgccgtcgcgtgccggtgccagtggcatcggccatcgctcctaggtcaacctgcgccacgttctcggcggtgaggtcaacctgctggtttcgtgcgagctggtccgcctgctgttgcattaggcggttctgctcttccatcttgcgggcatcggattgtgcgccgctcaggtcggtgcccagcaggccatcagcgagtttgccgatgatggtcttgcccagcaccttctttactttcttgcccataaggcttggctctccggtagtggatcgtgtaccggctatcgctttcacgatggctccagcacacgagggggatttgaccccagccggcctgacggtggagttcgcggatgaactcccggaccacgcctgtattgcggtagcgcggtaggacgtactgccactgtgctgtgacgcacgggccgacgtggggatcgtcctcgaacacaatgcaggcaccgccggccaactggccatcgcggaataccaacagctcggttcgatcgttgccctcgatactgtccagcatcgcattcagggcgtcgtctttcgagcggaagagggtgaattcttccaactcctgtattgccagccagcacagcccctggagttccgagggagtgccggcctttgcgtggactcgccagatggacttgttcatcacttcaactccactgcgatggcatcgcgtcggcgcaggcgtactgctcgcaccacgtctcgcctaccggcctggaactggatgtcttccatcgtggttccaggaccgatctgatgttcggggaaggtctgctctaaccactcgatctgctgagaggtgaacgtgacaggacgggccgtacccttgcctgttctcgatccttccactgtgggtgacataaccataggtcggtgggtcttcatagtagccatctatcatatctcctatgctggttagtctattctatctagaatccttcgtagtcatctagtctcatcttctactctacctctactcttcttctaccctctggtcttccctgacctctttctccctgctcccctctacgagggccttggacggatgcacttgctcctatgtgggtgacataatcccctcagcagaagaacgcccaggagtcccgtacagcctccagattcaacgatcctctccggggcggggtagcctctatcccgagctgttttgccagttctacgagcacacaggggccgctgtacatggcgatgaactgctccctgatgtggacgtgcatccgatccacgtctgccgcataggtgcccatgctgtcgtggatggcctggatcgggataccctctgccgcacaggccagggccgtcaggcccaggtggctgctgtccagcccgtggacgaagttcggagcgatgccgttggcgttgcgtaccgggtccagctcgtccttggcctcgtacagggtgacgtactcgacagcctctgcccgcagcctcacccgcacctcctcggtcttcgggtacgactggaacacctgcatgccgagtggcgtgatccagtgcaaatccttggatgcatcaggaagggccttagcgagccgctggagccattccatggcgaagactgccgatggtactgtctcgcgtattgcgtccagtatgagcgttgccatgtagcttcccaggcggtatgacgggataccctcgggaatctccaggccggactcgtccaggtagtccaggcagtggtctaccacgcccttgaacgtggtgccgtataccagcgtcatgcagggcttcttcgtcaggcttcgggatagaccagccttatcccacaatacagcgtagccccgagcctcgccttcagcactttctctgtctcgtgccagagactctgcaacgagaccgagaactcgggagtagatgtcagctttggcaagtccaggtggcagcaggttgacgtaggctccgccgatctcgtctcggagaatggctgagtagtgctggaggccggagcaggttgcatccatgtggacgatgaacccacttcggtaagcctccggctggcctgatgcgtaggccgcccgcagctccagcagacctgcgatggcgcacaggggcgactcgtcttccgggaagagactcggatagttctccggaccttcgttgagtgctcgctggaagtcgtcccatcgctcatcgacccaggctgcccggtcgtcgaagtacaccttgtcacatccgagggagttggcgacgtggactttgagccagtacaggccgcgcttaccgagggcacgcttttcgtggaatcgcagacacgccttggcgatgtcggacccctggggattcggtgtgccccaatagtacatgcggccacgggagtcaacgtgcatcgggaagtacactgccttgccatgatgctctcgaacaactcggtagagtgcagcaaattcgcgaagcttggcggtatgctctcgctccccggtgtaccaccggtggacggagcgtttccaacggttgaaggcctccagctcttgctcactggcattctccttggcccactcgtcgccgagcgggaactcaggtttgtccgggtaggtgcgctgggggatgcccagcacgccgccaccggaggtgaagacgcgctcgatgatctcgtacacgtcgtggttgatctcgtaggccaccgattgcagcgcgttgaccgcctcgtacaccttgggcatcttgtcccggcccaggtggcgtagctgcatctggcgcgcccgcttggtctggtgcttggtacggcgcactagcacatggtgcttctgcgccttagcgctgtagtaaccgccatcgcaccagtcgttccacggtcgcggcggtgccagcatcacgctacggcctgggcctccccaggtcatcgccgccgaagggtcttgcaggaactccttggcttccggcgacggctccaggtggacgctcgtaccgccccgacctgtgaagcggttcggctcgaacaggccgcactgtatcagcggatcaccaatgaacttgccgaggcgcaggtagtcgccatccggcaggtcgatacgtgcctcttccggcagtaccgcgtccagaagagcgtccatcgtcttctggatgtgccggacgctgcgagtcctgctggtcttgaggtagtccagcgtccggtcgtaatagggttggttgaccttgaaggccaaccgcacttcgatctcgcgacagagcatcttacccatgtgggtgtaatacttcgtcgctgtgatcgttggatagttgatgagcatcgacagcccggcccgcagtgccatgactgcgaggtcctgggcgtcgatgatccgcagcaggtgccgcagctttgctgccggccccgccgccttcgcttcctggtgggcgaagatcgcttcggtcacgatggggagcatccgcatcaacatgatgcgcgccctcgggatgcggtcgatggacccttgggcaatcgccttttccaaggcaatgcgggcgtcattctgcgccgccccgaccagggcctcttcgtgggcgatctgctgctgtatcaggtccattccgtctcctatcgtctttcgattacgcgcccgatatcctcgggaccccactcggcctcggccaggctaaccgccccatccagcgtcatcgctcggtagtcacgccattccccgcagctcagaatctcagcgcggaaccagcgcagttccaccagcttcacttcccgctccaggcgctccgccatctcccggagaatgtccgggagtatgacatcgctccagtcctgatggctgaccatcgccggcgtgatgtacgctgtgacgtagttgaccccgatgccccgctcgttgaaggcccagatgacccgaacaccttcatcggtctcgtgctgtcgggtacaccaacagattttactcattacctttctcccggtccatcagggcccgctcggcggcggccattgcgttgaatgcctcatgcaccaggtgcatcaggttggactcgtcatccagcggtccgtcgatcagccgcttggactcgtgccggtgttgggcggacttgaactcgcccaccgtcatcttcttccagtcgtgcggcagataccccttgacctcggcagcccattgcatcattcgagcaagctcccgcttcagcagcgggaacccctcgactaccaggtgcatgggaagcttaccgaccttgcgttcttccagactcgcacctttgcggtacggttcagtcgtgatcgtcgactcgtaagagtccgggaatgctaggctcatgctacctccttagttgctcagcagggctttgcgctgttccgaggtgttgcgggtgtaccgcccccggctccagccaccacagccgccgcagtgatagtgctcgtacttgccggtctgcgtatgcacccagccctcttgcttgacatccgtgtcgccgcacttcgggcagcggatggtcggctcggcgtcattgaagtacacggccacgttgggatggccgacgaaccacgggcgcatcagggtgtacagctcctccatcgatcgtacgtcgtcgatgttgtacaggcgcatctcctcccaggcttccgggttgtcctggaggcaggctgcccacaggtcgaatccggggaacttgccgtggaggcgcttcttgatggtgcatgccttgtgggtcatgtactccagcttgcggctggtgaacgcgaattgctgcttggcgatgatcaaggtgtcgatcaccttgaacggtctcggcggcggcatcttgttcaggaagaaccgggcgttgatcttgggcacgtcgaagcgcttgccgttctggacgatgatgatgtcggcctcgtccagcagcttatgcagggcgaccagcaggtgcatgtcgtccagggggtcaccctggcagtccatgtagatcacctcgtcgctgtgcatccacttcgcacagaacgacaggatggtccagtcccgcttgatctggttgaggcccacgttctgcttccagagcgaccagacccagccctcgataggcgaggtctcgatgtccaggctcagcaccttcggaccctggcctaccacgttgcccacggcgccagggaacttgcgcactacctcggcagccttgcggcccagccagtgcatcgcgcccttcttggcgtacatgccgcgcgtcctgctgtcgtggaagcccagcttgatgcaccagttgcggaagcactggcggctcacctcgccgaagcgcgaatgctcggtcaggtgctcggcacccttcttgaggcccagctcgacatagacgtttcgcaggtactcattggtgaattgcttgcggagtttgctcatacgttcctcgcgttgtgctttgcgacggccatcgccgccttgcgtttggcggctgcctgccggcgcttggccagcttcgcttcgtgtttctcctcgtcggtcttgtgcagggggtagatcagcggatgcttcggcccctccagatacgtcaggagggcacgaaggtaggggatgatgtcggaatacttcatcgacttgcatccccaggaacctgccgcattcgttatcttgccttctgcggtgttacaggaccggtgcaggacgccccgcaccagccccgtttcgtggtcgtggtccatcaccgcttcgcccttcacgctgatatcgatgggcttgccgcagagcgggcacagcttgttctgctcggcccatagcttcagggtgaaggtgcgctgttgactgcgcggtatctggtagaccttcggctcactcgtcataatcgctctccctccgcttctggagcagcgcctcgtggtaggcgtccagctcgatgatccactggcggaaggccggacgaaggtcgcggcttaacagatactgcgctgcgttgtcggtaggcgttcggcgcatccacagcacctcggcctctgccagcgggttttgcttgatcttggcgtacgcctccaggatcatgtcgatggcctcgtcctcatccgtgatcggatggaggatgtcgaaggccgtcttcataccgcagagcttaccgttgaatcgatcgatccctcggatgttgtcagcggtgtcgccgccgagccactgcgccaagaagaacttccgtccatggcccttgagcttgaactggccggaaggcgtgtacgcttccttgaggtagccgaatccgccctcgatcctgctcacacacgccgtatcgatctcccaatacgggtagatcgtcatccgcaggtctttgtcgtcggaccggatgatggccttgtcctgcatggcgtaggcgtccatcatcatgccgtcgtccgcctcgaagaacgtgtgcaggatgacatcgatcccctccggcgccccgcctcgctcatgcacgtccgccacggcccgccgcagtggctccagcagcgcgggctttgccttgcccttgcgctggccctggtacggtttcatggtcggatacgtgtcgcggtacgccttcgccccacctgctgccgtgaggtgaacccgtgtccctgtgcagtgcgctaggaactgctgctccaaaatgagcttccagaatcttcggagtgcagtgtccagggtcttagcagtggccgcagccacataggcgggtccgtcggcgtcacacaccaacgtcccgcctgccatgctgcggtcgaactgcgcggatagtcctgccaggaactcttccgatggcaggcgcattagacctgcggtactgccggcactaccgggaccgccgggacttcgaccgctgccggagccgccgtctgagccacctggggcacgtcaggcagcacgttctgtgcctcggcagtacctaccacaggggcggccacattcgccacctggggcacgctgggggccgtctgagccactgcctggggaacagccgggacagccggtgctgccgctacgccggcgtcggcggccacgttgggcactgccggcaggttgctgcctgcggcctgggtcgtcggcttgatgatcagatcatcgccgccgcccaacatgatgtgcagggccgagccggggaagttggtggccgagcgaatggtctcttgcaggaagttcttggacttgccgttgtccgaggtgccttcgatgaacagggcgtcccaggtctccttggtcggcgcgtcgaagaagaaatactgcaacaggtccatcggcagttccggcacgttatacgggctgccatcgaccgggttatagggcttcatgatgccgccccaatcgatgtcgttgcgttccttaccggcgttgttgcccttggtgatcttggtgcgcttgatcgggatgatgaacgcctggccgagcatctgagcgaagtgggtatgctgcccgctccagttcatcttgtcgaaggccagcttggtcttggacttttcgttgttgccgagggtcatctcgaaggtacggaacaggccgggcttgatcgagccgtcggcctcgtaggtgtggaacaggtcgtccgggcggctctgcgggttaccggcctgcgggttcacgtcgccccacaatgcgaagcccaggcggatttgaggcgccggattcttgagcttgccctggaattccttggcgtggtcacccagctcgatgtagatgcagaagcggcccatggcggtgcccgccgggaagatgcgaccgccgccaccgccggtggaggtttcggacatgtcgatggttgcggtctcggcagccttgttggccagggcgagggcggcttgcagagcgttgagttgttgagtcatgcgtggtctctctcgtgtcgaatgaagatttaaggccggagtaggctagggtcggcctagtcccggatcacgtccatgttgaacatgttgggtcccatctcggccaccgccgggaagggaacgtccgcgatgtcgtagcccaatcgctcgctcatgtagcgggcagcgtcggccatgatgtcgcgcacgccacggttgacctcggcggcggtgtccttgtggcagtcggtgtacacggcatcgtgtacgttgttgatcaggaactcggtgaccataaatcctgggcgatgcagcatccaacggaagatgcgccctacgctcacggtcatcatgaacccagcctcgccctggttccagtagttggcgatctgcgtgtccttgaagtccatgaccgtcttgcgctgttccttgtcccagcgctcctgttggcggaagctgtagcaggtgccaccaggcgcttgccagaatccccggcggtactggcgccagttgccatccggccccatctcgctgaaggcgcctgccggcatctggtcctcggccttgtacattacgaggctggtggcctctgcactgtcgcggacgatctgccggaatgcgatggactctgggaacagggccgcctcgttgtccaggaattcctgggcctcttccacggtacagccggtgttgaatgcgataccagccgcactcgcgccgtactgcgccgagaatgccttgggcttgatgttctttcgagcctgcatcatgcgaccgtgccacgggtggttggggtccttcttgatggccacgagctggtcgtagtcgaacccgttccagttgttgtgcttccctgccaggcggtacaagtgcatgtcagtgccggccatcagtttcgccaggaggttccgatccttcgacagggccgccaacatcaccacctccagggcggtatagtcggtctcgccgatcatcccgtccgcgccgaagcgagacacgaacatctccttcacgcggctgccggcttccgggtcgtcctcgtccttcgacgggagctgctggaggttcgggcggctggacgacagacgcgttgtcgccgtcgccgtcgtattcagcgaatggtggatgatgccgtcgtcgtccacgtactggagcatccccttcgtgtccttaatcgtcccatccttgttgtaggtgtgggtgatgtagaacgaggagttgtccttgtgcagctcggccaggcgcatcaacagcttggccgcctcgaagccctgtttctccagagccttgagggcgtcgccgctggtgctgaacacgggcgacccatccgccagggtgagggcgcactggaactccgggcgtttgcccaggaatttctcacgcactacttccggaaggttggtcaggttgatcaggccggggaaccggaatcgctggtcatcatcccacttggtcgccgggatgtccgtatcctcccggaacaccttgacgctgcccttgttcttgccagcggagaacgtgatgaccgggccgtgcttggtcgccagctcggtgatggtgggccagtgccactcaccctggtcggtcacttcatggatcgggacccgaactgaggtactctcgattggagtcccccgcttggccgtaccgaagcgcacgaagtcggctttctccatccggccatcttcgtatggcacccggcccttgtaccgcacctcgccaccgtagagccatgcgctcatatggtagaggctggtatacttgaactcgaagtattccgggaagtcgggcatcagcttcttcagctcggcctcgatcccggccacctcttccagttgcttggcgtggttcaccttggcgacttcgaggtccaccttcaggccggcacactccatcgccgagaaaccgatcagggcctcgcagcgctccaggtagccagcccacatgccacgggcctgaagcttcatcagctggccgtagaacacgagggcggtattctcgatgtcgccgcacgggccggacaggtactcgctcagcaggtcctggtccatctccgaggtgagcacaccctggtcccacagcatcttgatgccgtccaccttgtgggtgccgccgtacttcggagccagctcgtcgagtgccgggtacagccacgtctgatgactcagcagatactcggcttgctgggtacaccagacccggccaccgcgtcgcaagaaggccaggtactcgtcccggtagcgggtgaagaaccagttcgattcgaacatggcattgtgagctacgatcacgtccacgccgtcgaggttgaaccagcggttgttcgggtcttcggcttcggcccggctgcggaagcgatgttccaccttctggccgaccttgccgtcaacatcgtcccgccagccggccatgacgatgtagttgcgggggtcaaagggcgacgccttgcgccccttgtgctcgtagctctcggtttcgaggtcgaggattcggatagtcgtcatttgctgtaccagttgctttgactgtactgctgcgccttgaccagtagaccttccagcacacggcggggaatctcctgcatcaggtagcggaccattccttcacgtccccatatggtcagttggtacagggagaccgcgtggcagaatcccatacggcccagcttcgcatggtcgtagtcaattcgaatcgacagctcttccgcttgcgggtccatatgggccttggtgcggaggccggggaacagcaggtccaggggttcgtggatatccgccagcaagcagcggatcatgcgttcttcctcggtgggcattctcatactttgactcctacctgtcgcagattgcgacgcagacgtcgcatgacccggtgcaacttacggcgaccggcgccgagggattggatgtcccgcgcatgatgccgaacttcggacccaacgtggtcccaagtccctgccatgacgcagatgcggaatgttccgtcctggctgatgaacacggaacccatgacgtacttcggatacagcagcgaatcccggttggtggcgtggtataccatatcttccgggtagttgcggttatgggactttcgaatcttcataccttcactccagggttactggccaggtcgcggaagcgactgaagctgggatggcggagggtgttggctgagcgttccatcgcggagacctcggcgatgcgtccatagttcggcatggcctcgtcgatgcagccgttgaggtgggcgcaggtcaggagctggatgtgctcctcactcaggccggtggcgccaacggtgccggaaccatcttccagctccacacggtagcccacgacgcggcccacgttcttgccagtcttgcccatcacgtacccgacgatacgcccgtccacggtgatctccggcttgcgcttgtagcagccagcaaccttgccgttgcggtaggtcaggctcgggtctttctccatcgacccctcgaagcccatggcgcggtggtagccgtaccagcgtagtaccgcctccatagaacggcaggattgtgcggctacctggaagaagtacggggtgtcgccccgccggcaatcttccatgaggctgcggaccatggcgcggcgctcatcgtatatgaggtgggacttgcgcgatttgcggagcacgccgatatgggtggcgtcgaataccgcgaagtgcaggcacttcagctcggcctcggtcagcggggtcttgcgggccatgcgcccggtcgcctcactgaagggcatgccttccaggtacatctcacagtccaacaccagaccggagtccaggccgggctgggacagtttcgcgatgatgcgatcctccaggccgtccagggcagggaagcggcggccgctgcgggataccacgccgtgcgcacccacgatggcacggcacccgtcgatcttaggctcgacgatcacgtacccgtgcttcttgatgatggcctcgacggccttgtcgttctgatctacgccgcgccagatgcctttctcgatatccaataccacgtcgcgcttgctcatcacacgttctcccatccgtagtacgcggccttggcccgcatcttttcgcatcgctccggcagtcgcgagccggaaccaacttccttgttcacgccccaggtaacgtccttgtgcaggtacacacccagtcgcgggccgccctcggggtccggccagttgtacgcgatgcccacttggttgatggtgaagtcgaacgactccatcacccgaccgaggctgtcggcatcgtagtagttgaagtccacgtccatgccttccaggccacggcagcccaccagggatatcacgcccttgaagataccgccctcacctgcgtcggcgtactcggtactccagccaccgtcccggacgaagcgcgggtccagggtaggaagcacgctgttgatgagcacttcagcctgatactgcgtcatgccgtacagggcgatgtccacgtcctttggagtggcgccatgcatgaggtcgcgagggaacccaccggccagggcgacgccctcgttgggccgtgcatcagagtacaggcgcagcaacagggccttgaccccggtcggcagtgcaatggaacccagtggaatttctttggtgccttcgagcacccggctatgcttagcttgcatggtctacactctcaaagaaacgacaccgtgcggcgtcgaagttaatcatagcctccacgttcgaaggcttcccgtccatctggaacttgttcttcggcagggacaggccgcgcatgacctgttgatccgcaccgttgagacggcccaggtggatttgcacgtccacagcaccctgtaccgccgtcttcgaatccttgaggcaggactgcggtgggaacaactggtcgtgaccgtcgttgctgatctgccacgtcatgaagctgatgaagtcgtgacgcaccgccatctcgcggacctcggccaccttgtactccatctcgtcggtgcggttctggtccttgcgctggccacctttgacgtgggccatcatgtcccaaaacaccaccgccggcttcatcgcgtcaatgacctgctcggcctgggccagggacccaccgtggaagtccttgatgcggatcagctcagagtcgccgccgattttctcggcgtacatcctgcgaacctcctccgggtccagggcaagaatctcgcccacggtcatgcccagggctgccgagtacaggcgcggcttgatccgccggcccttgccctcgttgttcagccacaggatgggccgcccagggtcgaagtaccgcttgagctgcggcgcgatatggacagcgatccaggccatgaacgaggtcttgcccgcatcaggcggcgctgccaccagcaccgaggccccggcgtggaggcccttcatgtacgccggaagcaccagccccggcagcttgatgccgtggtcaccctgctcctccgccaggatatcaaacacgtcgtccgtcacatagtcggtcggcgtactgaccccctcgcggcgcagggcctcgtcgctcagccggcgcagctcatacgccaggtcgatgtcttcgccctggttgtactgcgccaggagggcatccaccctgcctgaaaaatccagttcgttgagctgggacacaacgccctgtagcgagtccgggtctaccggcttgtccagttggttgacgaggttcaggaccaccgccagttgctccggctggtagccacctcgcagctttatcagttcgcgtagcgcctgcgggtctaccttctgatgcgctgggtagaccttccagtattgctcgatccagtcgatgacaaagcacgtctccggccccatcatcccttcaggcaccacactccgcaacgtgcggaagcggtccttgtcactcagtgcgtgtagcgtcaatacgtccaattactaggctccttatctgctcgcgggtcaggtccttgggatcgaacccgtccggcgtgggtattacttggccttcgataagcagggaccggagccggcgcatcacgcctgcactaccacggacacctgccgggtcgccatccaagaagatgaaggcgcgcttgcaggtctgctgcaacatgatcgccgccagcctgtcgcgcagccttgtaccgttcagaccgacagcaaagacttcgggacaggcccaccgcaccttcagcgccgacaagtagtcttccgtcagcacccatggcctgcccattgataattcctggggccatccatggtaatccggggcaggatacccgtagcccacccacttgggattttggtcggcagtagcgcgcccaatccagcccgcgttggtagggaagataagccgatgctgcctttcgctgtacagcagcggcagccctggcgtcatcacgttgtagtcgatacccttggacagcagcaaaccataaagcgattgatagcagtcggcttgcgtccagtccgaggcatcctcgggccagggcatgaagcgttcttgatccgcgcattgtaccctccgcacatgcgttttctcgaccacaccaccctcctgacaggagtagcagtaagccacccagcggtcaggcaggttcttgcaggtcatgttggtcccgccccggctcatgctcttgcatcccaggacgtgtcggaaccggcctacctgcccaaccgccagggattgcgcttgctttagccaggagtcgcggcgcagtgccattggtaccattcctcccacaaaggccgcagcccacctcgggcctcgaacatgtcctggaggtgccaggtcatgcgggcgccgtaggcgggccgccgttgttctgtgtgagcagcacgcccagggccaccagactgaaggcgactccgatgaccagcggtttgttctcgataagccatgtcatcacctcatacgtcatggccgggtgccctcatgtgcaacacgtccggctctcctgctgtccagttcgcctcgcggtgggtggtgctccagcccaagtcggcgtagaacggctccaggaactcgaagcaggtcagatactcggcacccgccagctcggcggcccgcaccagctcagcgccgataccctgcctgctgtgtcggtcatcaacgcacagggccttcagttcaccgcccactacgaggcaggaacctaccatcagacctgacaggtcgaaggcaccgagggccagcacgcctcccttcttgcgccagatgtcgctatcttgccagccactccggcggaggtggagcacacactcggcgatactcgcactcagctccccggctggactcaggctttcccggagcgggtggtacttccgctgccagaggaaccactgccaccagttctcggcgttgctcggggcttggatgctgaatacgtggatcgtcctgatttgaatcaggccgggatgcaggctcagcggatacaggctcgtcttgctcatcttcgatctccctcaacttgcgctggccgaagtcaatcaggtcctgcgccatgtaatgcacaaggctgccggcacacgccgccaccttgtcccaggttgcccgcttaccgtcgatgcacgggaagacagcctcgtcctccagctcgacgccgaagcggtatccgttgtaatgcgtgaaatggtattgcatgttcgtgatcctccagactcacacgagagggcgctctaggaacgccctcggatttgaccccggagtaggccctggtcgcttagacgagcaggtacgtcagcacgctacccacgacgccgccggcgatggtggctgcgaaggttgctgcctgccaggtgtccttagccgccgccttcgcccgctcacgggcctcggcctcagccttcgccacggaagcgcggaaggtataccgcacgccggtcagcttgctgatgagctgacagacggccttggtcggggccaccgtcagcaatcgctgagtctccgcgccgtcccaatacaggccggcccgttgacctacctccaccagccgggtcaaaccctgcttgaggccgaacagttcagcgcccatctcgttattccggtccgcaagcttccgtacccggctgcgcagcggtccgtccatttctattccggcatcgcgcagggcacggtttaccgccagcttggttacgtgcagatcgtgtagacgtacctcgaagtccttggcggacagcgggccggccttcttcgataccagcgggaataccttgagcagcagtttttcgtactcatcggcgcgcttcgcgtcggcctggcacaagctggccgctacccgcgcctctagatcggcatagccacaggtgctgacgcgctccacgttatccaggcgcacctccaccttaccaccgtcacaggtgacgccgctcacacgggcggtgtaagtcccgcccgaagcctgtttcttgggcgtataggcgtgggcgaatgcccggctcttggccacccggcgcatctccggggataccttggcacacggcacgccgaacatgctggccgccagcttggtgaagtgatcgttgcattccattgtcagactcctgccagtttcagggttacggccagacctgcggtcagcaggcatacccaggccatgatggttgccttgcgagcgcggcgctcttgtgcctcgtgggcatcgtgcgctgcgttcaagtcgttctggagcagacggatcgtcgcctgatggctgcgaatctcgtcgatctcccagcggcgcgcccgctcggcggcctggaggcggcggctcagggtgtcgatatcctgggcgcgctcctcgcatacagccagggcggattccaggcgatcttccagggcctggatggcgggtgccttctgtacgctcacgctgcgtaccgggccgctgatgtgctcggggttgtgcttgctcacgttgactcctcctatggtatggctagctcgcaataggcccggcagggccaggcctattacgtgcgggccttactcgccttgggcgatggcttcgtccagggtctcggcggacgctgccggggcctgcactgcgcggatggcaccggccttcacgtccagcagcttggccggggcgctgtcgctgaagcgcaccagtacctgatagacgccggcgactacgctgatgacttcgccgctcagcacttcggctttctcgcccttgccgtggtcgaaggtgatcacgtcgccggcaacgaggctggacaggcgctcggcggtttgcagggcgacgaccgcttcgttgtagacctcggtcagcttggtcagggcgttgtggtggaagacgacgttgttgcggaagtcttcgacggtggccggcttcttgatgagcttggcgcccaggacggttgcgacggtggtttcggtggtggtgttggtcatgatgtagctcctagaggttggttggttcgcggcaaggaatggccacggtggaaggctggcgcaccagccttcgccttggtcactcggcggtgagtgtcacctgggtccccttgtcggcgagggccatgcgccacccgtcgttgcgcagcacggtgggacgcggaccggtcaccttggcagggccgtcgtcatggataaccacgggcagcactgcgggacggcccgtgctgtcccaagctgctacgccgatcaccagtgtgccgcgcttagcctcgggctgcactacccgatacatctcaccggaacgcaattccgtgaggtcgaagagacggcgttgctcgcggtcggtgttgtgggtatgggtgcggatcatgttacctccggtaggttatttgatgttcaggtgacgcttcagcccggtcagcaggccccggcctactgcacgtagtgccaggaatgtgcccacgatgattatgagtggccagaagcacccgatcacgcatgcgtcctggaactgcacttccgtcgggttctcgaacggcggcgacactgcgatgcagtagcaggcgcctgctagtatgccgaggcaacagtacaagccgagtacaagcagcgcggcgatcattggccggcctccccttgaacaagtttgatgtactcacccgcacccaggcggcggcaccgccagtctgtgttgagaatggccgtacccaccgcgtactgcgcggggttcatgctgtgcagtacgatgactgcctgagcgagggcgggcgtctgcttggtcgccagcacaacggcgccctctgccacgctaggcgtcaccaccttgtagagttcacctggtgacaggcgtcctacggacaagactggcggcgccgggtcttcaggcttgacatatatggtcttgacggtcattactcgccctccttcacgaggtcagtgcgatgcacctcttgtacttcacaggccgggtagatagcgaccgcgccgccgaggaaccagagttcgacgaaggcgtggccggcgacgatgctgtcggctaccacctggcgagtagttccgtccttgagacggacgacgtaggtaggattcatatgcgcttgctccagttcacgatgaggaaccggctcccaagcaaggccgatcggcgatgcttgcgaagccagcgtttggccgccttgcgtgagtagaatcgcaatggacgcacaggtcgcttgcgactccacacgaaggcacagcctcctgatgggctgacggctatgatgagccacttcatttacgggtcggtagctgtctgatgaaccgcacgttacgggcctcggcctcgataaggcgcaaggtacgctcgcagcgtacgtggtagatcgtcatacagcgggacggtcgggttatggcttcaatgatgcccttggtgcctgccgcgtcggcacccaggtagcggtcgctgtagttcaccagccccacgcggtggccgatacggtagggatcacgcgaggacatggtacgaggttcctgcaatgtcgaagatcgggcgcccgttcgcgcagcccttgcggtattcagcgttgatccagccatacgcctggcaggtgacgtgcccggacagcgggctaccctgtaccagcagcacgtcgaatccttcagagtccaggtcccggctcaggcgatacgcttcgtcatagcggttcacagttacgccggcgcccactaccacgaacccgcctggggtcaggacgtgcgcggtattcaggtcacccatacggaagccatgggcgcacagcgccttgtcggctgcgttgaatgcgttcgacgggtccttggggattgcgatcaacagagtattcaaagcttgcatggtttagttctcgcttgtgatgagtccagcaatggccccggagtaggcgagggtcgcccgccagggccatgacttgagtcaccgcttcaggaggtggatgaagagtaccgtcaggccgctgaaccacaacatgcgcagttcatcctcgccgaggttgaggccgagttcgaggaagggaagggcgatccagaagtccatggtcactcccccttcgcctggacggcctgctcgccgtacgggaactgagccgggcggctgtactgtgccagggcgatttggcgttgcagacgttgcttgaagctcatcgtgtttctccagttgtcattgattccagcggaacgcccgcttagcaggcgttcgacttgagtcaatgggcagcagcgcgcttgctctgctcagcgataggtgcagccttggcggccagcgcttccaggtcacccagcagttccatgccgacgatcaccttgcccttggtctgagcctggagcacctgctttttgatcgtggccagggcagcagccaggttgaactcctggtccagcgctttctcaggcttgaagctgtaccacgggctgttggtggcgccgacgagatcggtcttgccgaacttgttgtacaggaagggtaggtccttgttcgatttcttgtcagtgttaacctgtaccttgccgtgcagcaccaacc

SEQ ID NO: 5 - DNA, 42717 bp, unidentified
  source 1..42717: mol_type = genomic DNA
accacaggcccggcccgccgtcactgtagcggaggcggttcagggtcctttggaagcgggtatccgtcaggccccaggctaccagttccttgacgttggccagggtgttggagttaccggctagcagcgtctcttcgaactcggacagttgccgaccggcggcgcggtcctgcttcagggcgttgagcacgttaccccggacgttctccagggtctgcatggcctgagccaccttcggactcatcgcgccaggattccgcaaggcggcgttcatcacgcccacggtggcagcgtgaaccgcctcgtggagcacggtcaccgggttggtgccaactcggccaggtgcggtgctgccgcgtacctggaccaaggtgtcgaggccctgggtggagtgaatccccgccgtacccggtttgaggaaggcagagctggcagtgtcaccgccctgcaccacacggaacgcggtacgctgccccaggccctccagggtcctgatagtatcagccaccttggcggcgatgccctggagcggcttgggcacctctgcgtgggtcttgaggtggtccaggacctcagacagcttccggcccgacaggctatgcagctcgtcgccgaaggcagtgtcacgtcgcggaatagccggtatctcagcctgctccacgcgggcactgacacgggatagcacagtgccctcgtccagcaggtctaccacgtcacctgccttgaagccgcgtgctgcggcctcctcggcggtcatggctacttctggcagcccgacagtaggcgccgatacttcgggcacatgcggttgcgttggggcctctgcggcaatgcgtcccgcaccagaccccagcagagcacccacgccagcgccaagagcaccagccatgatgtaggttccggcatccacgtcggcccctgcggcatccagcccagcaacatacccgacttgcccagcgccgccagcagcagccatgccagcgcgaccgagccgcagagcacggccagcgccgaaagtaaccgcatcaactgccagagcggcagggtccagcatgccagccgcgaagttccagtacgggttgtcccgcacgatttgctcgtcctgctcataccgttgaatcctcgacaggaggtaggccgcgtcctcggcattgccggcacgggccatgatctggagatagttgtcagtcggctggatacctgccgcctggagcgcctggaccccataggtcccagcgtcgaagttagggtccacctcgccggtactgttcgccgcaaggtctgcgtcgagctggagcgcatcgccccagcgtccgacgagggtggactggttccagagtgcggaagcacggtcaagggccggcagttcctggtccgctacgatgcgttccagttcccgcgcattggctcgttggcccgctgccacgttccgttctccgatctcgccacccgtcagggcgtcgaaccccacggtaggcaccgcgtcaagttggccctgtacttgggcctcgtcgagctgtgcttggtcaaggggatacttgggcgtcatgcggcccttgaattgctttgccatgtcttactccgctgttgcggcgctgtaccaatcgacaccgatttgactcggtgtatcgaagtggggcgccatgcgcttgatgaatgcctcggcccggttgggcgtctgcgtgtaccacttgctgtttcgcacaccagcctcgaaggcttccttgttgcgatccttgatcgcctggaaggtgttacggaactgccgggcacgtccttcgcccatctggaaggccataccggccaatcccaggatagaggcattgttcgtaacgcccagctcgtcggccaacctcacaccctggtcgagtgcgcggtcggtgtcctcggcgaaccactgcgcggcttgctcgggcgtgactgtagtgcctgccccagcattgccactgcccaggtaatgccccaggcccacactataaccatcggcatccttatacgcctcccctcggtaagcctcgaactgagccagttccttccgccagttgaacacgtcctgcttcagcatgccggcactgttgcccccgttcatgcgaatgtccgtgccactgaccttgacgttggccccgtactcggcgccccgcatagcgttcagcttgtcggagttgcgcttgagcacctcgttgcccaccgcttgtgggtccacacgggtgcggtccagggcgaccccgttctcgtcgtactcgacggccaggaggctgccactggtgcggtcgtactcgaaggcgactaccgacttgtagccgaggagtccttcgacatgcggcttgtgctgctcggccaggacggttcctatggtctcggtgtcgttggtcccgaatagctgctcggcggtggtgccgcgaggcaggatcagcggcgcgctatcgcggcggctgaataggtccccttccttcaggttccgaccttcgcctacctggatggtgcggttacgcacgttggcggcggcgatctccagcagggcctcgcggcccgtgtcgctggtgagcagacccgcatgcttgcggtcgctggccagccagttcgcctcgtcgatggtcgcccggcgatacatgctcaggacggcctcgttgttgctcaggtcgctctcgccggtcagcatgttccaggctcgaccgaagatgttgttcacgaacttgtcgttgacctgcttaccgaggttgtccttgaatgccttggtgttctggcctttctcgaactcgtccatctgcttcacgacttcggcgttggcgctaaactcgcgcagagcttgagctggtgcgatgcccatcttcatctgcttgagtgcccaggccacggcgccctgctcggcttccgggatgccggatagcatcacgttgccggcggatgggttgatctcctgggccgaggccacctgttcgaagatgctgttcagcgtgttgaccagctccgggtttgcctcgccttccttggcggcctggatcatgcgcaccgcgctgcctacggactcgccgtaggtcttggggaaggtccccaggcgcaggccgagctgtgtgccctgcacgagacggtcagtcaggcttgagccgttggcggcctgcatcttgtcccactgctccagcgcctcggtgacgttggtacccagcgtgtggagggcgttgatgtctccggcttccaaggccgccatgatgccctgcatgcgctgagcgttgcccaggccggtcatggccttggtcatgaacgagatggcctgagcgtcgctccagcggccctcctcgaccatgcctcgtgagtacgcctcaacctcggcaaggtctgtgatggcgccgttggccacccgctgctggaagtccgcgtcggcccgcagggtagccatcgattccttggcgcgggtctgagccttcgacttttcatagaggccgttgagcgcacgccgatcatcgaaggacatgctgtccaggaacccggcatcgcgcaggccctcatagatgccccgctggttcatgtccaggctggccgccaggaactgcatgcctaccttgtcgcgcacctccagcgggatatcctcggaggtcatgatgttggtatagaacaggccggcctcttccaggctgagctgccgggacagttcgtcgccggtggcctgagcctgcacagccttggccaggatgctgttaccctgggtgcggaagccacgggcggcctggtcgatggaccagtccatgtacgccttagcctgcatgccgaagagctgttcctcggccttctgctgctgcgccagcgcctgtaaggcatcgttggggttcatgccctcggtcgaatccaggacgtgcgtagcctcctgggacaggtacttgcggaactcctcgggagtcatctcccggcccttgttggcgatgaatcgctgcatcttgaggctgaagtcggcctgagcgatgcggtagtcctgcttgcgccagccgcccttcacgaatggtttggccagtacgttgctgtctactgcctcctcagcctcgccggccatacgggcacgctcaccgcgcagaacttcctgctgcacgttgtgctcgaaccatttgccagcgatctgctgaccggcacccaggatgccgtcgagaatctgcgagcctacgctcgggccgctgtagttgatctcggagtcgcgcactccgcgccgagcactctggcccggctggagttgcgtctgtccgacgttgatcccaagctcttgggaagcacgttgcgattccgccatcagttgcctcctttaggcgtggcgccgaacttgaagtattgacttgcgtacagggaacccgccgacatcaggccggccaccagcggggaccgttgccccgccgtggtactcttctgccccagcaggccggccttcgcctgagcctggatggagtgcgcctgctcggcgaggttccacatctggttgtccaggttgtcgtcaatctggatcagggcctccccgacctcgcgctcgatgtccagggccaccgcatccacggatgcacccttgacgccgaacgcgccggcctgagcctcggcactgccgccggcgagcatcccctggcgcttggcctccacctgcgaggccacggcctgcttgcggtagctagcggccatgacgcccaggttggcgatgtcgcgggcagcggcgcccaggttgtcgaggtccgccttcagtcgagccttgttctcagccttgatcttcttgcgctcttccttgttggccataccctgctgaagggctgacatgccgccagcggccaatagtggtagccagaaagccatcacaccctccggtagatttggttggacttgaagttgtactcgacagcccggacgttcatgtcgtacggactatggcagctcagctcgaacttggacgtggccatatcgacccgtgccggcagcggcaccacagcgctatccaccagaggctccccggcattgagttgccggctgaacaaccgaaggggcgtcgtgtcgtaccacggctggttgggtcgagccgtgtcgctgatgcgccacaggaactcgccagtccatccgaagttcacgctgtaccggtggagcactgcgcgggtcgcggtcatgggcagcccgttgtggtcccgtagcaccggcggagtgaactccaccttggaccagaactcacagccgaccacgtacacggcaccgactacggcctcgggcacgtcgaggaacaccttcgtattcgtctcgcgcttcacgccgaggtgggtacgttccatgtaggcaccggccacgggctggagctggtatacggcagaggcatccttgatcaggtcccaatgctgcttggtcagctccagctcaccatcgacggtcgcctcgatacgccgccagtaatcgtacttcggatattgcagaccctcgcgggctggcaggctgttcaggtgcatccggcccagggcgatctcctggcccttctggatcaggaccatcaggttgtcgccggtgaagtacgcgccgatgatctgatgccgcagcgtccatcggtggaaggcgttctggactttctcgttgccctgccagaggtactggtggcagatcatctcgtccgccgtgctggtgccgaacaccaggtagccgctggaggccgccgcctggatgtactcagccggccccggcatgtagctcgggatgtggctggtaacgtcctcggcgacgtagtggctgtccgtggacggcgacggggccatctcatgcaggcccatgaaacccagggcacgctccgcagcgaagtacacactgcggccagtcacggcaggtgccgccctggtatcgaggtcgtactgcgtggtgatgctgataaccgccgtacggggagttacaatgccgccaccggggaccacggcctggtacttcttggcgaagacgatcaagtccttgttgaaggtgaccgcgtgctcgtacggttcagtcaggctcccctgggccgcgatctcgataggatcatcgtcgttcagcgcggctgccgacttcttgaaccagcggtgcggattgttactggccgacatgcagacgtactcctgcgacaggagaacgaggcgaccctggaaggtcgtcatgccggtgatgcctcgggtgacgaagttgaacgtggggttcgtatcctcgtcgccggagccacgtcgatcatactccaactcgttcaagctgtaggtgtcggtagcctcatcccagcgcagggccagtggcatcttcttcaggacccaatcggtgccgtaggcggcccgctctgcccagcggcggttagcggaatcccactcgaagtataccggggccttggtggagccggtggccatgacagcgccgtccatgaactgcacccccacaccaggggcgccaactcccggcagcaaggccggcaggtccgccgtagcattgaggctcataccacctgacgcgatgccgtagttgttgcccatatccgtggacacctcgaccacgatgtcgccgtcgccccggaaggcgatgtagccgtcctgcacgccccgctggttgagatagccggctaccgtagccgcagccgggtcagggtcaaccttcgggtacttcttcgtggagttgggcagggcgtactccggggcgccgaagaacttgccgtagagttgccaagcgatgtagcccacgctcgtttggaacggtgcctcagcgaggttggggttcgtgctggcgttgtccggtgtcacgtaggtggccgtgtgactgtaggtggtgcccgtggcgttgtccttgaccttgatggtcagggagaatgccttcgaatactggcctgccttgacgtacagccagccggccttgttggggtctacgcccttgatgtcggtgcggtcggcctcgggcttcacgctcaggttggcgatgaacaggtcatcggccaccgtggcggcccgtagctgcctgtaatcgttggccttgaggtagtcatgcaccaggggctgacccatcagcaggcgaccgtcccgctcgtcgaacaggtacagctcaccacggtgctgcgccaccagcatcgcaatgctgcggccaccgaggttcgtgtggtagaggaacggcctcggccagggctggtcggtatgcaggtgggccatcagctcgataccgctgcgccgccgaagtcctgacacgggatcggataccatgttgatctgctcgctgagctggcccggcaggcgctcgaagggcacctgctggctcacacccatcagcagattgggatacgcggattgcttgtagctcatgctcaggtcctcaagctgcgccgccaccggctgaagctacgcttggcctgggtgttcagcggacgtgatcgggtgtgcatgcgggacagttcgttctgatacgcctgcaattcctgggcgatgacctgggcggtctcgtccggtccaatctcgtgggtgtataccgcgagcgcagcctggtgcgcaatgacgcgctgtgcgatctccgggatacggtcccactcccgagacagcaccaatcggccctcgaccgacttaccgatgcggtcgtcgccggtgttggcatctcgcactcccaggccgtcccactggaggtccggggaatccgggtagaatgccaaggtgcccttgggcaggttgatgcggcccgtgggatcaggtgtcagcttgtgcttccaccaggtgttgaaccaccagccttgggtcagcaactggatgcgttgatcttccagctccgggagggcgatggccatggttggatacgtctcatccatgctcgggatcggcagctcgccgatcttgcgcaggatgacattcactgcgtcgagtagtagcatagggtttctcctaaagcgcaaaaacccacgcagggaatctgcgcgggtcgttaggctttgaagaaaccccacaccgaagtgcggggtttcgtggcatcacgcggtgatgtcgaaggcgccgatacccttcagttcgatggcaccagcggtgtccggacgacgggcaccgatgttgtacatctggaaggtatccaggacccacgagaatttctcgttgtcttcccacagcttggcctggaccggcgccacttgggcggtgatcagggtcttgctcgggaggaacagggcgatctggcgctcggactcctcggcgctcacgttgaagtgacggcccagcgggtgggctgcgattgccttggtggcgaagcgcggagtctccagcaccttgacgccgttgaggatggccacgcgggacttcacgtagtcgttggtcgcgccggttgcctggtactcgacgttcatcagcttgtcgtgctccagcagcaggctgaacacacgcggcgacatcggggtcaggccctcggagtagaccgcatcgcccaggtcgcggtcgatgaaggtctcgactacgcggcggtgcatgcggacgatcttgtcggcagcctgcttggcggtcaggccggtcaggtccagtttctccagcacgcccggcgagaacgcatcttccaggtccaccggcgcgtccatcgcggcagccttgatcacctggatcaggcaggcttggtcgaacttgcgagccagttcctggccgtccagctcggcgacttccttgcgcatgtcgaaggattgggtccactcgtcctggtggtcgaactggtggcggaggtacagcagggtgtcgacggtcaggttccacttgtcgttcacgactcggctgcgctccagctcttcaccggcgcggcggcccttggcctcgacgttacccaggcgatccaggcggaccacgttcgagccacgcaggtcgcggatgttcatcagcggtgcgaacttggaggtgtaggcgaagtgcttatcgacgatgccgaggtgctcttccaggtggatgtcaacgtccgcgttcttgccagcgtagttcggacgggtcaggtcgttcaaaaagctcatacgatgctctctcttttggatgtgggtttaaggccggagtagggcagggtcgttagataccctgcgccatgcctgccttacgacgctcgcgcagcgcagccatctcggcttcggatgcgttcagcggcagcttagatacttccaagcggtactgctcagcgctcagagctgccagtgcaggtgccgcagcacccaggggttggccggtagcctgtaccacggcacccgagccttgtgcgaaggccacaatttgcttcgctgcgtactgcatggcctgggcatcgcccgagtccatcagccgaccgatggcggccttggtggccgggtcagcgtgttggttgaagacgccggcagcctgcttcaggatggcctcaccgccgacggcggcataggtctggctcaggacggctttggtctgcgcatcaacataggtcaggacgcccttggccacgttgatgacgtgctgcgcctgggccgggccgagaacttccttcagatagtgctcgtcgatgaaccgaggatcgcggttctcggcggccttgccgaaggctcggacggtatccagtttgtcagagaacgcctccagatagctgatggagggcgccaactgcgggtcgccttcgaggttccctgccaaggtgcccacgatctccccgttgggagtgaaggccggcggcggcgggacttccaggttctcgggaagaactgcacccgcagccggcggagctaccggggccggctgagcgggtgcttgcggaacaacgggttgacccacggcaggtgccgctaccggctggtagtgcggcgtcatggcgctggtcggaacgggttgcggctgctgagtcgggatggccagttgctgcggcgcacctacctggccgggctggaccggagcctgcggctggatcaccgggttcggcatcacctgcacatgactcggtgtcggcgcggcggcgggcggtacgttggcaaccaggttagcgaggcccggcggcagttgctgttcgttcggttgggacatctatcagactcctgcgagtgcgttggtcatgtcggaagcgccttccagcaaggtctcttgcgcggcctgggcctgcgcggcctgctgacgctgctgctctgcctcggcctgtagctcgtcggcgctcttgtagaactgcgacgtgtctacgctgaaggctgcccaaatcgtgtccatcatcttcggtagcgagatgcggggatcgagctgagcaatcggggccaggccagcgatgacctgggaagcgttgagcatgctctgcacagcggcggagcgggacagggccgggaggcccgtctcgatagccggtttgtgctgcttggtgatcaagccttggagtagcgcatcatccacctcggagaggcagacgtaggccaggggcgactgaaggttctcggccaggagcgagtaagtaccgcccagtgtgttctctgcctcttccgcagtgatgcgtacttcctcggcagtgacgcgctcggcgtcgcgctggttggcaccatacatgaacgcctggttcaagcgaacgactacggcttgcaagctctgctggatagcagccatcttgttgtagtcgccacgctcgtaagcacggacggcttccgcgccacctggcacgtagtcacccatctcggcgtcttggtagtcatcgactaccgcacccttggcctcgtccacgaggttcaggacctccagcgactccagctcgtacaggccgagtttctcgctcagcagggacagcttggcgaagtcgccgatgtagtcctcgacgtggccgcgaccgtagtgctcgccaggggcgaggttccaggtcggcacgatgtacgggcacaggtggataggccagcggccctccttgcccacacgcacgccgtcgatctcgtggtacagctcggcgtattccatcgccgtgcccctcttgcgctgtacgtgggtgtacaggtccacgctacctgaaccggacaggttgcgtcctgcgcgcatcaggtcctgcttgtactcttcatccaggtccttggacttgtagcgctgctttaggacgatatccatccagcggccagtcgcatcccggcgcaccgcataggagcggagcgaccatgcgaccaccgtagcggcggcgctgtctcggtacagcagagcattgccagtcacgatcagtagcttgatcacctgcgtcaggaccgccagggaggcgttctggaacaggcgctgtgttgctttgcgatccacccgagccaaggcagcggtcacttcggtaatgtctgtgtcccggctgtcggcctcgcggcggatcgcatcagtgagttcggatcggaagaacggaatccccgtggggaacagcgatctcgccagcttggcggcgaggttgttcaccaggagggcaccggcggactggaagtcatgctctacgactccccggctgccggacatgggatcgaccatcaggtagggaagcgtggtcttggcgaactcgatggctcgactctccacgctcccatcccgaagtttctcccacagcatagctgcggtggttttcatggcgtacctcgtcagtagttgataccgagggtttgcgatacgcctgtgcccgcctgattccggcgccgtcgcgtgccggtgccagtggcatcggccatcgctcctaggtcaacctgcgccacgttctcggcggtgaggtcaacctgctggtttcgtgcgagctggtccgcctgctgttgcattaggcggttctgctcttccatcttgcgggcatcggattgtgcgccgctcaggtcggtgcccagcaggccatcagcgagtttgccgatgatggtcttgcccagcaccttctttactttcttgcccataaggcttggctctccggtagtggatcgtgtaccggctatcgctttcacgatggctccagcacacgagggggatttgaccccagccggcctgacggtggagttcgcggatgaactcccggaccacgcctgtattgcggtagcgcggtaggacgtactgccactgtgctgtgacgcacgggccgacgtggggatcgtcctcgaacacaatgcaggcaccgccggccaactggccatcgcggaataccaacagctcggttcgatcgttgccctcgatactgtccagcatcgcattcagggcgtcgtctttcgagcggaagagggtgaattcttccaactcctgtattgccagccagcacagcccctggagttccgagggagtgccggcctttgcgtggactcgccagatggacttgttcatcacttcaactccactgcgatggcatcgcgtcggcgcaggcgtactgctcgcaccacgtctcgcctaccggcctggaactggatgtcttccatcgtggttccaggaccgatctgatgttcggggaaggtctgctctaaccactcgatctgctgagaggtgaacgtgacaggacgggccgtacccttgcctgttctcgatccttccactgtgggtgacataaccataggtcggtgggtcttcatagtagccatctatcatatctcctatgctggttagtctattctatctagaatccttcgtagtcatctagtctcatcttctactctacctctactcttcttctaccctctggtcttccctgacctctttctccctgctcccctctacgagggccttggacggatgcacttgctcctatgtgggtgacataatcccctcagcagaagaacgcccaggagtcccgtacagcctccagattcaacgatcctctccggggcggggtagcctctatcccgagctgttttgccagttctacgagcacacaggggccgctgtacatggcgatgaactgctccctgatgtggacgtgcatccgatccacgtctgccgcataggtgcccatgctgtcgtggatggcctggatcgggataccctctgccgcacaggccagggccgtcaggcccaggtggctgctgtccagcccgtggacgaagttcggagcgatgccgttggcgttgcgtaccgggtccagctcgtccttggcctcgtacagggtgacgtactcgacagcctctgcccgcagcctcacccgcacctcctcggtcttcgggtacgactggaacacctgcatgccgagtggcgtgatccagtgcaaatccttggatgcatcaggaagggccttagcgagccgctggagccattccatggcgaagactgccgatggtactgtctcgcgtattgcgtccagtatgagcgttgccatgtagcttcccaggcggtatgacgggataccctcgggaatctccaggccggactcgtccaggtagtccaggcagtggtctaccacgcccttgaacgtggtgccgtataccagcgtcatgcagggcttcttcgtcaggcttcgggatagaccagccttatcccacaatacagcgtagccccgagcctcgccttcagcactttctctgtctcgtgccagagactctgcaacgagaccgagaactcgggagtagatgtcagctttggcaagtccaggtggcagcaggttgacgtaggctccgccgatctcgtctcggagaatggctgagtagtgctggaggccggagcaggttgcatccatgtggacgatgaacccacttcggtaagcctccggctggcctgatgcgtaggccgcccgcagctccagcagacctgcgatggcgcacaggggcgactcgtcttccgggaagagactcggatagttctccggaccttcgttgagtgctcgctggaagtcgtcccatcgctcatcgacccaggctgcccggtcgtcgaagtacaccttgtcacatccgagggagttggcgacgtggactttgagccagtacaggccgcgcttaccgagggcacgcttttcgtggaatcgcagacacgccttggcgatgtcggacccctggggattcggtgtgccccaatagtacatgcggccacgggagtcaacgtgcatcgggaagtacactgccttgccatgatgctctcgaacaactcggtagagtgcagcaaattcgcgaagcttggcggtatgctctcgctccccggtgtaccaccggtggacggagcgtttccaacggttgaaggcctccagctcttgctcactggcattctccttggcccactcgtcgccgagcgggaactcaggtttgtccgggtaggtgcgctgggggatgcccagcacgccgccaccggaggtgaagacgcgctcgatgatctcgtacacgtcgtggttgatctcgtaggccaccgattgcagcgcgttgaccgcctcgtacaccttgggcatcttgtcccggcccaggtggcgtagctgcatctggcgcgcccgcttggtctggtgcttggtacggcgcactagcacatggtgcttctgcgccttagcgctgtagtaaccgccatcgcaccagtcgttccacggtcgcggcggtgccagcatcacgctacggcctgggcctccccaggtcatcgccgccgaagggtcttgcaggaactccttggcttccggcgacggctccaggtggacgctcgtaccgccccgacctgtgaagcggttcggctcgaacaggccgcactgtatcagcggatcaccaatgaacttgccgaggcgcaggtagtcgccatccggcaggtcgatacgtgcctcttccggcagtaccgcgtccagaagagcgtccatcgtcttctggatgtgccggacgctgcgagtcctgctggtcttgaggtagtccagcgtccggtcgtaatagggttggttgaccttgaaggccaaccgcacttcgatctcgcgacagagcatcttacccatgtgggtgtaatacttcgtcgctgtgatcgttggatagttgatgagcatcgacagcccggcccgcagtgccatgactgcgaggtcctgggcgtcgatgatccgcagcaggtgccgcagctttgctgccggccccgccgccttcgcttcctggtgggcgaagatcgcttcggtcacgatggggagcatccgcatcaacatgatgcgcgccctcgggatgcggtcgatggacccttgggcaatcgccttttccaaggcaatgcgggcgtcattctgcgccgccccgaccagggcctcttcgtgggcgatctgctgctgtatcaggtccattccgtctcctatcgtctttcgattacgcgcccgatatcctcgggaccccactcggcctcggccaggctaaccgccccatccagcgtcatcgctcggtagtcacgccattccccgcagctcagaatctcagcgcggaaccagcgcagttccaccagcttcacttcccgctccaggcgctccgccatctcccggagaatgtccgggagtatgacatcgctccagtcctgatggctgaccatcgccggcgtgatgtacgctgtgacgtagttgaccccgatgccccgctcgttgaaggcccagatgacccgaacaccttcatcggtctcgtgctgtcgggtacaccaacagattttactcattacctttctcccggtccatcagggcccgctcggcggcggccattgcgttgaatgcctcatgcaccaggtgcatcaggttggactcgtcatccagcggtccgtcgatcagccgcttggactcgtgccggtgttgggcggacttgaactcgcccaccgtcatcttcttccagtcgtgcggcagataccccttgacctcggcagcccattgcatcattcgagcaagctcccgcttcagcagcgggaacccctcgactaccaggtgcatgggaagcttaccgaccttgcgttcttccagactcgcacctttgcggtacggttcagtcgtgatcgtcgactcgtaagagtccgggaatgctaggctcatgctacctccttagttgctcagcagggctttgcgctgttccgaggtgttgcgggtgtaccgcccccggctccagccaccacagccgccgcagtgatagtgctcgtacttgccggtctgcgtatgcacccagccctcttgcttgacatccgtgtcgccgcacttcgggcagcggatggtcggctcggcgtcattgaagtacacggccacgttgggatggccgacgaaccacgggcgcatcagggtgtacagctcctccatcgatcgtacgtcgtcgatgttgtacaggcgcatctcctcccaggcttccgggttgtcctggaggcaggctgcccacaggtcgaatccggggaacttgccgtggaggcgcttcttgatggtgcatgccttgtgggtcatgtactccagcttgcggctggtgaacgcgaattgctgcttggcgatgatcaaggtgtcgatcaccttgaacggtctcggcggcggcatcttgttcaggaagaaccgggcgttgatcttgggcacgtcgaagcgcttgccgttctggacgatgatgatgtcggcctcgtccagcagcttatgcagggcgaccagcaggtgcatgtcgtccagggggtcaccctggcagtccatgtagatcacctcgtcgctgtgcatccacttcgcacagaacgacaggatggtccagtcccgcttgatctggttgaggcccacgttctgcttccagagcgaccagacccagccctcgataggcgaggtctcgatgtccaggctcagcaccttcggaccctggcctaccacgttgcccacggcgccagggaacttgcgcactacctcggcagccttgcggcccagccagtgcatcgcgcccttcttggcgtacatgccgcgcgtcctgctgtcgtggaagcccagcttgatgcaccagttgcggaagcactggcggctcacctcgccgaagcgcgaatgctcggtcaggtgctcggcacccttcttgaggcccagctcgacatagacgtttcgcaggtactcattggtgaattgcttgcggagtttgctcatacgttcctcgcgttgtgctttgcgacggccatcgccgccttgcgtttggcggctgcctgccggcgcttggccagcttcgcttcgtgtttctcctcgtcggtcttgtgcagggggtagatcagcggatgcttcggcccctccagatacgtcaggagggcacgaaggtaggggatgatgtcggaatacttcatcgacttgcatccccaggaacctgccgcattcgttatcttgccttctgcggtgttacaggaccggtgcaggacgccccgcaccagccccgtttcgtggtcgtggtccatcaccgcttcgcccttcacgctgatatcgatgggcttgccgcagagcgggcacagcttgttctgctcggcccatagcttcagggtgaaggtgcgctgttgactgcgcggtatctggtagaccttcggctcactcgtcataatcgctctccctccgcttctggagcagcgcctcgtggtaggcgtccagctcgatgatccactggcggaaggccggacgaaggtcgcggcttaacagatactgcgctgcgttgtcggtaggcgttcggcgcatccacagcacctcggcctctgccagcgggttttgcttgatcttggcgtacgcctccaggatcatgtcgatggcctcgtcctcatccgtgatcggatggaggatgtcgaaggccgtcttcataccgcagagcttaccgttgaatcgatcgatccctcggatgttgtcagcggtgtcgccgccgagccactgcgccaagaagaacttccgtccatggcccttgagcttgaactggccggaaggcgtgtacgcttccttgaggtagccgaatccgccctcgatcctgctcacacacgccgtatcgatctcccaatacgggtagatcgtcatccgcaggtctttgtcgtcggaccggatgatggccttgtcctgcatggcgtaggcgtccatcatcatgccgtcgtccgcctcgaagaacgtgtgcaggatgacatcgatcccctccggcgccccgcctcgctcatgcacgtccgccacggcccgccgcagtggctccagcagcgcgggctttgccttgcccttgcgctggccctggtacggtttcatggtcggatacgtgtcgcggtacgccttcgccccacctgctgccgtgaggtgaacccgtgtccctgtgcagtgcgctaggaactgctgctccaaaatgagcttccagaatcttcggagtgcagtgtccagggtcttagcagtggccgcagccacataggcgggtccgtcggcgtcacacaccaacgtcccgcctgccatgctgcggtcgaactgcgcggatagtcctgccaggaactcttccgatggcaggcgcattagacctgcggtactgccggcactaccgggaccgccgggacttcgaccgctgccggagccgccgtctgagccacctggggcacgtcaggcagcacgttctgtgcctcggcagtacctaccacaggggcggccacattcgccacctggggcacgctgggggccgtctgagccactgcctggggaacagccgggacagccggtgctgccgctacgccggcgtcggcggccacgttgggcactgccggcaggttgctgcctgcggcctgggtcgtcggcttgatgatcagatcatcgccgccgcccaacatgatgtgcagggccgagccggggaagttggtggccgagcgaatggtctcttgcaggaagttcttggacttgccgttgtccgaggtgccttcgatgaacagggcgtcccaggtctccttggtcggcgcgtcgaagaagaaatactgcaacaggtccatcggcagttccggcacgttatacgggctgccatcgaccgggttatagggcttcatgatgccgccccaatcgatgtcgttgcgttccttaccggcgttgttgcccttggtgatcttggtgcgcttgatcgggatgatgaacgcctggccgagcatctgagcgaagtgggtatgctgcccgctccagttcatcttgtcgaaggccagcttggtcttggacttttcgttgttgccgagggtcatctcgaaggtacggaacaggccgggcttgatcgagccgtcggcctcgtaggtgtggaacaggtcgtccgggcggctctgcgggttaccggcctgcgggttcacgtcgccccacaatgcgaagcccaggcggatttgaggcgccggattcttgagcttgccctggaattccttggcgtggtcacccagctcgatgtagatgcagaagcggcccatggcggtgcccgccgggaagatgcgaccgccgccaccgccggtggaggtttcggacatgtcgatggttgcggtctcggcagccttgttggccagggcgagggcggcttgcagagcgttgagttgttgagtcatgcgtggtctctctcgtgtcgaatgaagatttaaggccggagtaggctagggtcggcctagtcccggatcacgtccatgttgaacatgttgggtcccatctcggccaccgccgggaagggaacgtccgcgatgtcgtagcccaatcgctcgctcatgtagcgggcagcgtcggccatgatgtcgcgcacgccacggttgacctcggcggcggtgtccttgtggcagtcggtgtacacggcatcgtgtacgttgttgatcaggaactcggtgaccataaatcctgggcgatgcagcatccaacggaagatgcgccctacgctcacggtcatcatgaacccagcctcgccctggttccagtagttggcgatctgcgtgtccttgaagtccatgaccgtcttgcgctgttccttgtcccagcgctcctgttggcggaagctgtagcaggtgccaccaggcgcttgccagaatccccggcggtactggcgccagttgccatccggccccatctcgctgaaggcgcctgccggcatctggtcctcggccttgtacattacgaggctggtggcctctgcactgtcgcggacgatctgccggaatgcgatggactctgggaacagggccgcctcgttgtccaggaattcctgggcctcttccacggtacagccggtgttgaatgcgataccagccgcactcgcgccgtactgcgccgagaatgccttgggcttgatgttctttcgagcctgcatcatgcgaccgtgccacgggtggttggggtccttcttgatggccacgagctggtcgtagtcgaacccgttccagttgttgtgcttccctgccaggcggtacaagtgcatgtcagtgccggccatcagtttcgccaggaggttccgatccttcgacagggccgccaacatcaccacctccagggcggtatagtcggtctcgccgatcatcccgtccgcgccgaagcgagacacgaacatctccttcacgcggctgccggcttccgggtcgtcctcgtccttcgacgggagctgctggaggttcgggcggctggacgacagacgcgttgtcgccgtcgccgtcgtattcagcgaatggtggatgatgccgtcgtcgtccacgtactggagcatccccttcgtgtccttaatcgtcccatccttgttgtaggtgtgggtgatgtagaacgaggagttgtccttgtgcagctcggccaggcgcatcaacagcttggccgcctcgaagccctgtttctccagagccttgagggcgtcgccgctggtgctgaacacgggcgacccatccgccagggtgagggcgcactggaactccgggcgtttgcccaggaatttctcacgcactacttccggaaggttggtcaggttgatcaggccggggaaccggaatcgctggtcatcatcccacttggtcgccgggatgtccgtatcctcccggaacaccttgacgctgcccttgttcttgccagcggagaacgtgatgaccgggccgtgcttggtcgccagctcggtgatggtgggccagtgccactcaccctggtcggtcacttcatggatcgggacccgaactgaggtactctcgattggagtcccccgcttggccgtaccgaagcgcacgaagtcggctttctccatccggccatcttcgtatggcacccggcccttgtaccgcacctcgccaccgtagagccatgcgctcatatggtagaggctggtatacttgaactcgaagtattccgggaagtcgggcatcagcttcttcagctcggcctcgatcccggccacctcttccagttgcttggcgtggttcaccttggcgacttcgaggtccaccttcaggccggcacactccatcgccgagaaaccgatcagggcctcgcagcgctccaggtagccagcccacatgccacgggcctgaagcttcatcagctggccgtagaacacgagggcggtattctcgatgtcgccgcacgggccggacaggtactcgctcagcaggtcctggtccatctccgaggtgagcacaccctggtcccacagcatcttgatgccgtccaccttgtgggtgccgccgtacttcggagccagctcgtcgagtgccgggtacagccacgtctgatgactcagcagatactcggcttgctgggtacaccagacccggccaccgcgtcgcaagaaggccaggtactcgtcccggtagcgggtgaagaaccagttcgattcgaacatggcattgtgagctacgatcacgtccacgccgtcgaggttgaaccagcggttgttcgggtcttcggcttcggcccggctgcggaagcgatgttccaccttctggccgaccttgccgtcaacatcgtcccgccagccggccatgacgatgtagttgcgggggtcaaagggcgacgccttgcgccccttgtgctcgtagctctcggtttcgaggtcgaggattcggatagtcgtcatttgctgtaccagttgctttgactgtactgctgcgccttgaccagtagaccttccagcacacggcggggaatctcctgcatcaggtagcggaccattccttcacgtccccatatggtcagttggtacagggagaccgcgtggcagaatcccatacggcccagcttcgcatggtcgtagtcaattcgaatcgacagctcttccgcttgcgggtccatatgggccttggtgcggaggccggggaacagcaggtccaggggttcgtggatatccgccagcaagcagcggatcatgcgttcttcctcggtgggcattctcatactttgactcctacctgtcgcagattgcgacgcagacgtcgcatgacccggtgcaacttacggcgaccggcgccgagggattggatgtcccgcgcatgatgccgaacttcggacccaacgtggtcccaagtccctgccatgacgcagatgcggaatgttccgtcctggctgatgaacacggaacccatgacgtacttcggatacagcagcgaatcccggttggtggcgtggtataccatatcttccgggtagttgcggttatgggactttcgaatcttcataccttcactccagggttactggccaggtcgcggaagcgactgaagctgggatggcggagggtgttggctgagcgttccatcgcggagacctcggcgatgcgtccatagttcggcatggcctcgtcgatgcagccgttgaggtgggcgcaggtcaggagctggatgtgctcctcactcaggccggtggcgccaacggtgccggaaccatcttccagctccacacggtagcccacgacgcggcccacgttcttgccagtcttgcccatcacgtacccgacgatacgcccgtccacggtgatctccggcttgcgcttgtagcagccagcaaccttgccgttgcggtaggtcaggctcgggtctttctccatcgacccctcgaagcccatggcgcggtggtagccgtaccagcgtagtaccgcctccatagaacggcaggattgtgcggctacctggaagaagtacggggtgtcgccccgccggcaatcttccatgaggctgcggaccatggcgcggcgctcatcgtatatgaggtgggacttgcgcgatttgcggagcacgccgatatgggtggcgtcgaataccgcgaagtgcaggcacttcagctcggcctcggtcagcggggtcttgcgggccatgcgcccggtcgcctcactgaagggcatgccttccaggtacatctcacagtccaacaccagaccggagtccaggccgggctgggacagtttcgcgatgatgcgatcctccaggccgtccagggcagggaagcggcggccgctgcgggataccacgccgtgcgcacccacgatggcacggcacccgtcgatcttaggctcgacgatcacgtacccgtgcttcttgatgatggcctcgacggccttgtcgttctgatctacgccgcgccagatgcctttctcgatatccaataccacgtcgcgcttgctcatcacacgttctcccatccgtagtacgcggccttggcccgcatcttttcgcatcgctccggcagtcgcgagccggaaccaacttccttgttcacgccccaggtaacgtccttgtgcaggtacacacccagtcgcgggccgccctcggggtccggccagttgtacgcgatgcccacttggttgatggtgaagtcgaacgactccatcacccgaccgaggctgtcggcatcgtagtagttgaagtccacgtccatgccttccaggccacggcagcccaccagggatatcacgcccttgaagataccgccctcacctgcgtcggcgtactcggtactccagccaccgtcccggacgaagcgcgggtccagggtaggaagcacgctgttgatgagcacttcagcctgatactgcgtcatgccgtacagggcgatgtccacgtcctttggagtggcgccatgcatgaggtcgcgagggaacccaccggccagggcgacgccctcgttgggccgtgcatcagagtacaggcgcagcaacagggccttgaccccggtcggcagtgcaatggaacccagtggaatttctttggtgccttcgagcacccggctatgcttagcttgcatggtctacactctcaaagaaacgacaccgtgcggcgtcgaagttaatcatagcctccacgttcgaaggcttcccgtccatctggaacttgttcttcggcagggacaggccgcgcatgacctgttgatccgcaccgttgagacggcccaggtggatttgcacgtccacagcaccctgtaccgccgtcttcgaatccttgaggcaggactgcggtgggaacaactggtcgtgaccgtcgttgctgatctgccacgtcatgaagctgatgaagtcgtgacgcaccgccatctcgcggacctcggccaccttgtactccatctcgtcggtgcggttctggtccttgcgctggccacctttgacgtgggccatcatgtcccaaaacaccaccgccggcttcatcgcgtcaatgacctgctcggcctgggccagggacccaccgtggaagtccttgatgcggatcagctcagagtcgccgccgattttctcggcgtacatcctgcgaacctcctccgggtccagggcaagaatctcgcccacggtcatgcccagggctgccgagtacaggcgcggcttgatccgccggcccttgccctcgttgttcagccacaggatgggccgcccagggtcgaagtaccgcttgagctgcggcgcgatatggacagcgatccaggccatgaacgaggtcttgcccgcatcaggcggcgctgccaccagcaccgaggccccggcgtggaggcccttcatgtacgccggaagcaccagccccggcagcttgatgccgtggtcaccctgctcctccgccaggatatcaaacacgtcgtccgtcacatagtcggtcggcgtactgaccccctcgcggcgcagggcctcgtcgctcagccggcgcagctcatacgccaggtcgatgtcttcgccctggttgtactgcgccaggagggcatccaccctgcctgaaaaatccagttcgttgagctgggacacaacgccctgtagcgagtccgggtctaccggcttgtccagttggttgacgaggttcaggaccaccgccagttgctccggctggtagccacctcgcagctttatcagttcgcgtagcgcctgcgggtctaccttctgatgcgctgggtagaccttccagtattgctcgatccagtcgatgacaaagcacgtctccggccccatcatcccttcaggcaccacactccgcaacgtgcggaagcggtccttgtcactcagtgcgtgtagcgtcaatacgtccaattactaggctccttatctgctcgcgggtcaggtccttgggatcgaacccgtccggcgtgggtattacttggccttcgataagcagggaccggagccggcgcatcacgcctgcactaccacggacacctgccgggtcgccatccaagaagatgaaggcgcgcttgcaggtctgctgcaacatgatcgccgccagcctgtcgcgcagccttgtaccgttcagaccgacagcaaagacttcgggacaggcccaccgcaccttcagcgccgacaagtagtcttccgtcagcacccatggcctgcccattgataattcctggggccatccatggtaatccggggcaggatacccgtagcccacccacttgggattttggtcggcagtagcgcgcccaatccagcccgcgttggtagggaagataagccgatgctgcctttcgctgtacagcagcggcagccctggcgtcatcacgttgtagtcgatacccttggacagcagcaaaccataaagcgattgatagcagtcggcttgcgtccagtccgaggcatcctcgggccagggcatgaagcgttcttgatccgcgcattgtaccctccgcacatgcgttttctcgaccacaccaccctcctgacaggagtagcagtaagccacccagcggtcaggcaggttcttgcaggtcatgttggtcccgccccggctcatgctcttgcatcccaggacgtgtcggaaccggcctacctgcccaaccgccagggattgcgcttgctttagccaggagtcgcggcgcagtgccattggtaccattcctcccacaaaggccgcagcccacctcgggcctcgaacatgtcctggaggtgccaggtcatgcgggcgccgtaggcgggccgccgttgttctgtgtgagcagcacgcccagggccaccagactgaaggcgactccgatgaccagcggtttgttctcgataagccatgtcatcacctcatacgtcatggccgggtgccctcatgtgcaacacgtccggctctcctgctgtccagttcgcctcgcggtgggtggtgctccagcccaagtcggcgtagaacggctccaggaactcgaagcaggtcagatactcggcacccgccagctcggcggcccgcaccagctcagcgccgataccctgcctgctgtgtcggtcatcaacgcacagggccttcagttcaccgcccactacgaggcaggaacctaccatcagacctgacaggtcgaaggcaccgagggccagcacgcctcccttcttgcgccagatgtcgctatcttgccagccactccggcggaggtggagcacacactcggcgatactcgcactcagctccccggctggactcaggctttcccggagcgggtggtacttccgctgccagaggaaccactgccaccagttctcggcgttgctcggggcttggatgctgaatacgtggatcgtcctgatttgaatcaggccgggatgcaggctcagcggatacaggctcgtcttgctcatcttcgatctccctcaacttgcgctggccgaagtcaatcaggtcctgcgccatgtaatgcacaaggctgccggcacacgccgccaccttgtcccaggttgcccgcttaccgtcgatgcacgggaagacagcctcgtcctccagctcgacgccgaagcggtatccgttgtaatgcgtgaaatggtattgcatgttcgtgatcctccagactcacacgagagggcgctctaggaacgccctcggatttgaccccggagtaggccctggtcgcttagacgagcaggtacgtcagcacgctacccacgacgccgccggcgatggtggctgcgaaggttgctgcctgccaggtgtccttagccgccgccttcgcccgctcacgggcctcggcctcagccttcgccacggaagcgcggaaggtataccgcacgccggtcagcttgctgatgagctgacagacggccttggtcggggccaccgtcagcaatcgctgagtctccgcgccgtcccaatacaggccggcccgttgacctacctccaccagccgggtcaaaccctgcttgaggccgaacagttcagcgcccatctcgttattccggtccgcaagcttccgtacccggctgcgcagcggtccgtccatttctattccggcatcgcgcagggcacggtttaccgccagcttggttacgtgcagatcgtgtagacgtacctcgaagtccttggcggacagcgggccggccttcttcgataccagcgggaataccttgagcagcagtttttcgtactcatcggcgcgcttcgcgtcggcctggcacaagctggccgctacccgcgcctctagatcggcatagccacaggtgctgacgcgctccacgttatccaggcgcacctccaccttaccaccgtcacaggtgacgccgctcacacgggcggtgtaagtcccgcccgaagcctgtttcttgggcgtataggcgtgggcgaatgcccggctcttggccacccggcgcatctccggggataccttggcacacggcacgccgaacatgctggccgccagcttggtgaagtgatcgttgcattccattgtcagactcctgccagtttcagggttacggccagacctgcggtcagcaggcatacccaggccatgatggttgccttgcgagcgcggcgctcttgtgcctcgtgggcatcgtgcgctgcgttcaagtcgttctggagcagacggatcgtcgcctgatggctgcgaatctcgtcgatctcccagcggcgcgcccgctcggcggcctggaggcggcggctcagggtgtcgatatcctgggcgcgctcctcgcatacagccagggcggattccaggcgatcttccagggcctggatggcgggtgccttctgtacgctcacgctgcgtaccgggccgctgatgtgctcggggttgtgcttgctcacgttgactcctcctatggtatggctagctcgcaataggcccggcagggccaggcctattacgtgcgggccttactcgccttgggcgatggcttcgtccagggtctcggcggacgctgccggggcctgcactgcgcggatggcaccggccttcacgtccagcagcttggccggggcgctgtcgctgaagcgcaccagtacctgatagacgccggcgactacgctgatgacttcgccgctcagcacttcggctttctcgcccttgccgtggtcgaaggtgatcacgtcgccggcaacgaggctggacaggcgctcggcggtttgcagggcgacgaccgcttcgttgtagacctcggtcagcttggtcagggcgttgtggtggaagacgacgttgttgcggaagtcttcgacggtggccggcttcttgatgagcttggcgcccaggacggttgcgacggtggtttcggtggtggtgttggtcatgatgtagctcctagaggttggttggttcgcggcaaggaatggccacggtggaaggctggcgcaccagccttcgccttggtcactcggcggtgagtgtcacctgggtccccttgtcggcgagggccatgcgccacccgtcgttgcgcagcacggtgggacgcggaccggtcaccttggcagggccgtcgtcatggataaccacgggcagcactgcgggacggcccgtgctgtcccaagctgctacgccgatcaccagtgtgccgcgcttagcctcgggctgcactacccgatacatctcaccggaacgcaattccgtgaggtcgaagagacggcgttgctcgcggtcggtgttgtgggtatgggtgcggatcatgttacctccggtaggttatttgatgttcaggtgacgcttcagcccggtcagcaggccccggcctactgcacgtagtgccaggaatgtgcccacgatgattatgagtggccagaagcacccgatcacgcatgcgtcctggaactgcacttccgtcgggttctcgaacggcggcgacactgcgatgcagtagcaggcgcctgctagtatgccgaggcaacagtacaagccgagtacaagcagcgcggcgatcattggccggcctccccttgaacaagtttgatgtactcacccgcacccaggcggcggcaccgccagtctgtgttgagaatggccgtacccaccgcgtactgcgcggggttcatgctgtgcagtacgatgactgcctgagcgagggcgggcgtctgcttggtcgccagcacaacggcgccctctgccacgctaggcgtcaccaccttgtagagttcacctggtgacaggcgtcctacggacaagactggcggcgccgggtcttcaggcttgacatatatggtcttgacggtcattactcgccctccttcacgaggtcagtgcgatgcacctcttgtacttcacaggccgggtagatagcgaccgcgccgccgaggaaccagagttcgacgaaggcgtggccggcgacgatgctgtcggctaccacctggcgagtagttccgtccttgagacggacgacgtaggtaggattcatatgcgcttgctccagttcacgatgaggaaccggctcccaagcaaggccgatcggcgatgcttgcgaagccagcgtttggccgccttgcgtgagtagaatcgcaatggacgcacaggtcgcttgcgactccacacgaaggcacagcctcctgatgggctgacggctatgatgagccacttcatttacgggtcggtagctgtctgatgaaccgcacgttacgggcctcggcctcgataaggcgcaaggtacgctcgcagcgtacgtggtagatcgtcatacagcgggacggtcgggttatggcttcaatgatgcccttggtgcctgccgcgtcggcacccaggtagcggtcgctgtagttcaccagccccacgcggtggccgatacggtagggatcacgcgaggacatggtacgaggttcctgcaatgtcgaagatcgggcgcccgttcgcgcagcccttgcggtattcagcgttgatccagccatacgcctggcaggtgacgtgcccggacagcgggctaccctgtaccagcagcacgtcgaatccttcagagtccaggtcccggctcaggcgatacgcttcgtcatagcggttcacagttacgccggcgcccactaccacgaacccgcctggggtcaggacgtgcgcggtattcaggtcacccatacggaagccatgggcgcacagcgccttgtcggctgcgttgaatgcgttcgacgggtccttggggattgcgatcaacagagtattcaaagcttgcatggtttagttctcgcttgtgatgagtccagcaatggccccggagtaggcgagggtcgcccgccagggccatgacttgagtcaccgcttcaggaggtggatgaagagtaccgtcaggccgctgaaccacaacatgcgcagttcatcctcgccgaggttgaggccgagttcgaggaagggaagggcgatccagaagtccatggtcactcccccttcgcctggacggcctgctcgccgtacgggaactgagccgggcggctgtactgtgccagggcgatttggcgttgcagacgttgcttgaagctcatcgtgtttctccagttgtcattgattccagcggaacgcccgcttagcaggcgttcgacttgagtcaatgggcagcagcgcgcttgctctgctcagcgataggtgcagccttggcggccagcgcttccaggtcacccagcagttccatgccgacgatcaccttgcccttggtctgagcctggagcacctgctttttgatcgtggccagggcagcagccaggttgaactcctggtccagcgctttctcaggcttgaagctgtaccacgggctgttggtggcgccgacgagatcggtcttgccgaacttgttgtacaggaagggtaggtccttgttcgatttcttgtcagtgttaacctgtaccttgccgtgcagcaccaaccactcgaccagcgcattgcggcggctgcccttcggcatggcttcatacagcgccttgactacggtcacgtcgccgcactggtcgatgtggtggatgatcgacaggccggtcagttggatggcttcgtccagttccttgccacggacacggatggcgtcgatagcgcggttgatctcttcggtgccacggaatgcgattacggttttggagattgcgttggtcatggtatgtacctcagatggatttgttcaggtaagcagcggcggccaggtagccagcactgcggggagtggtcagggtatcgacgcggggctgcttagcttgcgcctgctcagccttgcggaagatcgggcagtcggcgcctttcggcatcctgtgcgctagatcaatccggcgtgccttgtcgcggcgagccttggcggccttgcgttgacgcggcgtcagttcattcacacgtggcattacaaacccttcccttgcgacttcttagcgttccacccctttaggatgttccgcgccttgccttcgctacccttcacgaaagccttctgttcagggttgtggtagcgtcctggcgctggctccgggtcggtagcgtagcgcacgtcacgcatcttgcgaagctctttgcgcccttcgacgttatcctgtgcgatgagcttagtacgtttggcttcccagtcccgccagtacgctacctgagcagcaaagggtgacttgggagccttagccttgaagtgtgccatcggcaatcctcactaggtctgtctcttgaatcccctcggtggaagggcctcaagggacaaaccttggcattggcatagtccctgtagtatcagcggttctggcttgtcctgcgcatactcttcgggatcgtcttcactcatcccccgtaccctttgcgctatctgcctggccttgttcaatcggcccgccgatactacccagcatactgtcagtcgcgattaaccgggtattctagtcccgatcccactgacactctattcgttcccaccggacctaccataggccctttgcttaaccgtggacggggaggcttcccgctcagactcttttgggtgagtcttcagcacccgacaggtattccctggaaccctgcctaaccagttgcagcttcggtcaacctaccgcaccagtccatgtaccgctggtgaagcttcgaacctctaccgccagatggctcagccatcctttcgtcttgccgcgcatgttagagacttgcgcttgtcttgtcaatcctctgtcggggattagttcgtccagttctccggcataggcccttttgctgaggggccatcaggtggtgcgaactgtaccgcgtgtcctgcaccgtgtcaatccctgcgatgatgcctgccggccttacacatcgttggtcatgccctaagagtttgccgtgtcccttgcgcctatggcttgtgccgcgcttggaaggttgcaatctcccgtcgttctggctgcgcatcctaccgatgtcctggcagggtgtcaacccctgtctccaggctgcctgtagaggcgttgttgcgtgaagacagggcgaactctacagacctgccgcccacgtgtcaatacccgcgccagggcgctccctggagccttcccacgcgtatagagacccacgcgtgcgaggcttagtctggctagccaggattatcgttcccaggtaacgcaaatccaccacccagggagcagccacccagccagggccaccaccctgaaacccgcgtggcactaaggctgcggttatgtcacacacaatggacaaataggcgtccatcagcgccagcggcgcgaccgaggcaggccgagggagtggcgagggtaagacagcaggaccagcggtagcgccagggagacagacccagggagcaggactagacaagccaggtagaggcgagtagagtacgcggcctagagggaacaacccaggtaggaccagggaagctccagggcagaggcagccaggcagagggcaagggcacagcccaagcacaagaggcaaggccagccactcccgcaaccaccaccagaccagagggcagaggccccaggaggaacgagatgctgagcagacaggacagagccgagcgagcctggcaccagcacgacgcagcatggcagcggaagctagccaggtgggcagcagaggatgagcagcacagcccgtacccagcggccagggccagggccaaggatgaccggaggctagcgctggtggcgcaccgcagggcgctgagtatgagccgatggaccgccaccccgccaggggcttgacactcccggcaggatgcgtagaatgggcggcgaagggcagggaagcccaccgccacccggcgaagccggaagctcccagggatgacccaggcaccacccaggcaatgcgaggggatggcccaccagacggagggcctacgggggaagggtgggctgatcagagtcgggagggttctcacacgacgatatcaaaattggacccggagtaactactcccagcccaggccagccaatccagccagccttccagccgacctcaataaaattccagtagttccagtggagcacccgactatgcaggtgctcggcttgagctactcgatcacttgtagaccagggccttggcggtctcgacagcagccatcagctcgtcgagatgcgcgaccagttcagcgcgcagcttggtctcgttgtagccagaacccagggccgcttcttccagcggacggatcaggttctcgatggtgccggcgaaggcgcggaggtctttctgagttgcagcggcgaaggttgccatggttcagttccttgtgttatggatggagtcaggttggacggggctgtagctcagcccgccggtgcggtgtatacgaccttggtgatagcaccgttggctacggtcaccttcacggaaccaccgccgtccacgggcagggtgtcaccgttcttcaccttgtaggcggtgagcgggtccggtggagtagcgccaccctcgccgcccagggcggtggctgctgcgatcacagcggtggccttggccttgacatcggcctcgtccatgtcgtgcagggcgatgcggttgtcggtgccgggctggcatacctggtagaaggtcaggccggtgttacggccagcgaggtattggtcacgggtgttcgccatggtcagtctccttgattcagggcgttgcataggtccagggcgtcctgataggccgctacagcgcggatcaggccagcctgggtggtagggtcaatcagtgggtgttcgcacagcacagcgggcgccggggcggttgcacaggctgtcaacgacagcagcaggcacaggccggtcagcccacgggcggttctggtccagggcacggtccacctcctggcgctgggtgttggtcttggcggcaacctcctggacgtggcgctgtaaggtggcatagcgcacctccagggcctccgcacgggccgactgccgcttgatctcctcctgggcgatacccaaggcccggtagctctgaacgaagccgtatgaggctcccagggctaccacagcaaggacgagtattgcgacgatggttcgaggcattgcttgatctccgcgttgcggcgattcacgaggcccttggatacgaccttctggccgtcgatcgtgaccttgttccacatggccagggcttggcagccctcagtggcgcggccttggttgaagcgcttgaacgctgtgctggttgtacagactggacccacgttgtagcagaagaacgtcagggcggtttgctcgttgacgttcagcggcaccttgatggcgtccaggacgatgcgctcgaagcgctggtagtccttgagcgtcatctggtagcactgctccggtgtggctttgtcacccatcttgaccccggcagtggtgccagagcagatggtgggtacgccggcgatgtctcggtaggcagtggtctcgctaccttccagggcgacaaggccggcgagggcagccgcaagggctgcgccgcgcaggggcttgttcacttcttgaacctccggcgaagctccgcgatgctatcgagcatcttcgggagcagggtgatgagctgggcgcccacgtagagcgcggtgagtaccgcagcacagaggctggcgatctcatagggcgagtaaacggcgatccccacgccggtgacggcgagggtgcctttgcccgcctcggtggcggtatcgagcatcatagtcttcgtccttttgggcggcccttgcgacgctcccggcccatgccgagagaccgaaggacagacttagtgtaacccatcgggttgttcagccattccttcttggcagcctcttcacgagcgcgggttgcggcttcgtcgtcctttacgagcgtgggtgctagctcgcggacaaggccctcaagggcatcgatccggtcgtccttcggcagtgagcctcggtcggtggtgatgttgtgaatctggtggaacacggagcgctcattgcgcttgtccgctgggtactgctgacaggccacatggtcggaatccatcgccgatacgtggaagatcagacggtgccgctgcatgatgggccgcagggtgtcgatgatgcgacgctctttctgtccggacttctggcggtcttctacgccgatcccctcatagcggggcttgttggtgtccgggtcgatggatcgcatgtggttgcggaagagctggccaactgcaccagcgccgaggtttttctcgacatagatcaccttgacgccataacgcgcagccagggcaatacatttctccaggttctcctcggcaaagccacccttccagccgccgatgctcacgacgtggatgtacgggccaagagtcccgcccacggcatacgacagctcgtcgccaccgtcgccggcagggtccacgaacatcgtcatttgctggagtggtgcccagccgccagccatcagcgccggcaggtacagctcaggtttgatgaccgggaatcggtgggcgtcgaacttgagcttgaagcgctcatcggcagcccaggccacttgctctggcacgctctcatgcgtggcgtcgatgaacagcaggtcgcgcagcttgagctgcatacgctgctcgtcggcgaggctggtgtccagcatgtactgaagctggaagccctcggggccttggtcaagctccttgtcgagcaggtcctcttcgttgtagcgctgcggatcggcagcccagccacgggtcccatccaggcccttgccggtgcgcgggttgtggcctttctcctccaggcgggcaatgcgcgccaggatggaaggtgcgagccagtcaccgtagcgttcctgctcatccagggtcgggaagcggcccggccagatgcgcatcaggaagccccgcgccggcaggccgttgtagatcgactcacgggactgcggcgtgcccaggtagagaatcttaccgtgggtacagatagaggtgaactcctgcgactgtcgcgtcagcttggcccgctcggtggcggtgaggccgttcttcgtggtctcgatgtcgtcagggatcaggatgtcagcccggtagccctggagggcagcggtgatcccgatgcagttgatggaggccgatttctcgacgcccttcaatgcccagttcacgtcgaagctggtggccgaggtacggtcacccatgcgggcctcggggcgcaggtacgccagaaggtcccagtgcatgatcagcttcgtgatcaactggccgttctcctcggccttgtcaccggagccggataccagcatggcgcgggtagccgggttctgagtgatgcaccagaccacgtagatacaggcgatggtggacttggcctcgccacgctgtgcagcgaccatcgccttgttgggcgagtcctgcatgaagtcggcgatgtcgagctgcatccacgtcatcttgaagccgaggaacagcatggcgtccaggcagaagtcccggaagcgcgggtacatgtcccgcacctcgtgggctatctggaatcgttcttgcggcgtcatgctgcctcctagtgggtgtacagtcgttccatctcatcgtcggtctcaccggcgatgaagccctccagggcgatacggcggttctccgcctgcgcctgccgcatttcctcacggagccggtcgatgttgatggtgtcggacggatcgcaggtgatctcgttgtccttgaggaacttggtggcggcagcgatatccgatgcggggatcgggatgtcgttgtccatgtaccacttgaagttgcgttcgatggcggtgcagaccagctcgtgaagcaggcccagccgctcagcactcgcggtctgctttttgctcattacatgtgccctctgaattggacttggaagcgtaggttggttcccatgccgcacttgaccagaggccggaacaccttgccggtgtccacctccaggtgctcctgggtgtagttctcgttctgcgtgcgaacgtacatgttaccgcctcgggtgtagggtacgatgacctgtgcccacgcagttgcgccggggcgcttgtcgtcgagggctaccttggcatagtccacttggcccagctcaactacgatacgacggccctgctgcacgttgaagtacgatagggcgccggtcttgtctgcgcggacgaacacaaagacgtagttcatattgctgtcgaagtccaaggatatcgtcgagatacccgcgtcgatgccatcgccaatgcgcacttcgttggtgccgtcctcccagccgaggtaggtgccgtcattccgcagcatggtgcgccatacccggacgaatagcccctcggaggggtcctggatggcgacccctccgtcgcagaagtcgagcacgtcgctgatgtcacgacgtgccctggcacctacaaacttcgacttggccttgggatcgaggtcttcgttgaagtcgtagatcagtgccatgggttatgccctcgccaccgagaactccattgtaatggagaactcctgagtgttgttcttgactacgggagggtcgatggtgagtgcgtagttccgcccattgtaaatctttaggtccttacagccggtgataccccccggcatgttgccgttatctacggtggcccgtagcataagctgacccttgtaggtgccgcgagtatatcgcgggtacagcttcacccactgaccgtcttggacatcggcaccggacgcattcttgccgtcgatccgtggactctcgttgtagaagatgtagcgctcaccgtagaggttacgccggttcgcgaagggcagcggggtgaggcggatggtacgctcaaccccggagatcacgaacttggcctcggccatcgccacagccttgctgcgcagctcatactgtacgtcgagaatctcgtcagcctgaactaccagggtggtgggttggccggcggcgtctttgatccgggtgtaggatagtggagtacctgccggaatcttcgcgccggtgttactctcaaaccccaccgcggattgagctacgatgcccacggtggccagtacctgaccggccagggtgcctattgggaagcgccaccgcttgtgccagtaaatccactccccgtccaggcccgaggtcacgtcgccgttaggggcatacgaggtggtgcgccgaacttcttccggcagggagggcgcggcggggttagggtccgcagtgctggtactcacggccagggcctgggagaacaggtcagaggtatccatggcgcaaatccaatcaagacctgcgttagtgatgaggttgtcgaaggtgtgttgcgccaggacttcacccgtggctttcatatgggtcaccgtgtagcgacccttaactcgcgtctcaaacattggtcagttccgcctgtttaattgctgttgaggtggtgaaggcgtaaggctccacgatatactcagagtatacgaccacaaccttcaactccgcgcctaccactgcggtctgcgacgagaatgcgtaaggttctgcggtgtagtccttaaccgtatcgcgcagtaaaactgcatggatggcaggtcccgtcaggaacccatcgccaccgccgtagccgagctgagtcagcgaccgcagcagcacgcttaccacactggaggtcgcgtggtaggtgtcctctccgggctggttcaacacctcgtgcagggtgtcgcgtgttagcgctgccacgatgttcggcctacaagaccatgcgtcatccgtagccaggatgggatatgggtaggtcgccaagatgggcttgggccgccgaatttgagaggccatgatgcccgcgataatgccgcgcattattcgtcctccatggctccgaacacgatccagtggttaggcccgagacgcttgagggtacacacgccattctcgccgtagagctgcatggtggtgttctgcaaccggttgatggtcacgccggggccggccacgatgttgaggtcgcgcacacccgcctgttcgaagtgaacctcgctgaactcgatccagggtgcatccgggtcttccatctgcatggtcagggtcagcggcttatcagcggtgatgcagcggttccagtaaccacgccagctcgggtcgatgtccgagtcttccgtaacggtgcgaatctcggcgaagcccagggcgcggcgcagcgcttcgttagcggcgtcgagtgcctcctgtgcaaggcggcgggcctcctcggcgatacggatcgcgtcgagaacaccatccagtgcgaggttcgcggtgttgatgccctcctgcacggcgtacagaagctgcttgttgttcgcgtcgatgtagcgaggcaggaacgggatgccctggctgaactgcgtatccggcacttgggcgggggtgtcgcggaagatgcggacctcttggccctgcttaggcacttccgcaagctgaatgttggtgttgtccacccacgtatagtcggtggtgagtatcttgtcgacctggacgaatacgtcctcacgacgcaggaatgggaagtcgagactgaatacagtctcgaccccatctgcaacgtggatggtctcggggttcttgaaccgagccacgctattcccctttgatggattccaacagcaacttggttgccgggaacacgttgacgaaaggcagtgcgcccgccgcgccgttgacgatatcgccagtggctgctgccgggtcgtcgccggttacgaggtctcgaacgcctcggaacacttcgttggagtgttcagccagtccgaagaccggagcagacattcgggagtggccagtgaccacaccccacatatcggcggtgaagcccagaccggcagtgtagccgatgccgtcgatggccatcttgcggatgccttcatcagaggtgtcgaacttgccgttgatcgctgccttggcacccatcatcagcgcggtgagcggatactggaatgcgaggagcgaggccacgccaagcacgccggagttctcataggttccccggaggagcttgttgtgcgcgaaggccacaaagctgcggaactggcccaggatttggccgacaggtgaccgagcaaagcccgagttctgaccgaccctgccgtacagcagcgagtcgtccatgatccgcagtgcggtgttcatgacggtgttcacgtctgcttggctccaggcgccccaattcatcgattgggcgttccttcctctgtatgtgacataaccgcgaacccgcgccaacactggcgtccagtccacgtccttcccgtactgctggagcacgcgaagggctgcttcatccccctgagccgcccgcgccaccttgttcaaggtgaggttggcgttcatacgggattgccagttgtgaatgaacttcatgccgttgagcaccgggacagcctgcttacctgcgtgcaggaagcgatccatgaaggtatcttggctggccaggaaggtgtcgaactgccgcttccagggcttcatccggatatcgttggcgaggttcaggccgaggacggtctgcatctcgtcagcgaggtccgggtcgcgacgcatggcgcccacgaagtctcccaggcgggagttcagcatggccttcatgacgttgaagacgccttgacggtgcgccatcgtggccagctcggcgagctgatacacgcctgagaatcccagcatggtggcgctggtcaggccgctggcccgctgagcaaccgggccgagctgatgctccctcggcacgttgccggtgaagtccccgaagactccccgcagttgccccgtcagctcctgcaccttatcggtgcccaggtgtgctgcctctcgctggtactcccggatgaaggcttcgatctccgagtcccccggcatgcctgcgcgggccaatgctgagcggcccgacatactgccggcgtagttctccatcagccggtccaggtctcggtcgatcaggtcctgcacccgatacacggttccgttgtggttgatctctgcggtcatgtccagcgacagccggcccttgccgtacttgacggtgccctggtcggactgcttctgctcgatcttggccatgatgctgtcgaacttggcctgggacacgttggcctcctccagcgcctgccggatgaatgccgtgtccgccacgcccatcgcgcccatgaactcggagcggattccggtggcccgatcccgcgcccgctgcacaatggcctgtgcgatggtatcggcatcggcgcgctccagcccagggatgccacggaacacggcctcgctgatggcgcggcgggccaggccaggggcggcctcgtccatctgcgccatcttcgaccagttccatgaacggtggaagtaccccggtcggggagcgaagtcctcgaagccacgcacaccggcttccctggcgcgctggcccatcagaccgtgaatctcgtctgagcggtcggccagggccttgatggtcggcggcaggttcgggtccacacggacgctgccgtaggccgtccactcgcggtcccggcgcagcagctcgcgggtgacctgctcgttgagctggtcccggactgccatggcgcggcgggagttcagcgcacgtgccgtcaggcccacaccctgctcagccattgccttggccatcatctcgtcgtaggacttcacgtaaccctcgaactcgttccgatagcggcggagatagctcgctgcgttgtcgttcgtgctgaacccatcccgacgtaccgggtcgtcgataagacggctcaggagtcgccgtgcgccctccccaggctgtgccaggaggtctgcctcgctgaagaacctgttcacgaagccggcaccctcacgggcacgttcacgggtggtccgcacgatggtctccaggctggcctcctcggttaccggagcgcccttgttggcccacttggcctgcgccttagtgtagccgggcatggcctccataatcgtctcagaggcggccaggacgcggctcagggccgtgtcagcatcggaccgcagacccagtagggtgcggatgccctccacgaagcggg

SEQ ID NO: 6 - DNA, 42717 bp, unidentified
  source 1..42717: mol_type = genomic DNA
gcttctggagcagcgcctcgtggtaggcgtccagctcgatgatccactggcggaaggccggacgaaggtcgcggcttaacagatactgcgctgcgttgtcggtaggcgttcggcgcatccacagcacctcggcctctgccagcgggttttgcttgatcttggcgtacgcctccaggatcatgtcgatggcctcgtcctcatccgtgatcggatggaggatgtcgaaggccgtcttcataccgcagagcttaccgttgaatcgatcgatccctcggatgttgtcagcggtgtcgccgccgagccactgcgccaagaagaacttccgtccatggcccttgagcttgaactggccggaaggcgtgtacgcttccttgaggtagccgaatccgccctcgatcctgctcacacacgccgtatcgatctcccaatacgggtagatcgtcatccgcaggtctttgtcgtcggaccggatgatggccttgtcctgcatggcgtaggcgtccatcatcatgccgtcgtccgcctcgaagaacgtgtgcaggatgacatcgatcccctccggcgccccgcctcgctcatgcacgtccgccacggcccgccgcagtggctccagcagcgcgggctttgccttgcccttgcgctggccctggtacggtttcatggtcggatacgtgtcgcggtacgccttcgccccacctgctgccgtgaggtgaacccgtgtccctgtgcagtgcgctaggaactgctgctccaaaatgagcttccagaatcttcggagtgcagtgtccagggtcttagcagtggccgcagccacataggcgggtccgtcggcgtcacacaccaacgtcccgcctgccatgctgcggtcgaactgcgcggatagtcctgccaggaactcttccgatggcaggcgcattagacctgcggtactgccggcactaccgggaccgccgggacttcgaccgctgccggagccgccgtctgagccacctggggcacgtcaggcagcacgttctgtgcctcggcagtacctaccacaggggcggccacattcgccacctggggcacgctgggggccgtctgagccactgcctggggaacagccgggacagccggtgctgccgctacgccggcgtcggcggccacgttgggcactgccggcaggttgctgcctgcggcctgggtcgtcggcttgatgatcagatcatcgccgccgcccaacatgatgtgcagggccgagccggggaagttggtggccgagcgaatggtctcttgcaggaagttcttggacttgccgttgtccgaggtgccttcgatgaacagggcgtcccaggtctccttggtcggcgcgtcgaagaagaaatactgcaacaggtccatcggcagttccggcacgttatacgggctgccatcgaccgggttatagggcttcatgatgccgccccaatcgatgtcgttgcgttccttaccggcgttgttgcccttggtgatcttggtgcgcttgatcgggatgatgaacgcctggccgagcatctgagcgaagtgggtatgctgcccgctccagttcatcttgtcgaaggccagcttggtcttggacttttcgttgttgccgagggtcatctcgaaggtacggaacaggccgggcttgatcgagccgtcggcctcgtaggtgtggaacaggtcgtccgggcggctctgcgggttaccggcctgcgggttcacgtcgccccacaatgcgaagcccaggcggatttgaggcgccggattcttgagcttgccctggaattccttggcgtggtcacccagctcgatgtagatgcagaagcggcccatggcggtgcccgccgggaagatgcgaccgccgccaccgccggtggaggtttcggacatgtcgatggttgcggtctcggcagccttgttggccagggcgagggcggcttgcagagcgttgagttgttgagtcatgcgtggtctctctcgtgtcgaatgaagatttaaggccggagtaggctagggtcggcctagtcccggatcacgtccatgttgaacatgttgggtcccatctcggccaccgccgggaagggaacgtccgcgatgtcgtagcccaatcgctcgctcatgtagcgggcagcgtcggccatgatgtcgcgcacgccacggttgacctcggcggcggtgtccttgtggcagtcggtgtacacggcatcgtgtacgttgttgatcaggaactcggtgaccataaatcctgggcgatgcagcatccaacggaagatgcgccctacgctcacggtcatcatgaacccagcctcgccctggttccagtagttggcgatctgcgtgtccttgaagtccatgaccgtcttgcgctgttccttgtcccagcgctcctgttggcggaagctgtagcaggtgccaccaggcgcttgccagaatccccggcggtactggcgccagttgccatccggccccatctcgctgaaggcgcctgccggcatctggtcctcggccttgtacattacgaggctggtggcctctgcactgtcgcggacgatctgccggaatgcgatggactctgggaacagggccgcctcgttgtccaggaattcctgggcctcttccacggtacagccggtgttgaatgcgataccagccgcactcgcgccgtactgcgccgagaatgccttgggcttgatgttctttcgagcctgcatcatgcgaccgtgccacgggtggttggggtccttcttgatggccacgagctggtcgtagtcgaacccgttccagttgttgtgcttccctgccaggcggtacaagtgcatgtcagtgccggccatcagtttcgccaggaggttccgatccttcgacagggccgccaacatcaccacctccagggcggtatagtcggtctcgccgatcatcccgtccgcgccgaagcgagacacgaacatctccttcacgcggctgccggcttccgggtcgtcctcgtccttcgacgggagctgctggaggttcgggcggctggacgacagacgcgttgtcgccgtcgccgtcgtattcagcgaatggtggatgatgccgtcgtcgtccacgtactggagcatccccttcgtgtccttaatcgtcccatccttgttgtaggtgtgggtgatgtagaacgaggagttgtccttgtgcagctcggccaggcgcatcaacagcttggccgcctcgaagccctgtttctccagagccttgagggcgtcgccgctggtgctgaacacgggcgacccatccgccagggtgagggcgcactggaactccgggcgtttgcccaggaatttctcacgcactacttccggaaggttggtcaggttgatcaggccggggaaccggaatcgctggtcatcatcccacttggtcgccgggatgtccgtatcctcccggaacaccttgacgctgcccttgttcttgccagcggagaacgtgatgaccgggccgtgcttggtcgccagctcggtgatggtgggccagtgccactcaccctggtcggtcacttcatggatcgggacccgaactgaggtactctcgattggagtcccccgcttggccgtaccgaagcgcacgaagtcggctttctccatccggccatcttcgtatggcacccggcccttgtaccgcacctcgccaccgtagagccatgcgctcatatggtagaggctggtatacttgaactcgaagtattccgggaagtcgggcatcagcttcttcagctcggcctcgatcccggccacctcttccagttgcttggcgtggttcaccttggcgacttcgaggtccaccttcaggccggcacactccatcgccgagaaaccgatcagggcctcgcagcgctccaggtagccagcccacatgccacgggcctgaagcttcatcagctggccgtagaacacgagggcggtattctcgatgtcgccgcacgggccggacaggtactcgctcagcaggtcctggtccatctccgaggtgagcacaccctggtcccacagcatcttgatgccgtccaccttgtgggtgccgccgtacttcggagccagctcgtcgagtgccgggtacagccacgtctgatgactcagcagatactcggcttgctgggtacaccagacccggccaccgcgtcgcaagaaggccaggtactcgtcccggtagcgggtgaagaaccagttcgattcgaacatggcattgtgagctacgatcacgtccacgccgtcgaggttgaaccagcggttgttcgggtcttcggcttcggcccggctgcggaagcgatgttccaccttctggccgaccttgccgtcaacatcgtcccgccagccggccatgacgatgtagttgcgggggtcaaagggcgacgccttgcgccccttgtgctcgtagctctcggtttcgaggtcgaggattcggatagtcgtcatttgctgtaccagttgctttgactgtactgctgcgccttgaccagtagaccttccagcacacggcggggaatctcctgcatcaggtagcggaccattccttcacgtccccatatggtcagttggtacagggagaccgcgtggcagaatcccatacggcccagcttcgcatggtcgtagtcaattcgaatcgacagctcttccgcttgcgggtccatatgggccttggtgcggaggccggggaacagcaggtccaggggttcgtggatatccgccagcaagcagcggatcatgcgttcttcctcggtgggcattctcatactttgactcctacctgtcgcagattgcgacgcagacgtcgcatgacccggtgcaacttacggcgaccggcgccgagggattggatgtcccgcgcatgatgccgaacttcggacccaacgtggtcccaagtccctgccatgacgcagatgcggaatgttccgtcctggctgatgaacacggaacccatgacgtacttcggatacagcagcgaatcccggttggtggcgtggtataccatatcttccgggtagttgcggttatgggactttcgaatcttcataccttcactccagggttactggccaggtcgcggaagcgactgaagctgggatggcggagggtgttggctgagcgttccatcgcggagacctcggcgatgcgtccatagttcggcatggcctcgtcgatgcagccgttgaggtgggcgcaggtcaggagctggatgtgctcctcactcaggccggtggcgccaacggtgccggaaccatcttccagctccacacggtagcccacgacgcggcccacgttcttgccagtcttgcccatcacgtacccgacgatacgcccgtccacggtgatctccggcttgcgcttgtagcagccagcaaccttgccgttgcggtaggtcaggctcgggtctttctccatcgacccctcgaagcccatggcgcggtggtagccgtaccagcgtagtaccgcctccatagaacggcaggattgtgcggctacctggaagaagtacggggtgtcgccccgccggcaatcttccatgaggctgcggaccatggcgcggcgctcatcgtatatgaggtgggacttgcgcgatttgcggagcacgccgatatgggtggcgtcgaataccgcgaagtgcaggcacttcagctcggcctcggtcagcggggtcttgcgggccatgcgcccggtcgcctcactgaagggcatgccttccaggtacatctcacagtccaacaccagaccggagtccaggccgggctgggacagtttcgcgatgatgcgatcctccaggccgtccagggcagggaagcggcggccgctgcgggataccacgccgtgcgcacccacgatggcacggcacccgtcgatcttaggctcgacgatcacgtacccgtgcttcttgatgatggcctcgacggccttgtcgttctgatctacgccgcgccagatgcctttctcgatatccaataccacgtcgcgcttgctcatcacacgttctcccatccgtagtacgcggccttggcccgcatcttttcgcatcgctccggcagtcgcgagccggaaccaacttccttgttcacgccccaggtaacgtccttgtgcaggtacacacccagtcgcgggccgccctcggggtccggccagttgtacgcgatgcccacttggttgatggtgaagtcgaacgactccatcacccgaccgaggctgtcggcatcgtagtagttgaagtccacgtccatgccttccaggccacggcagcccaccagggatatcacgcccttgaagataccgccctcacctgcgtcggcgtactcggtactccagccaccgtcccggacgaagcgcgggtccagggtaggaagcacgctgttgatgagcacttcagcctgatactgcgtcatgccgtacagggcgatgtccacgtcctttggagtggcgccatgcatgaggtcgcgagggaacccaccggccagggcgacgccctcgttgggccgtgcatcagagtacaggcgcagcaacagggccttgaccccggtcggcagtgcaatggaacccagtggaatttctttggtgccttcgagcacccggctatgcttagcttgcatggtctacactctcaaagaaacgacaccgtgcggcgtcgaagttaatcatagcctccacgttcgaaggcttcccgtccatctggaacttgttcttcggcagggacaggccgcgcatgacctgttgatccgcaccgttgagacggcccaggtggatttgcacgtccacagcaccctgtaccgccgtcttcgaatccttgaggcaggactgcggtgggaacaactggtcgtgaccgtcgttgctgatctgccacgtcatgaagctgatgaagtcgtgacgcaccgccatctcgcggacctcggccaccttgtactccatctcgtcggtgcggttctggtccttgcgctggccacctttgacgtgggccatcatgtcccaaaacaccaccgccggcttcatcgcgtcaatgacctgctcggcctgggccagggacccaccgtggaagtccttgatgcggatcagctcagagtcgccgccgattttctcggcgtacatcctgcgaacctcctccgggtccagggcaagaatctcgcccacggtcatgcccagggctgccgagtacaggcgcggcttgatccgccggcccttgccctcgttgttcagccacaggatgggccgcccagggtcgaagtaccgcttgagctgcggcgcgatatggacagcgatccaggccatgaacgaggtcttgcccgcatcaggcggcgctgccaccagcaccgaggccccggcgtggaggcccttcatgtacgccggaagcaccagccccggcagcttgatgccgtggtcaccctgctcctccgccaggatatcaaacacgtcgtccgtcacatagtcggtcggcgtactgaccccctcgcggcgcagggcctcgtcgctcagccggcgcagctcatacgccaggtcgatgtcttcgccctggttgtactgcgccaggagggcatccaccctgcctgaaaaatccagttcgttgagctgggacacaacgccctgtagcgagtccgggtctaccggcttgtccagttggttgacgaggttcaggaccaccgccagttgctccggctggtagccacctcgcagctttatcagttcgcgtagcgcctgcgggtctaccttctgatgcgctgggtagaccttccagtattgctcgatccagtcgatgacaaagcacgtctccggccccatcatcccttcaggcaccacactccgcaacgtgcggaagcggtccttgtcactcagtgcgtgtagcgtcaatacgtccaattactaggctccttatctgctcgcgggtcaggtccttgggatcgaacccgtccggcgtgggtattacttggccttcgataagcagggaccggagccggcgcatcacgcctgcactaccacggacacctgccgggtcgccatccaagaagatgaaggcgcgcttgcaggtctgctgcaacatgatcgccgccagcctgtcgcgcagccttgtaccgttcagaccgacagcaaagacttcgggacaggcccaccgcaccttcagcgccgacaagtagtcttccgtcagcacccatggcctgcccattgataattcctggggccatccatggtaatccggggcaggatacccgtagcccacccacttgggattttggtcggcagtagcgcgcccaatccagcccgcgttggtagggaagataagccgatgctgcctttcgctgtacagcagcggcagccctggcgtcatcacgttgtagtcgatacccttggacagcagcaaaccataaagcgattgatagcagtcggcttgcgtccagtccgaggcatcctcgggccagggcatgaagcgttcttgatccgcgcattgtaccctccgcacatgcgttttctcgaccacaccaccctcctgacaggagtagcagtaagccacccagcggtcaggcaggttcttgcaggtcatgttggtcccgccccggctcatgctcttgcatcccaggacgtgtcggaaccggcctacctgcccaaccgccagggattgcgcttgctttagccaggagtcgcggcgcagtgccattggtaccattcctcccacaaaggccgcagcccacctcgggcctcgaacatgtcctggaggtgccaggtcatgcgggcgccgtaggcgggccgccgttgttctgtgtgagcagcacgcccagggccaccagactgaaggcgactccgatgaccagcggtttgttctcgataagccatgtcatcacctcatacgtcatggccgggtgccctcatgtgcaacacgtccggctctcctgctgtccagttcgcctcgcggtgggtggtgctccagcccaagtcggcgtagaacggctccaggaactcgaagcaggtcagatactcggcacccgccagctcggcggcccgcaccagctcagcgccgataccctgcctgctgtgtcggtcatcaacgcacagggccttcagttcaccgcccactacgaggcaggaacctaccatcagacctgacaggtcgaaggcaccgagggccagcacgcctcccttcttgcgccagatgtcgctatcttgccagccactccggcggaggtggagcacacactcggcgatactcgcactcagctccccggctggactcaggctttcccggagcgggtggtacttccgctgccagaggaaccactgccaccagttctcggcgttgctcggggcttggatgctgaatacgtggatcgtcctgatttgaatcaggccgggatgcaggctcagcggatacaggctcgtcttgctcatcttcgatctccctcaacttgcgctggccgaagtcaatcaggtcctgcgccatgtaatgcacaaggctgccggcacacgccgccaccttgtcccaggttgcccgcttaccgtcgatgcacgggaagacagcctcgtcctccagctcgacgccgaagcggtatccgttgtaatgcgtgaaatggtattgcatgttcgtgatcctccagactcacacgagagggcgctctaggaacgccctcggatttgaccccggagtaggccctggtcgcttagacgagcaggtacgtcagcacgctacccacgacgccgccggcgatggtggctgcgaaggttgctgcctgccaggtgtccttagccgccgccttcgcccgctcacgggcctcggcctcagccttcgccacggaagcgcggaaggtataccgcacgccggtcagcttgctgatgagctgacagacggccttggtcggggccaccgtcagcaatcgctgagtctccgcgccgtcccaatacaggccggcccgttgacctacctccaccagccgggtcaaaccctgcttgaggccgaacagttcagcgcccatctcgttattccggtccgcaagcttccgtacccggctgcgcagcggtccgtccatttctattccggcatcgcgcagggcacggtttaccgccagcttggttacgtgcagatcgtgtagacgtacctcgaagtccttggcggacagcgggccggccttcttcgataccagcgggaataccttgagcagcagtttttcgtactcatcggcgcgcttcgcgtcggcctggcacaagctggccgctacccgcgcctctagatcggcatagccacaggtgctgacgcgctccacgttatccaggcgcacctccaccttaccaccgtcacaggtgacgccgctcacacgggcggtgtaagtcccgcccgaagcctgtttcttgggcgtataggcgtgggcgaatgcccggctcttggccacccggcgcatctccggggataccttggcacacggcacgccgaacatgctggccgccagcttggtgaagtgatcgttgcattccattgtcagactcctgccagtttcagggttacggccagacctgcggtcagcaggcatacccaggccatgatggttgccttgcgagcgcggcgctcttgtgcctcgtgggcatcgtgcgctgcgttcaagtcgttctggagcagacggatcgtcgcctgatggctgcgaatctcgtcgatctcccagcggcgcgcccgctcggcggcctggaggcggcggctcagggtgtcgatatcctgggcgcgctcctcgcatacagccagggcggattccaggcgatcttccagggcctggatggcgggtgccttctgtacgctcacgctgcgtaccgggccgctgatgtgctcggggttgtgcttgctcacgttgactcctcctatggtatggctagctcgcaataggcccggcagggccaggcctattacgtgcgggccttactcgccttgggcgatggcttcgtccagggtctcggcggacgctgccggggcctgcactgcgcggatggcaccggccttcacgtccagcagcttggccggggcgctgtcgctgaagcgcaccagtacctgatagacgccggcgactacgctgatgacttcgccgctcagcacttcggctttctcgcccttgccgtggtcgaaggtgatcacgtcgccggcaacgaggctggacaggcgctcggcggtttgcagggcgacgaccgcttcgttgtagacctcggtcagcttggtcagggcgttgtggtggaagacgacgttgttgcggaagtcttcgacggtggccggcttcttgatgagcttggcgcccaggacggttgcgacggtggtttcggtggtggtgttggtcatgatgtagctcctagaggttggttggttcgcggcaaggaatggccacggtggaaggctggcgcaccagccttcgccttggtcactcggcggtgagtgtcacctgggtccccttgtcggcgagggccatgcgccacccgtcgttgcgcagcacggtgggacgcggaccggtcaccttggcagggccgtcgtcatggataaccacgggcagcactgcgggacggcccgtgctgtcccaagctgctacgccgatcaccagtgtgccgcgcttagcctcgggctgcactacccgatacatctcaccggaacgcaattccgtgaggtcgaagagacggcgttgctcgcggtcggtgttgtgggtatgggtgcggatcatgttacctccggtaggttatttgatgttcaggtgacgcttcagcccggtcagcaggccccggcctactgcacgtagtgccaggaatgtgcccacgatgattatgagtggccagaagcacccgatcacgcatgcgtcctggaactgcacttccgtcgggttctcgaacggcggcgacactgcgatgcagtagcaggcgcctgctagtatgccgaggcaacagtacaagccgagtacaagcagcgcggcgatcattggccggcctccccttgaacaagtttgatgtactcacccgcacccaggcggcggcaccgccagtctgtgttgagaatggccgtacccaccgcgtactgcgcggggttcatgctgtgcagtacgatgactgcctgagcgagggcgggcgtctgcttggtcgccagcacaacggcgccctctgccacgctaggcgtcaccaccttgtagagttcacctggtgacaggcgtcctacggacaagactggcggcgccgggtcttcaggcttgacatatatggtcttgacggtcattactcgccctccttcacgaggtcagtgcgatgcacctcttgtacttcacaggccgggtagatagcgaccgcgccgccgaggaaccagagttcgacgaaggcgtggccggcgacgatgctgtcggctaccacctggcgagtagttccgtccttgagacggacgacgtaggtaggattcatatgcgcttgctccagttcacgatgaggaaccggctcccaagcaaggccgatcggcgatgcttgcgaagccagcgtttggccgccttgcgtgagtagaatcgcaatggacgcacaggtcgcttgcgactccacacgaaggcacagcctcctgatgggctgacggctatgatgagccacttcatttacgggtcggtagctgtctgatgaaccgcacgttacgggcctcggcctcgataaggcgcaaggtacgctcgcagcgtacgtggtagatcgtcatacagcgggacggtcgggttatggcttcaatgatgcccttggtgcctgccgcgtcggcacccaggtagcggtcgctgtagttcaccagccccacgcggtggccgatacggtagggatcacgcgaggacatggtacgaggttcctgcaatgtcgaagatcgggcgcccgttcgcgcagcccttgcggtattcagcgttgatccagccatacgcctggcaggtgacgtgcccggacagcgggctaccctgtaccagcagcacgtcgaatccttcagagtccaggtcccggctcaggcgatacgcttcgtcatagcggttcacagttacgccggcgcccactaccacgaacccgcctggggtcaggacgtgcgcggtattcaggtcacccatacggaagccatgggcgcacagcgccttgtcggctgcgttgaatgcgttcgacgggtccttggggattgcgatcaacagagtattcaaagcttgcatggtttagttctcgcttgtgatgagtccagcaatggccccggagtaggcgagggtcgcccgccagggccatgacttgagtcaccgcttcaggaggtggatgaagagtaccgtcaggccgctgaaccacaacatgcgcagttcatcctcgccgaggttgaggccgagttcgaggaagggaagggcgatccagaagtccatggtcactcccccttcgcctggacggcctgctcgccgtacgggaactgagccgggcggctgtactgtgccagggcgatttggcgttgcagacgttgcttgaagctcatcgtgtttctccagttgtcattgattccagcggaacgcccgcttagcaggcgttcgacttgagtcaatgggcagcagcgcgcttgctctgctcagcgataggtgcagccttggcggccagcgcttccaggtcacccagcagttccatgccgacgatcaccttgcccttggtctgagcctggagcacctgctttttgatcgtggccagggcagcagccaggttgaactcctggtccagcgctttctcaggcttgaagctgtaccacgggctgttggtggcgccgacgagatcggtcttgccgaacttgttgtacaggaagggtaggtccttgttcgatttcttgtcagtgttaacctgtaccttgccgtgcagcaccaaccactcgaccagcgcattgcggcggctgcccttcggcatggcttcatacagcgccttgactacggtcacgtcgccgcactggtcgatgtggtggatgatcgacaggccggtcagttggatggcttcgtccagttccttgccacggacacggatggcgtcgatagcgcggttgatctcttcggtgccacggaatgcgattacggttttggagattgcgttggtcatggtatgtacctcagatggatttgttcaggtaagcagcggcggccaggtagccagcactgcggggagtggtcagggtatcgacgcggggctgcttagcttgcgcctgctcagccttgcggaagatcgggcagtcggcgcctttcggcatcctgtgcgctagatcaatccggcgtgccttgtcgcggcgagccttggcggccttgcgttgacgcggcgtcagttcattcacacgtggcattacaaacccttcccttgcgacttcttagcgttccacccctttaggatgttccgcgccttgccttcgctacccttcacgaaagccttctgttcagggttgtggtagcgtcctggcgctggctccgggtcggtagcgtagcgcacgtcacgcatcttgcgaagctctttgcgcccttcgacgttatcctgtgcgatgagcttagtacgtttggcttcccagtcccgccagtacgctacctgagcagcaaagggtgacttgggagccttagccttgaagtgtgccatcggcaatcctcactaggtctgtctcttgaatcccctcggtggaagggcctcaagggacaaaccttggcattggcatagtccctgtagtatcagcggttctggcttgtcctgcgcatactcttcgggatcgtcttcactcatcccccgtaccctttgcgctatctgcctggccttgttcaatcggcccgccgatactacccagcatactgtcagtcgcgattaaccgggtattctagtcccgatcccactgacactctattcgttcccaccggacctaccataggccctttgcttaaccgtggacggggaggcttcccgctcagactcttttgggtgagtcttcagcacccgacaggtattccctggaaccctgcctaaccagttgcagcttcggtcaacctaccgcaccagtccatgtaccgctggtgaagcttcgaacctctaccgccagatggctcagccatcctttcgtcttgccgcgcatgttagagacttgcgcttgtcttgtcaatcctctgtcggggattagttcgtccagttctccggcataggcccttttgctgaggggccatcaggtggtgcgaactgtaccgcgtgtcctgcaccgtgtcaatccctgcgatgatgcctgccggccttacacatcgttggtcatgccctaagagtttgccgtgtcccttgcgcctatggcttgtgccgcgcttggaaggttgcaatctcccgtcgttctggctgcgcatcctaccgatgtcctggcagggtgtcaacccctgtctccaggctgcctgtagaggcgttgttgcgtgaagacagggcgaactctacagacctgccgcccacgtgtcaatacccgcgccagggcgctccctggagccttcccacgcgtatagagacccacgcgtgcgaggcttagtctggctagccaggattatcgttcccaggtaacgcaaatccaccacccagggagcagccacccagccagggccaccaccctgaaacccgcgtggcactaaggctgcggttatgtcacacacaatggacaaataggcgtccatcagcgccagcggcgcgaccgaggcaggccgagggagtggcgagggtaagacagcaggaccagcggtagcgccagggagacagacccagggagcaggactagacaagccaggtagaggcgagtagagtacgcggcctagagggaacaacccaggtaggaccagggaagctccagggcagaggcagccaggcagagggcaagggcacagcccaagcacaagaggcaaggccagccactcccgcaaccaccaccagaccagagggcagaggccccaggaggaacgagatgctgagcagacaggacagagccgagcgagcctggcaccagcacgacgcagcatggcagcggaagctagccaggtgggcagcagaggatgagcagcacagcccgtacccagcggccagggccagggccaaggatgaccggaggctagcgctggtggcgcaccgcagggcgctgagtatgagccgatggaccgccaccccgccaggggcttgacactcccggcaggatgcgtagaatgggcggcgaagggcagggaagcccaccgccacccggcgaagccggaagctcccagggatgacccaggcaccacccaggcaatgcgaggggatggcccaccagacggagggcctacgggggaagggtgggctgatcagagtcgggagggttctcacacgacgatatcaaaattggacccggagtaactactcccagcccaggccagccaatccagccagccttccagccgacctcaataaaattccagtagttccagtggagcacccgactatgcaggtgctcggcttgagctactcgatcacttgtagaccagggccttggcggtctcgacagcagccatcagctcgtcgagatgcgcgaccagttcagcgcgcagcttggtctcgttgtagccagaacccagggccgcttcttccagcggacggatcaggttctcgatggtgccggcgaaggcgcggaggtctttctgagttgcagcggcgaaggttgccatggttcagttccttgtgttatggatggagtcaggttggacggggctgtagctcagcccgccggtgcggtgtatacgaccttggtgatagcaccgttggctacggtcaccttcacggaaccaccgccgtccacgggcagggtgtcaccgttcttcaccttgtaggcggtgagcgggtccggtggagtagcgccaccctcgccgcccagggcggtggctgctgcgatcacagcggtggccttggccttgacatcggcctcgtccatgtcgtgcagggcgatgcggttgtcggtgccgggctggcatacctggtagaaggtcaggccggtgttacggccagcgaggtattggtcacgggtgttcgccatggtcagtctccttgattcagggcgttgcataggtccagggcgtcctgataggccgctacagcgcggatcaggccagcctgggtggtagggtcaatcagtgggtgttcgcacagcacagcgggcgccggggcggttgcacaggctgtcaacgacagcagcaggcacaggccggtcagcccacgggcggttctggtccagggcacggtccacctcctggcgctgggtgttggtcttggcggcaacctcctggacgtggcgctgtaaggtggcatagcgcacctccagggcctccgcacgggccgactgccgcttgatctcctcctgggcgatacccaaggcccggtagctctgaacgaagccgtatgaggctcccagggctaccacagcaaggacgagtattgcgacgatggttcgaggcattgcttgatctccgcgttgcggcgattcacgaggcccttggatacgaccttctggccgtcgatcgtgaccttgttccacatggccagggcttggcagccctcagtggcgcggccttggttgaagcgcttgaacgctgtgctggttgtacagactggacccacgttgtagcagaagaacgtcagggcggtttgctcgttgacgttcagcggcaccttgatggcgtccaggacgatgcgctcgaagcgctggtagtccttgagcgtcatctggtagcactgctccggtgtggctttgtcacccatcttgaccccggcagtggtgccagagcagatggtgggtacgccggcgatgtctcggtaggcagtggtctcgctaccttccagggcgacaaggccggcgagggcagccgcaagggctgcgccgcgcaggggcttgttcacttcttgaacctccggcgaagctccgcgatgctatcgagcatcttcgggagcagggtgatgagctgggcgcccacgtagagcgcggtgagtaccgcagcacagaggctggcgatctcatagggcgagtaaacggcgatccccacgccggtgacggcgagggtgcctttgcccgcctcggtggcggtatcgagcatcatagtcttcgtccttttgggcggcccttgcgacgctcccggcccatgccgagagaccgaaggacagacttagtgtaacccatcgggttgttcagccattccttcttggcagcctcttcacgagcgcgggttgcggcttcgtcgtcctttacgagcgtgggtgctagctcgcggacaaggccctcaagggcatcgatccggtcgtccttcggcagtgagcctcggtcggtggtgatgttgtgaatctggtggaacacggagcgctcattgcgcttgtccgctgggtactgctgacaggccacatggtcggaatccatcgccgatacgtggaagatcagacggtgccgctgcatgatgggccgcagggtgtcgatgatgcgacgctctttctgtccggacttctggcggtcttctacgccgatcccctcatagcggggcttgttggtgtccgggtcgatggatcgcatgtggttgcggaagagctggccaactgcaccagcgccgaggtttttctcgacatagatcaccttgacgccataacgcgcagccagggcaatacatttctccaggttctcctcggcaaagccacccttccagccgccgatgctcacgacgtggatgtacgggccaagagtcccgcccacggcatacgacagctcgtcgccaccgtcgccggcagggtccacgaacatcgtcatttgctggagtggtgcccagccgccagccatcagcgccggcaggtacagctcaggtttgatgaccgggaatcggtgggcgtcgaacttgagcttgaagcgctcatcggcagcccaggccacttgctctggcacgctctcatgcgtggcgtcgatgaacagcaggtcgcgcagcttgagctgcatacgctgctcgtcggcgaggctggtgtccagcatgtactgaagctggaagccctcggggccttggtcaagctccttgtcgagcaggtcctcttcgttgtagcgctgcggatcggcagcccagccacgggtcccatccaggcccttgccggtgcgcgggttgtggcctttctcctccaggcgggcaatgcgcgccaggatggaaggtgcgagccagtcaccgtagcgttcctgctcatccagggtcgggaagcggcccggccagatgcgcatcaggaagccccgcgccggcaggccgttgtagatcgactcacgggactgcggcgtgcccaggtagagaatcttaccgtgggtacagatagaggtgaactcctgcgactgtcgcgtcagcttggcccgctcggtggcggtgaggccgttcttcgtggtctcgatgtcgtcagggatcaggatgtcagcccggtagccctggagggcagcggtgatcccgatgcagttgatggaggccgatttctcgacgcccttcaatgcccagttcacgtcgaagctggtggccgaggtacggtcacccatgcgggcctcggggcgcaggtacgccagaaggtcccagtgcatgatcagcttcgtgatcaactggccgttctcctcggccttgtcaccggagccggataccagcatggcgcgggtagccgggttctgagtgatgcaccagaccacgtagatacaggcgatggtggacttggcctcgccacgctgtgcagcgaccatcgccttgttgggcgagtcctgcatgaagtcggcgatgtcgagctgcatccacgtcatcttgaagccgaggaacagcatggcgtccaggcagaagtcccggaagcgcgggtacatgtcccgcacctcgtgggctatctggaatcgttcttgcggcgtcatgctgcctcctagtgggtgtacagtcgttccatctcatcgtcggtctcaccggcgatgaagccctccagggcgatacggcggttctccgcctgcgcctgccgcatttcctcacggagccggtcgatgttgatggtgtcggacggatcgcaggtgatctcgttgtccttgaggaacttggtggcggcagcgatatccgatgcggggatcgggatgtcgttgtccatgtaccacttgaagttgcgttcgatggcggtgcagaccagctcgtgaagcaggcccagccgctcagcactcgcggtctgctttttgctcattacatgtgccctctgaattggacttggaagcgtaggttggttcccatgccgcacttgaccagaggccggaacaccttgccggtgtccacctccaggtgctcctgggtgtagttctcgttctgcgtgcgaacgtacatgttaccgcctcgggtgtagggtacgatgacctgtgcccacgcagttgcgccggggcgcttgtcgtcgagggctaccttggcatagtccacttggcccagctcaactacgatacgacggccctgctgcacgttgaagtacgatagggcgccggtcttgtctgcgcggacgaacacaaagacgtagttcatattgctgtcgaagtccaaggatatcgtcgagatacccgcgtcgatgccatcgccaatgcgcacttcgttggtgccgtcctcccagccgaggtaggtgccgtcattccgcagcatggtgcgccatacccggacgaatagcccctcggaggggtcctggatggcgacccctccgtcgcagaagtcgagcacgtcgctgatgtcacgacgtgccctggcacctacaaacttcgacttggccttgggatcgaggtcttcgttgaagtcgtagatcagtgccatgggttatgccctcgccaccgagaactccattgtaatggagaactcctgagtgttgttcttgactacgggagggtcgatggtgagtgcgtagttccgcccattgtaaatctttaggtccttacagccggtgataccccccggcatgttgccgttatctacggtggcccgtagcataagctgacccttgtaggtgccgcgagtatatcgcgggtacagcttcacccactgaccgtcttggacatcggcaccggacgcattcttgccgtcgatccgtggactctcgttgtagaagatgtagcgctcaccgtagaggttacgccggttcgcgaagggcagcggggtgaggcggatggtacgctcaaccccggagatcacgaacttggcctcggccatcgccacagccttgctgcgcagctcatactgtacgtcgagaatctcgtcagcctgaactaccagggtggtgggttggccggcggcgtctttgatccgggtgtaggatagtggagtacctgccggaatcttcgcgccggtgttactctcaaaccccaccgcggattgagctacgatgcccacggtggccagtacctgaccggccagggtgcctattgggaagcgccaccgcttgtgccagtaaatccactccccgtccaggcccgaggtcacgtcgccgttaggggcatacgaggtggtgcgccgaacttcttccggcagggagggcgcggcggggttagggtccgcagtgctggtactcacggccagggcctgggagaacaggtcagaggtatccatggcgcaaatccaatcaagacctgcgttagtgatgaggttgtcgaaggtgtgttgcgccaggacttcacccgtggctttcatatgggtcaccgtgtagcgacccttaactcgcgtctcaaacattggtcagttccgcctgtttaattgctgttgaggtggtgaaggcgtaaggctccacgatatactcagagtatacgaccacaaccttcaactccgcgcctaccactgcggtctgcgacgagaatgcgtaaggttctgcggtgtagtccttaaccgtatcgcgcagtaaaactgcatggatggcaggtcccgtcaggaacccatcgccaccgccgtagccgagctgagtcagcgaccgcagcagcacgcttaccacactggaggtcgcgtggtaggtgtcctctccgggctggttcaacacctcgtgcagggtgtcgcgtgttagcgctgccacgatgttcggcctacaagaccatgcgtcatccgtagccaggatgggatatgggtaggtcgccaagatgggcttgggccgccgaatttgagaggccatgatgcccgcgataatgccgcgcattattcgtcctccatggctccgaacacgatccagtggttaggcccgagacgcttgagggtacacacgccattctcgccgtagagctgcatggtggtgttctgcaaccggttgatggtcacgccggggccggccacgatgttgaggtcgcgcacacccgcctgttcgaagtgaacctcgctgaactcgatccagggtgcatccgggtcttccatctgcatggtcagggtcagcggcttatcagcggtgatgcagcggttccagtaaccacgccagctcgggtcgatgtccgagtcttccgtaacggtgcgaatctcggcgaagcccagggcgcggcgcagcgcttcgttagcggcgtcgagtgcctcctgtgcaaggcggcgggcctcctcggcgatacggatcgcgtcgagaacaccatccagtgcgaggttcgcggtgttgatgccctcctgcacggcgtacagaagctgcttgttgttcgcgtcgatgtagcgaggcaggaacgggatgccctggctgaactgcgtatccggcacttgggcgggggtgtcgcggaagatgcggacctcttggccctgcttaggcacttccgcaagctgaatgttggtgttgtccacccacgtatagtcggtggtgagtatcttgtcgacctggacgaatacgtcctcacgacgcaggaatgggaagtcgagactgaatacagtctcgaccccatctgcaacgtggatggtctcggggttcttgaaccgagccacgctattcccctttgatggattccaacagcaacttggttgccgggaacacgttgacgaaaggcagtgcgcccgccgcgccgttgacgatatcgccagtggctgctgccgggtcgtcgccggttacgaggtctcgaacgcctcggaacacttcgttggagtgttcagccagtccgaagaccggagcagacattcgggagtggccagtgaccacaccccacatatcggcggtgaagcccagaccggcagtgtagccgatgccgtcgatggccatcttgcggatgccttcatcagaggtgtcgaacttgccgttgatcgctgccttggcacccatcatcagcgcggtgagcggatactggaatgcgaggagcgaggccacgccaagcacgccggagttctcataggttccccggaggagcttgttgtgcgcgaaggccacaaagctgcggaactggcccaggatttggccgacaggtgaccgagcaaagcccgagttctgaccgaccctgccgtacagcagcgagtcgtccatgatccgcagtgcggtgttcatgacggtgttcacgtctgcttggctccaggcgccccaattcatcgattgggcgttccttcctctgtatgtgacataaccgcgaacccgcgccaacactggcgtccagtccacgtccttcccgtactgctggagcacgcgaagggctgcttcatccccctgagccgcccgcgccaccttgttcaaggtgaggttggcgttcatacgggattgccagttgtgaatgaacttcatgccgttgagcaccgggacagcctgcttacctgcgtgcaggaagcgatccatgaaggtatcttggctggccaggaaggtgtcgaactgccgcttccagggcttcatccggatatcgttggcgaggttcaggccgaggacggtctgcatctcgtcagcgaggtccgggtcgcgacgcatggcgcccacgaagtctcccaggcgggagttcagcatggccttcatgacgttgaagacgccttgacggtgcgccatcgtggccagctcggcgagctgatacacgcctgagaatcccagcatggtggcgctggtcaggccgctggcccgctgagcaaccgggccgagctgatgctccctcggcacgttgccggtgaagtccccgaagactccccgcagttgccccgtcagctcctgcaccttatcggtgcccaggtgtgctgcctctcgctggtactcccggatgaaggcttcgatctccgagtcccccggcatgcctgcgcgggccaatgctgagcggcccgacatactgccggcgtagttctccatcagccggtccaggtctcggtcgatcaggtcctgcacccgatacacggttccgttgtggttgatctctgcggtcatgtccagcgacagccggcccttgccgtacttgacggtgccctggtcggactgcttctgctcgatcttggccatgatgctgtcgaacttggcctgggacacgttggcctcctccagcgcctgccggatgaatgccgtgtccgccacgcccatcgcgcccatgaactcggagcggattccggtggcccgatcccgcgcccgctgcacaatggcctgtgcgatggtatcggcatcggcgcgctccagcccagggatgccacggaacacggcctcgctgatggcgcggcgggccaggccaggggcggcctcgtccatctgcgccatcttcgaccagttccatgaacggtggaagtaccccggtcggggagcgaagtcctcgaagccacgcacaccggcttccctggcgcgctggcccatcagaccgtgaatctcgtctgagcggtcggccagggccttgatggtcggcggcaggttcgggtccacacggacgctgccgtaggccgtccactcgcggtcccggcgcagcagctcgcgggtgacctgctcgttgagctggtcccggactgccatggcgcggcgggagttcagcgcacgtgccgtcaggcccacaccctgctcagccattgccttggccatcatctcgtcgtaggacttcacgtaaccctcgaactcgttccgatagcggcggagatagctcgctgcgttgtcgttcgtgctgaacccatcccgacgtaccgggtcgtcgataagacggctcaggagtcgccgtgcgccctccccaggctgtgccaggaggtctgcctcgctgaagaacctgttcacgaagccggcaccctcacgggcacgttcacgggtggtccgcacgatggtctccaggctggcctcctcggttaccggagcgcccttgttggcccacttggcctgcgccttagtgtagccgggcatggcctccataatcgtctcagaggcggccaggacgcggctcagggccgtgtcagcatcggaccgcagacccagtagggtgcggatgccctccacgaagcgggaccacaggcccggcccgccgtcactgtagcggaggcggttcagggtcctttggaagcgggtatccgtcaggccccaggctaccagttccttgacgttggccagggtgttggagttaccggctagcagcgtctcttcgaactcggacagttgccgaccggcggcgcggtcctgcttcagggcgttgagcacgttaccccggacgttctccagggtctgcatggcctgagccaccttcggactcatcgcgccaggattccgcaaggcggcgttcatcacgcccacggtggcagcgtgaaccgcctcgtggagcacggtcaccgggttggtgccaactcggccaggtgcggtgctgccgcgtacctggaccaaggtgtcgaggccctgggtggagtgaatccccgccgtacccggtttgaggaaggcagagctggcagtgtcaccgccctgcaccacacggaacgcggtacgctgccccaggccctccagggtcctgatagtatcagccaccttggcggcgatgccctggagcggcttgggcacctctgcgtgggtcttgaggtggtccaggacctcagacagcttccggcccgacaggctatgcagctcgtcgccgaaggcagtgtcacgtcgcggaatagccggtatctcagcctgctccacgcgggcactgacacgggatagcacagtgccctcgtccagcaggtctaccacgtcacctgccttgaagccgcgtgctgcggcctcctcggcggtcatggctacttctggcagcccgacagtaggcgccgatacttcgggcacatgcggttgcgttggggcctctgcggcaatgcgtcccgcaccagaccccagcagagcacccacgccagcgccaagagcaccagccatgatgtaggttccggcatccacgtcggcccctgcggcatccagcccagcaacatacccgacttgcccagcgccgccagcagcagccatgccagcgcgaccgagccgcagagcacggccagcgccgaaagtaaccgcatcaactgccagagcggcagggtccagcatgccagccgcgaagttccagtacgggttgtcccgcacgatttgctcgtcctgctcataccgttgaatcctcgacaggaggtaggccgcgtcctcggcattgccggcacgggccatgatctggagatagttgtcagtcggctggatacctgccgcctggagcgcctggaccccataggtcccagcgtcgaagttagggtccacctcgccggtactgttcgccgcaaggtctgcgtcgagctggagcgcatcgccccagcgtccgacgagggtggactggttccagagtgcggaagcacggtcaagggccggcagttcctggtccgctacgatgcgttccagttcccgcgcattggctcgttggcccgctgccacgttccgttctccgatctcgccacccgtcagggcgtcgaaccccacggtaggcaccgcgtcaagttggccctgtacttgggcctcgtcgagctgtgcttggtcaaggggatacttgggcgtcatgcggcccttgaattgctttgccatgtcttactccgctgttgcggcgctgtaccaatcgacaccgatttgactcggtgtatcgaagtggggcgccatgcgcttgatgaatgcctcggcccggttgggcgtctgcgtgtaccacttgctgtttcgcacaccagcctcgaaggcttccttgttgcgatccttgatcgcctggaaggtgttacggaactgccgggcacgtccttcgcccatctggaaggccataccggccaatcccaggatagaggcattgttcgtaacgcccagctcgtcggccaacctcacaccctggtcgagtgcgcggtcggtgtcctcggcgaaccactgcgcggcttgctcgggcgtgactgtagtgcctgccccagcattgccactgcccaggtaatgccccaggcccacactataaccatcggcatccttatacgcctcccctcggtaagcctcgaactgagccagttccttccgccagttgaacacgtcctgcttcagcatgccggcactgttgcccccgttcatgcgaatgtccgtgccactgaccttgacgttggccccgtactcggcgccccgcatagcgttcagcttgtcggagttgcgcttgagcacctcgttgcccaccgcttgtgggtccacacgggtgcggtccagggcgaccccgttctcgtcgtactcgacggccaggaggctgccactggtgcggtcgtactcgaaggcgactaccgacttgtagccgaggagtccttcgacatgcggcttgtgctgctcggccaggacggttcctatggtctcggtgtcgttggtcccgaatagctgctcggcggtggtgccgcgaggcaggatcagcggcgcgctatcgcggcggctgaataggtccccttccttcaggttccgaccttcgcctacctggatggtgcggttacgcacgttggcggcggcgatctccagcagggcctcgcggcccgtgtcgctggtgagcagacccgcatgcttgcggtcgctggccagccagttcgcctcgtcgatggtcgcccggcgatacatgctcaggacggcctcgttgttgctcaggtcgctctcgccggtcagcatgttccaggctcgaccgaagatgttgttcacgaacttgtcgttgacctgcttaccgaggttgtccttgaatgccttggtgttctggcctttctcgaactcgtccatctgcttcacgacttcggcgttggcgctaaactcgcgcagagcttgagctggtgcgatgcccatcttcatctgcttgagtgcccaggccacggcgccctgctcggcttccgggatgccggatagcatcacgttgccggcggatgggttgatctcctgggccgaggccacctgttcgaagatgctgttcagcgtgttgaccagctccgggtttgcctcgccttccttggcggcctggatcatgcgcaccgcgctgcctacggactcgccgtaggtcttggggaaggtccccaggcgcaggccgagctgtgtgccctgcacgagacggtcagtcaggcttgagccgttggcggcctgcatcttgtcccactgctccagcgcctcggtgacgttggtacccagcgtgtggagggcgttgatgtctccggcttccaaggccgccatgatgccctgcatgcgctgagcgttgcccaggccggtcatggccttggtcatgaacgagatggcctgagcgtcgctccagcggccctcctcgaccatgcctcgtgagtacgcctcaacctcggcaaggtctgtgatggcgccgttggccacccgctgctggaagtccgcgtcggcccgcagggtagccatcgattccttggcgcgggtctgagccttcgacttttcatagaggccgttgagcgcacgccgatcatcgaaggacatgctgtccaggaacccggcatcgcgcaggccctcatagatgccccgctggttcatgtccaggctggccgccaggaactgcatgcctaccttgtcgcgcacctccagcgggatatcctcggaggtcatgatgttggtatagaacaggccggcctcttccaggctgagctgccgggacagttcgtcgccggtggcctgagcctgcacagccttggccaggatgctgttaccctgggtgcggaagccacgggcggcctggtcgatggaccagtccatgtacgccttagcctgcatgccgaagagctgttcctcggccttctgctgctgcgccagcgcctgtaaggcatcgttggggttcatgccctcggtcgaatccaggacgtgcgtagcctcctgggacaggtacttgcggaactcctcgggagtcatctcccggcccttgttggcgatgaatcgctgcatcttgaggctgaagtcggcctgagcgatgcggtagtcctgcttgcgccagccgcccttcacgaatggtttggccagtacgttgctgtctactgcctcctcagcctcgccggccatacgggcacgctcaccgcgcagaacttcctgctgcacgttgtgctcgaaccatttgccagcgatctgctgaccggcacccaggatgccgtcgagaatctgcgagcctacgctcgggccgctgtagttgatctcggagtcgcgcactccgcgccgagcactctggcccggctggagttgcgtctgtccgacgttgatcccaagctcttgggaagcacgttgcgattccgccatcagttgcctcctttaggcgtggcgccgaacttgaagtattgacttgcgtacagggaacccgccgacatcaggccggccaccagcggggaccgttgccccgccgtggtactcttctgccccagcaggccggccttcgcctgagcctggatggagtgcgcctgctcggcgaggttccacatctggttgtccaggttgtcgtcaatctggatcagggcctccccgacctcgcgctcgatgtccagggccaccgcatccacggatgcacccttgacgccgaacgcgccggcctgagcctcggcactgccgccggcgagcatcccctggcgcttggcctccacctgcgaggccacggcctgcttgcggtagctagcggccatgacgcccaggttggcgatgtcgcgggcagcggcgcccaggttgtcgaggtccgccttcagtcgagccttgttctcagccttgatcttcttgcgctcttccttgttggccataccctgctgaagggctgacatgccgccagcggccaatagtggtagccagaaagccatcacaccctccggtagatttggttggacttgaagttgtactcgacagcccggacgttcatgtcgtacggactatggcagctcagctcgaacttggacgtggccatatcgacccgtgccggcagcggcaccacagcgctatccaccagaggctccccggcattgagttgccggctgaacaaccgaaggggcgtcgtgtcgtaccacggctggttgggtcgagccgtgtcgctgatgcgccacaggaactcgccagtccatccgaagttcacgctgtaccggtggagcactgcgcgggtcgcggtcatgggcagcccgttgtggtcccgtagcaccggcggagtgaactccaccttggaccagaactcacagccgaccacgtacacggcaccgactacggcctcgggcacgtcgaggaacaccttcgtattcgtctcgcgcttcacgccgaggtgggtacgttccatgtaggcaccggccacgggctggagctggtatacggcagaggcatccttgatcaggtcccaatgctgcttggtcagctccagctcaccatcgacggtcgcctcgatacgccgccagtaatcgtacttcggatattgcagaccctcgcgggctggcaggctgttcaggtgcatccggcccagggcgatctcctggcccttctggatcaggaccatcaggttgtcgccggtgaagtacgcgccgatgatctgatgccgcagcgtccatcggtggaaggcgttctggactttctcgttgccctgccagaggtactggtggcagatcatctcgtccgccgtgctggtgccgaacaccaggtagccgctggaggccgccgcctggatgtactcagccggccccggcatgtagctcgggatgtggctggtaacgtcctcggcgacgtagtggctgtccgtggacggcgacggggccatctcatgcaggcccatgaaacccagggcacgctccgcagcgaagtacacactgcggccagtcacggcaggtgccgccctggtatcgaggtcgtactgcgtggtgatgctgataaccgccgtacggggagttacaatgccgccaccggggaccacggcctggtacttcttggcgaagacgatcaagtccttgttgaaggtgaccgcgtgctcgtacggttcagtcaggctcccctgggccgcgatctcgataggatcatcgtcgttcagcgcggctgccgacttcttgaaccagcggtgcggattgttactggccgacatgcagacgtactcctgcgacaggagaacgaggcgaccctggaaggtcgtcatgccggtgatgcctcgggtgacgaagttgaacgtggggttcgtatcctcgtcgccggagccacgtcgatcatactccaactcgttcaagctgtaggtgtcggtagcctcatcccagcgcagggccagtggcatcttcttcaggacccaatcggtgccgtaggcggcccgctctgcccagcggcggttagcggaatcccactcgaagtataccggggccttggtggagccggtggccatgacagcgccgtccatgaactgcacccccacaccaggggcgccaactcccggcagcaaggccggcaggtccgccgtagcattgaggctcataccacctgacgcgatgccgtagttgttgcccatatccgtggacacctcgaccacgatgtcgccgtcgccccggaaggcgatgtagccgtcctgcacgccccgctggttgagatagccggctaccgtagccgcagccgggtcagggtcaaccttcgggtacttcttcgtggagttgggcagggcgtactccggggcgccgaagaacttgccgtagagttgccaagcgatgtagcccacgctcgtttggaacggtgcctcagcgaggttggggttcgtgctggcgttgtccggtgtcacgtaggtggccgtgtgactgtaggtggtgcccgtggcgttgtccttgaccttgatggtcagggagaatgccttcgaatactggcctgccttgacgtacagccagccggccttgttggggtctacgcccttgatgtcggtgcggtcggcctcgggcttcacgctcaggttggcgatgaacaggtcatcggccaccgtggcggcccgtagctgcctgtaatcgttggccttgaggtagtcatgcaccaggggctgacccatcagcaggcgaccgtcccgctcgtcgaacaggtacagctcaccacggtgctgcgccaccagcatcgcaatgctgcggccaccgaggttcgtgtggtagaggaacggcctcggccagggctggtcggtatgcaggtgggccatcagctcgataccgctgcgccgccgaagtcctgacacgggatcggataccatgttgatctgctcgctgagctggcccggcaggcgctcgaagggcacctgctggctcacacccatcagcagattgggatacgcggattgcttgtagctcatgctcaggtcctcaagctgcgccgccaccggctgaagctacgcttggcctgggtgttcagcggacgtgatcgggtgtgcatgcgggacagttcgttctgatacgcctgcaattcctgggcgatgacctgggcggtctcgtccggtccaatctcgtgggtgtataccgcgagcgcagcctggtgcgcaatgacgcgctgtgcgatctccgggatacggtcccactcccgagacagcaccaatcggccctcgaccgacttaccgatgcggtcgtcgccggtgttggcatctcgcactcccaggccgtcccactggaggtccggggaatccgggtagaatgccaaggtgcccttgggcaggttgatgcggcccgtgggatcaggtgtcagcttgtgcttccaccaggtgttgaaccaccagccttgggtcagcaactggatgcgttgatcttccagctccgggagggcgatggccatggttggatacgtctcatccatgctcgggatcggcagctcgccgatcttgcgcaggatgacattcactgcgtcgagtagtagcatagggtttctcctaaagcgcaaaaacccacgcagggaatctgcgcgggtcgttaggctttgaagaaaccccacaccgaagtgcggggtttcgtggcatcacgcggtgatgtcgaaggcgccgatacccttcagttcgatggcaccagcggtgtccggacgacgggcaccgatgttgtacatctggaaggtatccaggacccacgagaatttctcgttgtcttcccacagcttggcctggaccggcgccacttgggcggtgatcagggtcttgctcgggaggaacagggcgatctggcgctcggactcctcggcgctcacgttgaagtgacggcccagcgggtgggctgcgattgccttggtggcgaagcgcggagtctccagcaccttgacgccgttgaggatggccacgcgggacttcacgtagtcgttggtcgcgccggttgcctggtactcgacgttcatcagcttgtcgtgctccagcagcaggctgaacacacgcggcgacatcggggtcaggccctcggagtagaccgcatcgcccaggtcgcggtcgatgaaggtctcgactacgcggcggtgcatgcggacgatcttgtcggcagcctgcttggcggtcaggccggtcaggtccagtttctccagcacgcccggcgagaacgcatcttccaggtccaccggcgcgtccatcgcggcagccttgatcacctggatcaggcaggcttggtcgaacttgcgagccagttcctggccgtccagctcggcgacttccttgcgcatgtcgaaggattgggtccactcgtcctggtggtcgaactggtggcggaggtacagcagggtgtcgacggtcaggttccacttgtcgttcacgactcggctgcgctccagctcttcaccggcgcggcggcccttggcctcgacgttacccaggcgatccaggcggaccacgttcgagccacgcaggtcgcggatgttcatcagcggtgcgaacttggaggtgtaggcgaagtgcttatcgacgatgccgaggtgctcttccaggtggatgtcaacgtccgcgttcttgccagcgtagttcggacgggtcaggtcgttcaaaaagctcatacgatgctctctcttttggatgtgggtttaaggccggagtagggcagggtcgttagataccctgcgccatgcctgccttacgacgctcgcgcagcgcagccatctcggcttcggatgcgttcagcggcagcttagatacttccaagcggtactgctcagcgctcagagctgccagtgcaggtgccgcagcacccaggggttggccggtagcctgtaccacggcacccgagccttgtgcgaaggccacaatttgcttcgctgcgtactgcatggcctgggcatcgcccgagtccatcagccgaccgatggcggccttggtggccgggtcagcgtgttggttgaagacgccggcagcctgcttcaggatggcctcaccgccgacggcggcataggtctggctcaggacggctttggtctgcgcatcaacataggtcaggacgcccttggccacgttgatgacgtgctgcgcctgggccgggccgagaacttccttcagatagtgctcgtcgatgaaccgaggatcgcggttctcggcggccttgccgaaggctcggacggtatccagtttgtcagagaacgcctccagatagctgatggagggcgccaactgcgggtcgccttcgaggttccctgccaaggtgcccacgatctccccgttgggagtgaaggccggcggcggcgggacttccaggttctcgggaagaactgcacccgcagccggcggagctaccggggccggctgagcgggtgcttgcggaacaacgggttgacccacggcaggtgccgctaccggctggtagtgcggcgtcatggcgctggtcggaacgggttgcggctgctgagtcgggatggccagttgctgcggcgcacctacctggccgggctggaccggagcctgcggctggatcaccgggttcggcatcacctgcacatgactcggtgtcggcgcggcggcgggcggtacgttggcaaccaggttagcgaggcccggcggcagttgctgttcgttcggttgggacatctatcagactcctgcgagtgcgttggtcatgtcggaagcgccttccagcaaggtctcttgcgcggcctgggcctgcgcggcctgctgacgctgctgctctgcctcggcctgtagctcgtcggcgctcttgtagaactgcgacgtgtctacgctgaaggctgcccaaatcgtgtccatcatcttcggtagcgagatgcggggatcgagctgagcaatcggggccaggccagcgatgacctgggaagcgttgagcatgctctgcacagcggcggagcgggacagggccgggaggcccgtctcgatagccggtttgtgctgcttggtgatcaagccttggagtagcgcatcatccacctcggagaggcagacgtaggccaggggcgactgaaggttctcggccaggagcgagtaagtaccgcccagtgtgttctctgcctcttccgcagtgatgcgtacttcctcggcagtgacgcgctcggcgtcgcgctggttggcaccatacatgaacgcctggttcaagcgaacgactacggcttgcaagctctgctggatagcagccatcttgttgtagtcgccacgctcgtaagcacggacggcttccgcgccacctggcacgtagtcacccatctcggcgtcttggtagtcatcgactaccgcacccttggcctcgtccacgaggttcaggacctccagcgactccagctcgtacaggccgagtttctcgctcagcagggacagcttggcgaagtcgccgatgtagtcctcgacgtggccgcgaccgtagtgctcgccaggggcgaggttccaggtcggcacgatgtacgggcacaggtggataggccagcggccctccttgcccacacgcacgccgtcgatctcgtggtacagctcggcgtattccatcgccgtgcccctcttgcgctgtacgtgggtgtacaggtccacgctacctgaaccggacaggttgcgtcctgcgcgcatcaggtcctgcttgtactcttcatccaggtccttggacttgtagcgctgctttaggacgatatccatccagcggccagtcgcatcccggcgcaccgcataggagcggagcgaccatgcgaccaccgtagcggcggcgctgtctcggtacagcagagcattgccagtcacgatcagtagcttgatcacctgcgtcaggaccgccagggaggcgttctggaacaggcgctgtgttgctttgcgatccacccgagccaaggcagcggtcacttcggtaatgtctgtgtcccggctgtcggcctcgcggcggatcgcatcagtgagttcggatcggaagaacggaatccccgtggggaacagcgatctcgccagcttggcggcgaggttgttcaccaggagggcaccggcggactggaagtcatgctctacgactccccggctgccggacatgggatcgaccatcaggtagggaagcgtggtcttggcgaactcgatggctcgactctccacgctcccatcccgaagtttctcccacagcatagctgcggtggttttcatggcgtacctcgtcagtagttgataccgagggtttgcgatacgcctgtgcccgcctgattccggcgccgtcgcgtgccggtgccagtggcatcggccatcgctcctaggtcaacctgcgccacgttctcggcggtgaggtcaacctgctggtttcgtgcgagctggtccgcctgctgttgcattaggcggttctgctcttccatcttgcgggcatcggattgtgcgccgctcaggtcggtgcccagcaggccatcagcgagtttgccgatgatggtcttgcccagcaccttctttactttcttgcccataaggcttggctctccggtagtggatcgtgtaccggctatcgctttcacgatggctccagcacacgagggggatttgaccccagccggcctgacggtggagttcgcggatgaactcccggaccacgcctgtattgcggtagcgcggtaggacgtactgccactgtgctgtgacgcacgggccgacgtggggatcgtcctcgaacacaatgcaggcaccgccggccaactggccatcgcggaataccaacagctcggttcgatcgttgccctcgatactgtccagcatcgcattcagggcgtcgtctttcgagcggaagagggtgaattcttccaactcctgtattgccagccagcacagcccctggagttccgagggagtgccggcctttgcgtggactcgccagatggacttgttcatcacttcaactccactgcgatggcatcgcgtcggcgcaggcgtactgctcgcaccacgtctcgcctaccggcctggaactggatgtcttccatcgtggttccaggaccgatctgatgttcggggaaggtctgctctaaccactcgatctgctgagaggtgaacgtgacaggacgggccgtacccttgcctgttctcgatccttccactgtgggtgacataaccataggtcggtgggtcttcatagtagccatctatcatatctcctatgctggttagtctattctatctagaatccttcgtagtcatctagtctcatcttctactctacctctactcttcttctaccctctggtcttccctgacctctttctccctgctcccctctacgagggccttggacggatgcacttgctcctatgtgggtgacataatcccctcagcagaagaacgcccaggagtcccgtacagcctccagattcaacgatcctctccggggcggggtagcctctatcccgagctgttttgccagttctacgagcacacaggggccgctgtacatggcgatgaactgctccctgatgtggacgtgcatccgatccacgtctgccgcataggtgcccatgctgtcgtggatggcctggatcgggataccctctgccgcacaggccagggccgtcaggcccaggtggctgctgtccagcccgtggacgaagttcggagcgatgccgttggcgttgcgtaccgggtccagctcgtccttggcctcgtacagggtgacgtactcgacagcctctgcccgcagcctcacccgcacctcctcggtcttcgggtacgactggaacacctgcatgccgagtggcgtgatccagtgcaaatccttggatgcatcaggaagggccttagcgagccgctggagccattccatggcgaagactgccgatggtactgtctcgcgtattgcgtccagtatgagcgttgccatgtagcttcccaggcggtatgacgggataccctcgggaatctccaggccggactcgtccaggtagtccaggcagtggtctaccacgcccttgaacgtggtgccgtataccagcgtcatgcagggcttcttcgtcaggcttcgggatagaccagccttatcccacaatacagcgtagccccgagcctcgccttcagcactttctctgtctcgtgccagagactctgcaacgagaccgagaactcgggagtagatgtcagctttggcaagtccaggtggcagcaggttgacgtaggctccgccgatctcgtctcggagaatggctgagtagtgctggaggccggagcaggttgcatccatgtggacgatgaacccacttcggtaagcctccggctggcctgatgcgtaggccgcccgcagctccagcagacctgcgatggcgcacaggggcgactcgtcttccgggaagagactcggatagttctccggaccttcgttgagtgctcgctggaagtcgtcccatcgctcatcgacccaggctgcccggtcgtcgaagtacaccttgtcacatccgagggagttggcgacgtggactttgagccagtacaggccgcgcttaccgagggcacgcttttcgtggaatcgcagacacgccttggcgatgtcggacccctggggattcggtgtgccccaatagtacatgcggccacgggagtcaacgtgcatcgggaagtacactgccttgccatgatgctctcgaacaactcggtagagtgcagcaaattcgcgaagcttggcggtatgctctcgctccccggtgtaccaccggtggacggagcgtttccaacggttgaaggcctccagctcttgctcactggcattctccttggcccactcgtcgccgagcgggaactcaggtttgtccgggtaggtgcgctgggggatgcccagcacgccgccaccggaggtgaagacgcgctcgatgatctcgtacacgtcgtggttgatctcgtaggccaccgattgcagcgcgttgaccgcctcgtacaccttgggcatcttgtcccggcccaggtggcgtagctgcatctggcgcgcccgcttggtctggtgcttggtacggcgcactagcacatggtgcttctgcgccttagcgctgtagtaaccgccatcgcaccagtcgttccacggtcgcggcggtgccagcatcacgctacggcctgggcctccccaggtcatcgccgccgaagggtcttgcaggaactccttggcttccggcgacggctccaggtggacgctcgtaccgccccgacctgtgaagcggttcggctcgaacaggccgcactgtatcagcggatcaccaatgaacttgccgaggcgcaggtagtcgccatccggcaggtcgatacgtgcctcttccggcagtaccgcgtccagaagagcgtccatcgtcttctggatgtgccggacgctgcgagtcctgctggtcttgaggtagtccagcgtccggtcgtaatagggttggttgaccttgaaggccaaccgcacttcgatctcgcgacagagcatcttacccatgtgggtgtaatacttcgtcgctgtgatcgttggatagttgatgagcatcgacagcccggcccgcagtgccatgactgcgaggtcctgggcgtcgatgatccgcagcaggtgccgcagctttgctgccggccccgccgccttcgcttcctggtgggcgaagatcgcttcggtcacgatggggagcatccgcatcaacatgatgcgcgccctcgggatgcggtcgatggacccttgggcaatcgccttttccaaggcaatgcgggcgtcattctgcgccgccccgaccagggcctcttcgtgggcgatctgctgctgtatcaggtccattccgtctcctatcgtctttcgattacgcgcccgatatcctcgggaccccactcggcctcggccaggctaaccgccccatccagcgtcatcgctcggtagtcacgccattccccgcagctcagaatctcagcgcggaaccagcgcagttccaccagcttcacttcccgctccaggcgctccgccatctcccggagaatgtccgggagtatgacatcgctccagtcctgatggctgaccatcgccggcgtgatgtacgctgtgacgtagttgaccccgatgccccgctcgttgaaggcccagatgacccgaacaccttcatcggtctcgtgctgtcgggtacaccaacagattttactcattacctttctcccggtccatcagggcccgctcggcggcggccattgcgttgaatgcctcatgcaccaggtgcatcaggttggactcgtcatccagcggtccgtcgatcagccgcttggactcgtgccggtgttgggcggacttgaactcgcccaccgtcatcttcttccagtcgtgcggcagataccccttgacctcggcagcccattgcatcattcgagcaagctcccgcttcagcagcgggaacccctcgactaccaggtgcatgggaagcttaccgaccttgcgttcttccagactcgcacctttgcggtacggttcagtcgtgatcgtcgactcgtaagagtccgggaatgctaggctcatgctacctccttagttgctcagcagggctttgcgctgttccgaggtgttgcgggtgtaccgcccccggctccagccaccacagccgccgcagtgatagtgctcgtacttgccggtctgcgtatgcacccagccctcttgcttgacatccgtgtcgccgcacttcgggcagcggatggtcggctcggcgtcattgaagtacacggccacgttgggatggccgacgaaccacgggcgcatcagggtgtacagctcctccatcgatcgtacgtcgtcgatgttgtacaggcgcatctcctcccaggcttccgggttgtcctggaggcaggctgcccacaggtcgaatccggggaacttgccgtggaggcgcttcttgatggtgcatgccttgtgggtcatgtactccagcttgcggctggtgaacgcgaattgctgcttggcgatgatcaaggtgtcgatcaccttgaacggtctcggcggcggcatcttgttcaggaagaaccgggcgttgatcttgggcacgtcgaagcgcttgccgttctggacgatgatgatgtcggcctcgtccagcagcttatgcagggcgaccagcaggtgcatgtcgtccagggggtcaccctggcagtccatgtagatcacctcgtcgctgtgcatccacttcgcacagaacgacaggatggtccagtcccgcttgatctggttgaggcccacgttctgcttccagagcgaccagacccagccctcgataggcgaggtctcgatgtccaggctcagcaccttcggaccctggcctaccacgttgcccacggcgccagggaacttgcgcactacctcggcagccttgcggcccagccagtgcatcgcgcccttcttggcgtacatgccgcgcgtcctgctgtcgtggaagcccagcttgatgcaccagttgcggaagcactggcggctcacctcgccgaagcgcgaatgctcggtcaggtgctcggcacccttcttgaggcccagctcgacatagacgtttcgcaggtactcattggtgaattgcttgcggagtttgctcatacgttcctcgcgttgtgctttgcgacggccatcgccgccttgcgtttggcggctgcctgccggcgcttggccagcttcgcttcgtgtttctcctcgtcggtcttgtgcagggggtagatcagcggatgcttcggcccctccagatacgtcaggagggcacgaaggtaggggatgatgtcggaatacttcatcgacttgcatccccaggaacctgccgcattcgttatcttgccttctgcggtgttacaggaccggtgcaggacgccccgcaccagccccgtttcgtggtcgtggtccatcaccgcttcgcccttcacgctgatatcgatgggcttgccgcagagcgggcacagcttgttctgctcggcccatagcttcagggtgaaggtgcgctgttgactgcgcggtatctggtagaccttcggctcactcgtcataatcgctctccctcc

SEQ ID NO: 7 - DNA, 42717 bp, unidentified
  source 1..42717: mol_type = genomic DNA
gaacccgcgccaacactggcgtccagtccacgtccttcccgtactgctggagcacgcgaagggctgcttcatccccctgagccgcccgcgccaccttgttcaaggtgaggttggcgttcatacgggattgccagttgtgaatgaacttcatgccgttgagcaccgggacagcctgcttacctgcgtgcaggaagcgatccatgaaggtatcttggctggccaggaaggtgtcgaactgccgcttccagggcttcatccggatatcgttggcgaggttcaggccgaggacggtctgcatctcgtcagcgaggtccgggtcgcgacgcatggcgcccacgaagtctcccaggcgggagttcagcatggccttcatgacgttgaagacgccttgacggtgcgccatcgtggccagctcggcgagctgatacacgcctgagaatcccagcatggtggcgctggtcaggccgctggcccgctgagcaaccgggccgagctgatgctccctcggcacgttgccggtgaagtccccgaagactccccgcagttgccccgtcagctcctgcaccttatcggtgcccaggtgtgctgcctctcgctggtactcccggatgaaggcttcgatctccgagtcccccggcatgcctgcgcgggccaatgctgagcggcccgacatactgccggcgtagttctccatcagccggtccaggtctcggtcgatcaggtcctgcacccgatacacggttccgttgtggttgatctctgcggtcatgtccagcgacagccggcccttgccgtacttgacggtgccctggtcggactgcttctgctcgatcttggccatgatgctgtcgaacttggcctgggacacgttggcctcctccagcgcctgccggatgaatgccgtgtccgccacgcccatcgcgcccatgaactcggagcggattccggtggcccgatcccgcgcccgctgcacaatggcctgtgcgatggtatcggcatcggcgcgctccagcccagggatgccacggaacacggcctcgctgatggcgcggcgggccaggccaggggcggcctcgtccatctgcgccatcttcgaccagttccatgaacggtggaagtaccccggtcggggagcgaagtcctcgaagccacgcacaccggcttccctggcgcgctggcccatcagaccgtgaatctcgtctgagcggtcggccagggccttgatggtcggcggcaggttcgggtccacacggacgctgccgtaggccgtccactcgcggtcccggcgcagcagctcgcgggtgacctgctcgttgagctggtcccggactgccatggcgcggcgggagttcagcgcacgtgccgtcaggcccacaccctgctcagccattgccttggccatcatctcgtcgtaggacttcacgtaaccctcgaactcgttccgatagcggcggagatagctcgctgcgttgtcgttcgtgctgaacccatcccgacgtaccgggtcgtcgataagacggctcaggagtcgccgtgcgccctccccaggctgtgccaggaggtctgcctcgctgaagaacctgttcacgaagccggcaccctcacgggcacgttcacgggtggtccgcacgatggtctccaggctggcctcctcggttaccggagcgcccttgttggcccacttggcctgcgccttagtgtagccgggcatggcctccataatcgtctcagaggcggccaggacgcggctcagggccgtgtcagcatcggaccgcagacccagtagggtgcggatgccctccacgaagcgggaccacaggcccggcccgccgtcactgtagcggaggcggttcagggtcctttggaagcgggtatccgtcaggccccaggctaccagttccttgacgttggccagggtgttggagttaccggctagcagcgtctcttcgaactcggacagttgccgaccggcggcgcggtcctgcttcagggcgttgagcacgttaccccggacgttctccagggtctgcatggcctgagccaccttcggactcatcgcgccaggattccgcaaggcggcgttcatcacgcccacggtggcagcgtgaaccgcctcgtggagcacggtcaccgggttggtgccaactcggccaggtgcggtgctgccgcgtacctggaccaaggtgtcgaggccctgggtggagtgaatccccgccgtacccggtttgaggaaggcagagctggcagtgtcaccgccctgcaccacacggaacgcggtacgctgccccaggccctccagggtcctgatagtatcagccaccttggcggcgatgccctggagcggcttgggcacctctgcgtgggtcttgaggtggtccaggacctcagacagcttccggcccgacaggctatgcagctcgtcgccgaaggcagtgtcacgtcgcggaatagccggtatctcagcctgctccacgcgggcactgacacgggatagcacagtgccctcgtccagcaggtctaccacgtcacctgccttgaagccgcgtgctgcggcctcctcggcggtcatggctacttctggcagcccgacagtaggcgccgatacttcgggcacatgcggttgcgttggggcctctgcggcaatgcgtcccgcaccagaccccagcagagcacccacgccagcgccaagagcaccagccatgatgtaggttccggcatccacgtcggcccctgcggcatccagcccagcaacatacccgacttgcccagcgccgccagcagcagccatgccagcgcgaccgagccgcagagcacggccagcgccgaaagtaaccgcatcaactgccagagcggcagggtccagcatgccagccgcgaagttccagtacgggttgtcccgcacgatttgctcgtcctgctcataccgttgaatcctcgacaggaggtaggccgcgtcctcggcattgccggcacgggccatgatctggagatagttgtcagtcggctggatacctgccgcctggagcgcctggaccccataggtcccagcgtcgaagttagggtccacctcgccggtactgttcgccgcaaggtctgcgtcgagctggagcgcatcgccccagcgtccgacgagggtggactggttccagagtgcggaagcacggtcaagggccggcagttcctggtccgctacgatgcgttccagttcccgcgcattggctcgttggcccgctgccacgttccgttctccgatctcgccacccgtcagggcgtcgaaccccacggtaggcaccgcgtcaagttggccctgtacttgggcctcgtcgagctgtgcttggtcaaggggatacttgggcgtcatgcggcccttgaattgctttgccatgtcttactccgctgttgcggcgctgtaccaatcgacaccgatttgactcggtgtatcgaagtggggcgccatgcgcttgatgaatgcctcggcccggttgggcgtctgcgtgtaccacttgctgtttcgcacaccagcctcgaaggcttccttgttgcgatccttgatcgcctggaaggtgttacggaactgccgggcacgtccttcgcccatctggaaggccataccggccaatcccaggatagaggcattgttcgtaacgcccagctcgtcggccaacctcacaccctggtcgagtgcgcggtcggtgtcctcggcgaaccactgcgcggcttgctcgggcgtgactgtagtgcctgccccagcattgccactgcccaggtaatgccccaggcccacactataaccatcggcatccttatacgcctcccctcggtaagcctcgaactgagccagttccttccgccagttgaacacgtcctgcttcagcatgccggcactgttgcccccgttcatgcgaatgtccgtgccactgaccttgacgttggccccgtactcggcgccccgcatagcgttcagcttgtcggagttgcgcttgagcacctcgttgcccaccgcttgtgggtccacacgggtgcggtccagggcgaccccgttctcgtcgtactcgacggccaggaggctgccactggtgcggtcgtactcgaaggcgactaccgacttgtagccgaggagtccttcgacatgcggcttgtgctgctcggccaggacggttcctatggtctcggtgtcgttggtcccgaatagctgctcggcggtggtgccgcgaggcaggatcagcggcgcgctatcgcggcggctgaataggtccccttccttcaggttccgaccttcgcctacctggatggtgcggttacgcacgttggcggcggcgatctccagcagggcctcgcggcccgtgtcgctggtgagcagacccgcatgcttgcggtcgctggccagccagttcgcctcgtcgatggtcgcccggcgatacatgctcaggacggcctcgttgttgctcaggtcgctctcgccggtcagcatgttccaggctcgaccgaagatgttgttcacgaacttgtcgttgacctgcttaccgaggttgtccttgaatgccttggtgttctggcctttctcgaactcgtccatctgcttcacgacttcggcgttggcgctaaactcgcgcagagcttgagctggtgcgatgcccatcttcatctgcttgagtgcccaggccacggcgccctgctcggcttccgggatgccggatagcatcacgttgccggcggatgggttgatctcctgggccgaggccacctgttcgaagatgctgttcagcgtgttgaccagctccgggtttgcctcgccttccttggcggcctggatcatgcgcaccgcgctgcctacggactcgccgtaggtcttggggaaggtccccaggcgcaggccgagctgtgtgccctgcacgagacggtcagtcaggcttgagccgttggcggcctgcatcttgtcccactgctccagcgcctcggtgacgttggtacccagcgtgtggagggcgttgatgtctccggcttccaaggccgccatgatgccctgcatgcgctgagcgttgcccaggccggtcatggccttggtcatgaacgagatggcctgagcgtcgctccagcggccctcctcgaccatgcctcgtgagtacgcctcaacctcggcaaggtctgtgatggcgccgttggccacccgctgctggaagtccgcgtcggcccgcagggtagccatcgattccttggcgcgggtctgagccttcgacttttcatagaggccgttgagcgcacgccgatcatcgaaggacatgctgtccaggaacccggcatcgcgcaggccctcatagatgccccgctggttcatgtccaggctggccgccaggaactgcatgcctaccttgtcgcgcacctccagcgggatatcctcggaggtcatgatgttggtatagaacaggccggcctcttccaggctgagctgccgggacagttcgtcgccggtggcctgagcctgcacagccttggccaggatgctgttaccctgggtgcggaagccacgggcggcctggtcgatggaccagtccatgtacgccttagcctgcatgccgaagagctgttcctcggccttctgctgctgcgccagcgcctgtaaggcatcgttggggttcatgccctcggtcgaatccaggacgtgcgtagcctcctgggacaggtacttgcggaactcctcgggagtcatctcccggcccttgttggcgatgaatcgctgcatcttgaggctgaagtcggcctgagcgatgcggtagtcctgcttgcgccagccgcccttcacgaatggtttggccagtacgttgctgtctactgcctcctcagcctcgccggccatacgggcacgctcaccgcgcagaacttcctgctgcacgttgtgctcgaaccatttgccagcgatctgctgaccggcacccaggatgccgtcgagaatctgcgagcctacgctcgggccgctgtagttgatctcggagtcgcgcactccgcgccgagcactctggcccggctggagttgcgtctgtccgacgttgatcccaagctcttgggaagcacgttgcgattccgccatcagttgcctcctttaggcgtggcgccgaacttgaagtattgacttgcgtacagggaacccgccgacatcaggccggccaccagcggggaccgttgccccgccgtggtactcttctgccccagcaggccggccttcgcctgagcctggatggagtgcgcctgctcggcgaggttccacatctggttgtccaggttgtcgtcaatctggatcagggcctccccgacctcgcgctcgatgtccagggccaccgcatccacggatgcacccttgacgccgaacgcgccggcctgagcctcggcactgccgccggcgagcatcccctggcgcttggcctccacctgcgaggccacggcctgcttgcggtagctagcggccatgacgcccaggttggcgatgtcgcgggcagcggcgcccaggttgtcgaggtccgccttcagtcgagccttgttctcagccttgatcttcttgcgctcttccttgttggccataccctgctgaagggctgacatgccgccagcggccaatagtggtagccagaaagccatcacaccctccggtagatttggttggacttgaagttgtactcgacagcccggacgttcatgtcgtacggactatggcagctcagctcgaacttggacgtggccatatcgacccgtgccggcagcggcaccacagcgctatccaccagaggctccccggcattgagttgccggctgaacaaccgaaggggcgtcgtgtcgtaccacggctggttgggtcgagccgtgtcgctgatgcgccacaggaactcgccagtccatccgaagttcacgctgtaccggtggagcactgcgcgggtcgcggtcatgggcagcccgttgtggtcccgtagcaccggcggagtgaactccaccttggaccagaactcacagccgaccacgtacacggcaccgactacggcctcgggcacgtcgaggaacaccttcgtattcgtctcgcgcttcacgccgaggtgggtacgttccatgtaggcaccggccacgggctggagctggtatacggcagaggcatccttgatcaggtcccaatgctgcttggtcagctccagctcaccatcgacggtcgcctcgatacgccgccagtaatcgtacttcggatattgcagaccctcgcgggctggcaggctgttcaggtgcatccggcccagggcgatctcctggcccttctggatcaggaccatcaggttgtcgccggtgaagtacgcgccgatgatctgatgccgcagcgtccatcggtggaaggcgttctggactttctcgttgccctgccagaggtactggtggcagatcatctcgtccgccgtgctggtgccgaacaccaggtagccgctggaggccgccgcctggatgtactcagccggccccggcatgtagctcgggatgtggctggtaacgtcctcggcgacgtagtggctgtccgtggacggcgacggggccatctcatgcaggcccatgaaacccagggcacgctccgcagcgaagtacacactgcggccagtcacggcaggtgccgccctggtatcgaggtcgtactgcgtggtgatgctgataaccgccgtacggggagttacaatgccgccaccggggaccacggcctggtacttcttggcgaagacgatcaagtccttgttgaaggtgaccgcgtgctcgtacggttcagtcaggctcccctgggccgcgatctcgataggatcatcgtcgttcagcgcggctgccgacttcttgaaccagcggtgcggattgttactggccgacatgcagacgtactcctgcgacaggagaacgaggcgaccctggaaggtcgtcatgccggtgatgcctcgggtgacgaagttgaacgtggggttcgtatcctcgtcgccggagccacgtcgatcatactccaactcgttcaagctgtaggtgtcggtagcctcatcccagcgcagggccagtggcatcttcttcaggacccaatcggtgccgtaggcggcccgctctgcccagcggcggttagcggaatcccactcgaagtataccggggccttggtggagccggtggccatgacagcgccgtccatgaactgcacccccacaccaggggcgccaactcccggcagcaaggccggcaggtccgccgtagcattgaggctcataccacctgacgcgatgccgtagttgttgcccatatccgtggacacctcgaccacgatgtcgccgtcgccccggaaggcgatgtagccgtcctgcacgccccgctggttgagatagccggctaccgtagccgcagccgggtcagggtcaaccttcgggtacttcttcgtggagttgggcagggcgtactccggggcgccgaagaacttgccgtagagttgccaagcgatgtagcccacgctcgtttggaacggtgcctcagcgaggttggggttcgtgctggcgttgtccggtgtcacgtaggtggccgtgtgactgtaggtggtgcccgtggcgttgtccttgaccttgatggtcagggagaatgccttcgaatactggcctgccttgacgtacagccagccggccttgttggggtctacgcccttgatgtcggtgcggtcggcctcgggcttcacgctcaggttggcgatgaacaggtcatcggccaccgtggcggcccgtagctgcctgtaatcgttggccttgaggtagtcatgcaccaggggctgacccatcagcaggcgaccgtcccgctcgtcgaacaggtacagctcaccacggtgctgcgccaccagcatcgcaatgctgcggccaccgaggttcgtgtggtagaggaacggcctcggccagggctggtcggtatgcaggtgggccatcagctcgataccgctgcgccgccgaagtcctgacacgggatcggataccatgttgatctgctcgctgagctggcccggcaggcgctcgaagggcacctgctggctcacacccatcagcagattgggatacgcggattgcttgtagctcatgctcaggtcctcaagctgcgccgccaccggctgaagctacgcttggcctgggtgttcagcggacgtgatcgggtgtgcatgcgggacagttcgttctgatacgcctgcaattcctgggcgatgacctgggcggtctcgtccggtccaatctcgtgggtgtataccgcgagcgcagcctggtgcgcaatgacgcgctgtgcgatctccgggatacggtcccactcccgagacagcaccaatcggccctcgaccgacttaccgatgcggtcgtcgccggtgttggcatctcgcactcccaggccgtcccactggaggtccggggaatccgggtagaatgccaaggtgcccttgggcaggttgatgcggcccgtgggatcaggtgtcagcttgtgcttccaccaggtgttgaaccaccagccttgggtcagcaactggatgcgttgatcttccagctccgggagggcgatggccatggttggatacgtctcatccatgctcgggatcggcagctcgccgatcttgcgcaggatgacattcactgcgtcgagtagtagcatagggtttctcctaaagcgcaaaaacccacgcagggaatctgcgcgggtcgttaggctttgaagaaaccccacaccgaagtgcggggtttcgtggcatcacgcggtgatgtcgaaggcgccgatacccttcagttcgatggcaccagcggtgtccggacgacgggcaccgatgttgtacatctggaaggtatccaggacccacgagaatttctcgttgtcttcccacagcttggcctggaccggcgccacttgggcggtgatcagggtcttgctcgggaggaacagggcgatctggcgctcggactcctcggcgctcacgttgaagtgacggcccagcgggtgggctgcgattgccttggtggcgaagcgcggagtctccagcaccttgacgccgttgaggatggccacgcgggacttcacgtagtcgttggtcgcgccggttgcctggtactcgacgttcatcagcttgtcgtgctccagcagcaggctgaacacacgcggcgacatcggggtcaggccctcggagtagaccgcatcgcccaggtcgcggtcgatgaaggtctcgactacgcggcggtgcatgcggacgatcttgtcggcagcctgcttggcggtcaggccggtcaggtccagtttctccagcacgcccggcgagaacgcatcttccaggtccaccggcgcgtccatcgcggcagccttgatcacctggatcaggcaggcttggtcgaacttgcgagccagttcctggccgtccagctcggcgacttccttgcgcatgtcgaaggattgggtccactcgtcctggtggtcgaactggtggcggaggtacagcagggtgtcgacggtcaggttccacttgtcgttcacgactcggctgcgctccagctcttcaccggcgcggcggcccttggcctcgacgttacccaggcgatccaggcggaccacgttcgagccacgcaggtcgcggatgttcatcagcggtgcgaacttggaggtgtaggcgaagtgcttatcgacgatgccgaggtgctcttccaggtggatgtcaacgtccgcgttcttgccagcgtagttcggacgggtcaggtcgttcaaaaagctcatacgatgctctctcttttggatgtgggtttaaggccggagtagggcagggtcgttagataccctgcgccatgcctgccttacgacgctcgcgcagcgcagccatctcggcttcggatgcgttcagcggcagcttagatacttccaagcggtactgctcagcgctcagagctgccagtgcaggtgccgcagcacccaggggttggccggtagcctgtaccacggcacccgagccttgtgcgaaggccacaatttgcttcgctgcgtactgcatggcctgggcatcgcccgagtccatcagccgaccgatggcggccttggtggccgggtcagcgtgttggttgaagacgccggcagcctgcttcaggatggcctcaccgccgacggcggcataggtctggctcaggacggctttggtctgcgcatcaacataggtcaggacgcccttggccacgttgatgacgtgctgcgcctgggccgggccgagaacttccttcagatagtgctcgtcgatgaaccgaggatcgcggttctcggcggccttgccgaaggctcggacggtatccagtttgtcagagaacgcctccagatagctgatggagggcgccaactgcgggtcgccttcgaggttccctgccaaggtgcccacgatctccccgttgggagtgaaggccggcggcggcgggacttccaggttctcgggaagaactgcacccgcagccggcggagctaccggggccggctgagcgggtgcttgcggaacaacgggttgacccacggcaggtgccgctaccggctggtagtgcggcgtcatggcgctggtcggaacgggttgcggctgctgagtcgggatggccagttgctgcggcgcacctacctggccgggctggaccggagcctgcggctggatcaccgggttcggcatcacctgcacatgactcggtgtcggcgcggcggcgggcggtacgttggcaaccaggttagcgaggcccggcggcagttgctgttcgttcggttgggacatctatcagactcctgcgagtgcgttggtcatgtcggaagcgccttccagcaaggtctcttgcgcggcctgggcctgcgcggcctgctgacgctgctgctctgcctcggcctgtagctcgtcggcgctcttgtagaactgcgacgtgtctacgctgaaggctgcccaaatcgtgtccatcatcttcggtagcgagatgcggggatcgagctgagcaatcggggccaggccagcgatgacctgggaagcgttgagcatgctctgcacagcggcggagcgggacagggccgggaggcccgtctcgatagccggtttgtgctgcttggtgatcaagccttggagtagcgcatcatccacctcggagaggcagacgtaggccaggggcgactgaaggttctcggccaggagcgagtaagtaccgcccagtgtgttctctgcctcttccgcagtgatgcgtacttcctcggcagtgacgcgctcggcgtcgcgctggttggcaccatacatgaacgcctggttcaagcgaacgactacggcttgcaagctctgctggatagcagccatcttgttgtagtcgccacgctcgtaagcacggacggcttccgcgccacctggcacgtagtcacccatctcggcgtcttggtagtcatcgactaccgcacccttggcctcgtccacgaggttcaggacctccagcgactccagctcgtacaggccgagtttctcgctcagcagggacagcttggcgaagtcgccgatgtagtcctcgacgtggccgcgaccgtagtgctcgccaggggcgaggttccaggtcggcacgatgtacgggcacaggtggataggccagcggccctccttgcccacacgcacgccgtcgatctcgtggtacagctcggcgtattccatcgccgtgcccctcttgcgctgtacgtgggtgtacaggtccacgctacctgaaccggacaggttgcgtcctgcgcgcatcaggtcctgcttgtactcttcatccaggtccttggacttgtagcgctgctttaggacgatatccatccagcggccagtcgcatcccggcgcaccgcataggagcggagcgaccatgcgaccaccgtagcggcggcgctgtctcggtacagcagagcattgccagtcacgatcagtagcttgatcacctgcgtcaggaccgccagggaggcgttctggaacaggcgctgtgttgctttgcgatccacccgagccaaggcagcggtcacttcggtaatgtctgtgtcccggctgtcggcctcgcggcggatcgcatcagtgagttcggatcggaagaacggaatccccgtggggaacagcgatctcgccagcttggcggcgaggttgttcaccaggagggcaccggcggactggaagtcatgctctacgactccccggctgccggacatgggatcgaccatcaggtagggaagcgtggtcttggcgaactcgatggctcgactctccacgctcccatcccgaagtttctcccacagcatagctgcggtggttttcatggcgtacctcgtcagtagttgataccgagggtttgcgatacgcctgtgcccgcctgattccggcgccgtcgcgtgccggtgccagtggcatcggccatcgctcctaggtcaacctgcgccacgttctcggcggtgaggtcaacctgctggtttcgtgcgagctggtccgcctgctgttgcattaggcggttctgctcttccatcttgcgggcatcggattgtgcgccgctcaggtcggtgcccagcaggccatcagcgagtttgccgatgatggtcttgcccagcaccttctttactttcttgcccataaggcttggctctccggtagtggatcgtgtaccggctatcgctttcacgatggctccagcacacgagggggatttgaccccagccggcctgacggtggagttcgcggatgaactcccggaccacgcctgtattgcggtagcgcggtaggacgtactgccactgtgctgtgacgcacgggccgacgtggggatcgtcctcgaacacaatgcaggcaccgccggccaactggccatcgcggaataccaacagctcggttcgatcgttgccctcgatactgtccagcatcgcattcagggcgtcgtctttcgagcggaagagggtgaattcttccaactcctgtattgccagccagcacagcccctggagttccgagggagtgccggcctttgcgtggactcgccagatggacttgttcatcacttcaactccactgcgatggcatcgcgtcggcgcaggcgtactgctcgcaccacgtctcgcctaccggcctggaactggatgtcttccatcgtggttccaggaccgatctgatgttcggggaaggtctgctctaaccactcgatctgctgagaggtgaacgtgacaggacgggccgtacccttgcctgttctcgatccttccactgtgggtgacataaccataggtcggtgggtcttcatagtagccatctatcatatctcctatgctggttagtctattctatctagaatccttcgtagtcatctagtctcatcttctactctacctctactcttcttctaccctctggtcttccctgacctctttctccctgctcccctctacgagggccttggacggatgcacttgctcctatgtgggtgacataatcccctcagcagaagaacgcccaggagtcccgtacagcctccagattcaacgatcctctccggggcggggtagcctctatcccgagctgttttgccagttctacgagcacacaggggccgctgtacatggcgatgaactgctccctgatgtggacgtgcatccgatccacgtctgccgcataggtgcccatgctgtcgtggatggcctggatcgggataccctctgccgcacaggccagggccgtcaggcccaggtggctgctgtccagcccgtggacgaagttcggagcgatgccgttggcgttgcgtaccgggtccagctcgtccttggcctcgtacagggtgacgtactcgacagcctctgcccgcagcctcacccgcacctcctcggtcttcgggtacgactggaacacctgcatgccgagtggcgtgatccagtgcaaatccttggatgcatcaggaagggccttagcgagccgctggagccattccatggcgaagactgccgatggtactgtctcgcgtattgcgtccagtatgagcgttgccatgtagcttcccaggcggtatgacgggataccctcgggaatctccaggccggactcgtccaggtagtccaggcagtggtctaccacgcccttgaacgtggtgccgtataccagcgtcatgcagggcttcttcgtcaggcttcgggatagaccagccttatcccacaatacagcgtagccccgagcctcgccttcagcactttctctgtctcgtgccagagactctgcaacgagaccgagaactcgggagtagatgtcagctttggcaagtccaggtggcagcaggttgacgtaggctccgccgatctcgtctcggagaatggctgagtagtgctggaggccggagcaggttgcatccatgtggacgatgaacccacttcggtaagcctccggctggcctgatgcgtaggccgcccgcagctccagcagacctgcgatggcgcacaggggcgactcgtcttccgggaagagactcggatagttctccggaccttcgttgagtgctcgctggaagtcgtcccatcgctcatcgacccaggctgcccggtcgtcgaagtacaccttgtcacatccgagggagttggcgacgtggactttgagccagtacaggccgcgcttaccgagggcacgcttttcgtggaatcgcagacacgccttggcgatgtcggacccctggggattcggtgtgccccaatagtacatgcggccacgggagtcaacgtgcatcgggaagtacactgccttgccatgatgctctcgaacaactcggtagagtgcagcaaattcgcgaagcttggcggtatgctctcgctccccggtgtaccaccggtggacggagcgtttccaacggttgaaggcctccagctcttgctcactggcattctccttggcccactcgtcgccgagcgggaactcaggtttgtccgggtaggtgcgctgggggatgcccagcacgccgccaccggaggtgaagacgcgctcgatgatctcgtacacgtcgtggttgatctcgtaggccaccgattgcagcgcgttgaccgcctcgtacaccttgggcatcttgtcccggcccaggtggcgtagctgcatctggcgcgcccgcttggtctggtgcttggtacggcgcactagcacatggtgcttctgcgccttagcgctgtagtaaccgccatcgcaccagtcgttccacggtcgcggcggtgccagcatcacgctacggcctgggcctccccaggtcatcgccgccgaagggtcttgcaggaactccttggcttccggcgacggctccaggtggacgctcgtaccgccccgacctgtgaagcggttcggctcgaacaggccgcactgtatcagcggatcaccaatgaacttgccgaggcgcaggtagtcgccatccggcaggtcgatacgtgcctcttccggcagtaccgcgtccagaagagcgtccatcgtcttctggatgtgccggacgctgcgagtcctgctggtcttgaggtagtccagcgtccggtcgtaatagggttggttgaccttgaaggccaaccgcacttcgatctcgcgacagagcatcttacccatgtgggtgtaatacttcgtcgctgtgatcgttggatagttgatgagcatcgacagcccggcccgcagtgccatgactgcgaggtcctgggcgtcgatgatccgcagcaggtgccgcagctttgctgccggccccgccgccttcgcttcctggtgggcgaagatcgcttcggtcacgatggggagcatccgcatcaacatgatgcgcgccctcgggatgcggtcgatggacccttgggcaatcgccttttccaaggcaatgcgggcgtcattctgcgccgccccgaccagggcctcttcgtgggcgatctgctgctgtatcaggtccattccgtctcctatcgtctttcgattacgcgcccgatatcctcgggaccccactcggcctcggccaggctaaccgccccatccagcgtcatcgctcggtagtcacgccattccccgcagctcagaatctcagcgcggaaccagcgcagttccaccagcttcacttcccgctccaggcgctccgccatctcccggagaatgtccgggagtatgacatcgctccagtcctgatggctgaccatcgccggcgtgatgtacgctgtgacgtagttgaccccgatgccccgctcgttgaaggcccagatgacccgaacaccttcatcggtctcgtgctgtcgggtacaccaacagattttactcattacctttctcccggtccatcagggcccgctcggcggcggccattgcgttgaatgcctcatgcaccaggtgcatcaggttggactcgtcatccagcggtccgtcgatcagccgcttggactcgtgccggtgttgggcggacttgaactcgcccaccgtcatcttcttccagtcgtgcggcagataccccttgacctcggcagcccattgcatcattcgagcaagctcccgcttcagcagcgggaacccctcgactaccaggtgcatgggaagcttaccgaccttgcgttcttccagactcgcacctttgcggtacggttcagtcgtgatcgtcgactcgtaagagtccgggaatgctaggctcatgctacctccttagttgctcagcagggctttgcgctgttccgaggtgttgcgggtgtaccgcccccggctccagccaccacagccgccgcagtgatagtgctcgtacttgccggtctgcgtatgcacccagccctcttgcttgacatccgtgtcgccgcacttcgggcagcggatggtcggctcggcgtcattgaagtacacggccacgttgggatggccgacgaaccacgggcgcatcagggtgtacagctcctccatcgatcgtacgtcgtcgatgttgtacaggcgcatctcctcccaggcttccgggttgtcctggaggcaggctgcccacaggtcgaatccggggaacttgccgtggaggcgcttcttgatggtgcatgccttgtgggtcatgtactccagcttgcggctggtgaacgcgaattgctgcttggcgatgatcaaggtgtcgatcaccttgaacggtctcggcggcggcatcttgttcaggaagaaccgggcgttgatcttgggcacgtcgaagcgcttgccgttctggacgatgatgatgtcggcctcgtccagcagcttatgcagggcgaccagcaggtgcatgtcgtccagggggtcaccctggcagtccatgtagatcacctcgtcgctgtgcatccacttcgcacagaacgacaggatggtccagtcccgcttgatctggttgaggcccacgttctgcttccagagcgaccagacccagccctcgataggcgaggtctcgatgtccaggctcagcaccttcggaccctggcctaccacgttgcccacggcgccagggaacttgcgcactacctcggcagccttgcggcccagccagtgcatcgcgcccttcttggcgtacatgccgcgcgtcctgctgtcgtggaagcccagcttgatgcaccagttgcggaagcactggcggctcacctcgccgaagcgcgaatgctcggtcaggtgctcggcacccttcttgaggcccagctcgacatagacgtttcgcaggtactcattggtgaattgcttgcggagtttgctcatacgttcctcgcgttgtgctttgcgacggccatcgccgccttgcgtttggcggctgcctgccggcgcttggccagcttcgcttcgtgtttctcctcgtcggtcttgtgcagggggtagatcagcggatgcttcggcccctccagatacgtcaggagggcacgaaggtaggggatgatgtcggaatacttcatcgacttgcatccccaggaacctgccgcattcgttatcttgccttctgcggtgttacaggaccggtgcaggacgccccgcaccagccccgtttcgtggtcgtggtccatcaccgcttcgcccttcacgctgatatcgatgggcttgccgcagagcgggcacagcttgttctgctcggcccatagcttcagggtgaaggtgcgctgttgactgcgcggtatctggtagaccttcggctcactcgtcataatcgctctccctccgcttctggagcagcgcctcgtggtaggcgtccagctcgatgatccactggcggaaggccggacgaaggtcgcggcttaacagatactgcgctgcgttgtcggtaggcgttcggcgcatccacagcacctcggcctctgccagcgggttttgcttgatcttggcgtacgcctccaggatcatgtcgatggcctcgtcctcatccgtgatcggatggaggatgtcgaaggccgtcttcataccgcagagcttaccgttgaatcgatcgatccctcggatgttgtcagcggtgtcgccgccgagccactgcgccaagaagaacttccgtccatggcccttgagcttgaactggccggaaggcgtgtacgcttccttgaggtagccgaatccgccctcgatcctgctcacacacgccgtatcgatctcccaatacgggtagatcgtcatccgcaggtctttgtcgtcggaccggatgatggccttgtcctgcatggcgtaggcgtccatcatcatgccgtcgtccgcctcgaagaacgtgtgcaggatgacatcgatcccctccggcgccccgcctcgctcatgcacgtccgccacggcccgccgcagtggctccagcagcgcgggctttgccttgcccttgcgctggccctggtacggtttcatggtcggatacgtgtcgcggtacgccttcgccccacctgctgccgtgaggtgaacccgtgtccctgtgcagtgcgctaggaactgctgctccaaaatgagcttccagaatcttcggagtgcagtgtccagggtcttagcagtggccgcagccacataggcgggtccgtcggcgtcacacaccaacgtcccgcctgccatgctgcggtcgaactgcgcggatagtcctgccaggaactcttccgatggcaggcgcattagacctgcggtactgccggcactaccgggaccgccgggacttcgaccgctgccggagccgccgtctgagccacctggggcacgtcaggcagcacgttctgtgcctcggcagtacctaccacaggggcggccacattcgccacctggggcacgctgggggccgtctgagccactgcctggggaacagccgggacagccggtgctgccgctacgccggcgtcggcggccacgttgggcactgccggcaggttgctgcctgcggcctgggtcgtcggcttgatgatcagatcatcgccgccgcccaacatgatgtgcagggccgagccggggaagttggtggccgagcgaatggtctcttgcaggaagttcttggacttgccgttgtccgaggtgccttcgatgaacagggcgtcccaggtctccttggtcggcgcgtcgaagaagaaatactgcaacaggtccatcggcagttccggcacgttatacgggctgccatcgaccgggttatagggcttcatgatgccgccccaatcgatgtcgttgcgttccttaccggcgttgttgcccttggtgatcttggtgcgcttgatcgggatgatgaacgcctggccgagcatctgagcgaagtgggtatgctgcccgctccagttcatcttgtcgaaggccagcttggtcttggacttttcgttgttgccgagggtcatctcgaaggtacggaacaggccgggcttgatcgagccgtcggcctcgtaggtgtggaacaggtcgtccgggcggctctgcgggttaccggcctgcgggttcacgtcgccccacaatgcgaagcccaggcggatttgaggcgccggattcttgagcttgccctggaattccttggcgtggtcacccagctcgatgtagatgcagaagcggcccatggcggtgcccgccgggaagatgcgaccgccgccaccgccggtggaggtttcggacatgtcgatggttgcggtctcggcagccttgttggccagggcgagggcggcttgcagagcgttgagttgttgagtcatgcgtggtctctctcgtgtcgaatgaagatttaaggccggagtaggctagggtcggcctagtcccggatcacgtccatgttgaacatgttgggtcccatctcggccaccgccgggaagggaacgtccgcgatgtcgtagcccaatcgctcgctcatgtagcgggcagcgtcggccatgatgtcgcgcacgccacggttgacctcggcggcggtgtccttgtggcagtcggtgtacacggcatcgtgtacgttgttgatcaggaactcggtgaccataaatcctgggcgatgcagcatccaacggaagatgcgccctacgctcacggtcatcatgaacccagcctcgccctggttccagtagttggcgatctgcgtgtccttgaagtccatgaccgtcttgcgctgttccttgtcccagcgctcctgttggcggaagctgtagcaggtgccaccaggcgcttgccagaatccccggcggtactggcgccagttgccatccggccccatctcgctgaaggcgcctgccggcatctggtcctcggccttgtacattacgaggctggtggcctctgcactgtcgcggacgatctgccggaatgcgatggactctgggaacagggccgcctcgttgtccaggaattcctgggcctcttccacggtacagccggtgttgaatgcgataccagccgcactcgcgccgtactgcgccgagaatgccttgggcttgatgttctttcgagcctgcatcatgcgaccgtgccacgggtggttggggtccttcttgatggccacgagctggtcgtagtcgaacccgttccagttgttgtgcttccctgccaggcggtacaagtgcatgtcagtgccggccatcagtttcgccaggaggttccgatccttcgacagggccgccaacatcaccacctccagggcggtatagtcggtctcgccgatcatcccgtccgcgccgaagcgagacacgaacatctccttcacgcggctgccggcttccgggtcgtcctcgtccttcgacgggagctgctggaggttcgggcggctggacgacagacgcgttgtcgccgtcgccgtcgtattcagcgaatggtggatgatgccgtcgtcgtccacgtactggagcatccccttcgtgtccttaatcgtcccatccttgttgtaggtgtgggtgatgtagaacgaggagttgtccttgtgcagctcggccaggcgcatcaacagcttggccgcctcgaagccctgtttctccagagccttgagggcgtcgccgctggtgctgaacacgggcgacccatccgccagggtgagggcgcactggaactccgggcgtttgcccaggaatttctcacgcactacttccggaaggttggtcaggttgatcaggccggggaaccggaatcgctggtcatcatcccacttggtcgccgggatgtccgtatcctcccggaacaccttgacgctgcccttgttcttgccagcggagaacgtgatgaccgggccgtgcttggtcgccagctcggtgatggtgggccagtgccactcaccctggtcggtcacttcatggatcgggacccgaactgaggtactctcgattggagtcccccgcttggccgtaccgaagcgcacgaagtcggctttctccatccggccatcttcgtatggcacccggcccttgtaccgcacctcgccaccgtagagccatgcgctcatatggtagaggctggtatacttgaactcgaagtattccgggaagtcgggcatcagcttcttcagctcggcctcgatcccggccacctcttccagttgcttggcgtggttcaccttggcgacttcgaggtccaccttcaggccggcacactccatcgccgagaaaccgatcagggcctcgcagcgctccaggtagccagcccacatgccacgggcctgaagcttcatcagctggccgtagaacacgagggcggtattctcgatgtcgccgcacgggccggacaggtactcgctcagcaggtcctggtccatctccgaggtgagcacaccctggtcccacagcatcttgatgccgtccaccttgtgggtgccgccgtacttcggagccagctcgtcgagtgccgggtacagccacgtctgatgactcagcagatactcggcttgctgggtacaccagacccggccaccgcgtcgcaagaaggccaggtactcgtcccggtagcgggtgaagaaccagttcgattcgaacatggcattgtgagctacgatcacgtccacgccgtcgaggttgaaccagcggttgttcgggtcttcggcttcggcccggctgcggaagcgatgttccaccttctggccgaccttgccgtcaacatcgtcccgccagccggccatgacgatgtagttgcgggggtcaaagggcgacgccttgcgccccttgtgctcgtagctctcggtttcgaggtcgaggattcggatagtcgtcatttgctgtaccagttgctttgactgtactgctgcgccttgaccagtagaccttccagcacacggcggggaatctcctgcatcaggtagcggaccattccttcacgtccccatatggtcagttggtacagggagaccgcgtggcagaatcccatacggcccagcttcgcatggtcgtagtcaattcgaatcgacagctcttccgcttgcgggtccatatgggccttggtgcggaggccggggaacagcaggtccaggggttcgtggatatccgccagcaagcagcggatcatgcgttcttcctcggtgggcattctcatactttgactcctacctgtcgcagattgcgacgcagacgtcgcatgacccggtgcaacttacggcgaccggcgccgagggattggatgtcccgcgcatgatgccgaacttcggacccaacgtggtcccaagtccctgccatgacgcagatgcggaatgttccgtcctggctgatgaacacggaacccatgacgtacttcggatacagcagcgaatcccggttggtggcgtggtataccatatcttccgggtagttgcggttatgggactttcgaatcttcataccttcactccagggttactggccaggtcgcggaagcgactgaagctgggatggcggagggtgttggctgagcgttccatcgcggagacctcggcgatgcgtccatagttcggcatggcctcgtcgatgcagccgttgaggtgggcgcaggtcaggagctggatgtgctcctcactcaggccggtggcgccaacggtgccggaaccatcttccagctccacacggtagcccacgacgcggcccacgttcttgccagtcttgcccatcacgtacccgacgatacgcccgtccacggtgatctccggcttgcgcttgtagcagccagcaaccttgccgttgcggtaggtcaggctcgggtctttctccatcgacccctcgaagcccatggcgcggtggtagccgtaccagcgtagtaccgcctccatagaacggcaggattgtgcggctacctggaagaagtacggggtgtcgccccgccggcaatcttccatgaggctgcggaccatggcgcggcgctcatcgtatatgaggtgggacttgcgcgatttgcggagcacgccgatatgggtggcgtcgaataccgcgaagtgcaggcacttcagctcggcctcggtcagcggggtcttgcgggccatgcgcccggtcgcctcactgaagggcatgccttccaggtacatctcacagtccaacaccagaccggagtccaggccgggctgggacagtttcgcgatgatgcgatcctccaggccgtccagggcagggaagcggcggccgctgcgggataccacgccgtgcgcacccacgatggcacggcacccgtcgatcttaggctcgacgatcacgtacccgtgcttcttgatgatggcctcgacggccttgtcgttctgatctacgccgcgccagatgcctttctcgatatccaataccacgtcgcgcttgctcatcacacgttctcccatccgtagtacgcggccttggcccgcatcttttcgcatcgctccggcagtcgcgagccggaaccaacttccttgttcacgccccaggtaacgtccttgtgcaggtacacacccagtcgcgggccgccctcggggtccggccagttgtacgcgatgcccacttggttgatggtgaagtcgaacgactccatcacccgaccgaggctgtcggcatcgtagtagttgaagtccacgtccatgccttccaggccacggcagcccaccagggatatcacgcccttgaagataccgccctcacctgcgtcggcgtactcggtactccagccaccgtcccggacgaagcgcgggtccagggtaggaagcacgctgttgatgagcacttcagcctgatactgcgtcatgccgtacagggcgatgtccacgtcctttggagtggcgccatgcatgaggtcgcgagggaacccaccggccagggcgacgccctcgttgggccgtgcatcagagtacaggcgcagcaacagggccttgaccccggtcggcagtgcaatggaacccagtggaatttctttggtgccttcgagcacccggctatgcttagcttgcatggtctacactctcaaagaaacgacaccgtgcggcgtcgaagttaatcatagcctccacgttcgaaggcttcccgtccatctggaacttgttcttcggcagggacaggccgcgcatgacctgttgatccgcaccgttgagacggcccaggtggatttgcacgtccacagcaccctgtaccgccgtcttcgaatccttgaggcaggactgcggtgggaacaactggtcgtgaccgtcgttgctgatctgccacgtcatgaagctgatgaagtcgtgacgcaccgccatctcgcggacctcggccaccttgtactccatctcgtcggtgcggttctggtccttgcgctggccacctttgacgtgggccatcatgtcccaaaacaccaccgccggcttcatcgcgtcaatgacctgctcggcctgggccagggacccaccgtggaagtccttgatgcggatcagctcagagtcgccgccgattttctcggcgtacatcctgcgaacctcctccgggtccagggcaagaatctcgcccacggtcatgcccagggctgccgagtacaggcgcggcttgatccgccggcccttgccctcgttgttcagccacaggatgggccgcccagggtcgaagtaccgcttgagctgcggcgcgatatggacagcgatccaggccatgaacgaggtcttgcccgcatcaggcggcgctgccaccagcaccgaggccccggcgtggaggcccttcatgtacgccggaagcaccagccccggcagcttgatgccgtggtcaccctgctcctccgccaggatatcaaacacgtcgtccgtcacatagtcggtcggcgtactgaccccctcgcggcgcagggcctcgtcgctcagccggcgcagctcatacgccaggtcgatgtcttcgccctggttgtactgcgccaggagggcatccaccctgcctgaaaaatccagttcgttgagctgggacacaacgccctgtagcgagtccgggtctaccggcttgtccagttggttgacgaggttcaggaccaccgccagttgctccggctggtagccacctcgcagctttatcagttcgcgtagcgcctgcgggtctaccttctgatgcgctgggtagaccttccagtattgctcgatccagtcgatgacaaagcacgtctccggccccatcatcccttcaggcaccacactccgcaacgtgcggaagcggtccttgtcactcagtgcgtgtagcgtcaatacgtccaattactaggctccttatctgctcgcgggtcaggtccttgggatcgaacccgtccggcgtgggtattacttggccttcgataagcagggaccggagccggcgcatcacgcctgcactaccacggacacctgccgggtcgccatccaagaagatgaaggcgcgcttgcaggtctgctgcaacatgatcgccgccagcctgtcgcgcagccttgtaccgttcagaccgacagcaaagacttcgggacaggcccaccgcaccttcagcgccgacaagtagtcttccgtcagcacccatggcctgcccattgataattcctggggccatccatggtaatccggggcaggatacccgtagcccacccacttgggattttggtcggcagtagcgcgcccaatccagcccgcgttggtagggaagataagccgatgctgcctttcgctgtacagcagcggcagccctggcgtcatcacgttgtagtcgatacccttggacagcagcaaaccataaagcgattgatagcagtcggcttgcgtccagtccgaggcatcctcgggccagggcatgaagcgttcttgatccgcgcattgtaccctccgcacatgcgttttctcgaccacaccaccctcctgacaggagtagcagtaagccacccagcggtcaggcaggttcttgcaggtcatgttggtcccgccccggctcatgctcttgcatcccaggacgtgtcggaaccggcctacctgcccaaccgccagggattgcgcttgctttagccaggagtcgcggcgcagtgccattggtaccattcctcccacaaaggccgcagcccacctcgggcctcgaacatgtcctggaggtgccaggtcatgcgggcgccgtaggcgggccgccgttgttctgtgtgagcagcacgcccagggccaccagactgaaggcgactccgatgaccagcggtttgttctcgataagccatgtcatcacctcatacgtcatggccgggtgccctcatgtgcaacacgtccggctctcctgctgtccagttcgcctcgcggtgggtggtgctccagcccaagtcggcgtagaacggctccaggaactcgaagcaggtcagatactcggcacccgccagctcggcggcccgcaccagctcagcgccgataccctgcctgctgtgtcggtcatcaacgcacagggccttcagttcaccgcccactacgaggcaggaacctaccatcagacctgacaggtcgaaggcaccgagggccagcacgcctcccttcttgcgccagatgtcgctatcttgccagccactccggcggaggtggagcacacactcggcgatactcgcactcagctccccggctggactcaggctttcccggagcgggtggtacttccgctgccagaggaaccactgccaccagttctcggcgttgctcggggcttggatgctgaatacgtggatcgtcctgatttgaatcaggccgggatgcaggctcagcggatacaggctcgtcttgctcatcttcgatctccctcaacttgcgctggccgaagtcaatcaggtcctgcgccatgtaatgcacaaggctgccggcacacgccgccaccttgtcccaggttgcccgcttaccgtcgatgcacgggaagacagcctcgtcctccagctcgacgccgaagcggtatccgttgtaatgcgtgaaatggtattgcatgttcgtgatcctccagactcacacgagagggcgctctaggaacgccctcggatttgaccccggagtaggccctggtcgcttagacgagcaggtacgtcagcacgctacccacgacgccgccggcgatggtggctgcgaaggttgctgcctgccaggtgtccttagccgccgccttcgcccgctcacgggcctcggcctcagccttcgccacggaagcgcggaaggtataccgcacgccggtcagcttgctgatgagctgacagacggccttggtcggggccaccgtcagcaatcgctgagtctccgcgccgtcccaatacaggccggcccgttgacctacctccaccagccgggtcaaaccctgcttgaggccgaacagttcagcgcccatctcgttattccggtccgcaagcttccgtacccggctgcgcagcggtccgtccatttctattccggcatcgcgcagggcacggtttaccgccagcttggttacgtgcagatcgtgtagacgtacctcgaagtccttggcggacagcgggccggccttcttcgataccagcgggaataccttgagcagcagtttttcgtactcatcggcgcgcttcgcgtcggcctggcacaagctggccgctacccgcgcctctagatcggcatagccacaggtgctgacgcgctccacgttatccaggcgcacctccaccttaccaccgtcacaggtgacgccgctcacacgggcggtgtaagtcccgcccgaagcctgtttcttgggcgtataggcgtgggcgaatgcccggctcttggccacccggcgcatctccggggataccttggcacacggcacgccgaacatgctggccgccagcttggtgaagtgatcgttgcattccattgtcagactcctgccagtttcagggttacggccagacctgcggtcagcaggcatacccaggccatgatggttgccttgcgagcgcggcgctcttgtgcctcgtgggcatcgtgcgctgcgttcaagtcgttctggagcagacggatcgtcgcctgatggctgcgaatctcgtcgatctcccagcggcgcgcccgctcggcggcctggaggcggcggctcagggtgtcgatatcctgggcgcgctcctcgcatacagccagggcggattccaggcgatcttccagggcctggatggcgggtgccttctgtacgctcacgctgcgtaccgggccgctgatgtgctcggggttgtgcttgctcacgttgactcctcctatggtatggctagctcgcaataggcccggcagggccaggcctattacgtgcgggccttactcgccttgggcgatggcttcgtccagggtctcggcggacgctgccggggcctgcactgcgcggatggcaccggccttcacgtccagcagcttggccggggcgctgtcgctgaagcgcaccagtacctgatagacgccggcgactacgctgatgacttcgccgctcagcacttcggctttctcgcccttgccgtggtcgaaggtgatcacgtcgccggcaacgaggctggacaggcgctcggcggtttgcagggcgacgaccgcttcgttgtagacctcggtcagcttggtcagggcgttgtggtggaagacgacgttgttgcggaagtcttcgacggtggccggcttcttgatgagcttggcgcccaggacggttgcgacggtggtttcggtggtggtgttggtcatgatgtagctcctagaggttggttggttcgcggcaaggaatggccacggtggaaggctggcgcaccagccttcgccttggtcactcggcggtgagtgtcacctgggtccccttgtcggcgagggccatgcgccacccgtcgttgcgcagcacggtgggacgcggaccggtcaccttggcagggccgtcgtcatggataaccacgggcagcactgcgggacggcccgtgctgtcccaagctgctacgccgatcaccagtgtgccgcgcttagcctcgggctgcactacccgatacatctcaccggaacgcaattccgtgaggtcgaagagacggcgttgctcgcggtcggtgttgtgggtatgggtgcggatcatgttacctccggtaggttatttgatgttcaggtgacgcttcagcccggtcagcaggccccggcctactgcacgtagtgccaggaatgtgcccacgatgattatgagtggccagaagcacccgatcacgcatgcgtcctggaactgcacttccgtcgggttctcgaacggcggcgacactgcgatgcagtagcaggcgcctgctagtatgccgaggcaacagtacaagccgagtacaagcagcgcggcgatcattggccggcctccccttgaacaagtttgatgtactcacccgcacccaggcggcggcaccgccagtctgtgttgagaatggccgtacccaccgcgtactgcgcggggttcatgctgtgcagtacgatgactgcctgagcgagggcgggcgtctgcttggtcgccagcacaacggcgccctctgccacgctaggcgtcaccaccttgtagagttcacctggtgacaggcgtcctacggacaagactggcggcgccgggtcttcaggcttgacatatatggtcttgacggtcattactcgccctccttcacgaggtcagtgcgatgcacctcttgtacttcacaggccgggtagatagcgaccgcgccgccgaggaaccagagttcgacgaaggcgtggccggcgacgatgctgtcggctaccacctggcgagtagttccgtccttgagacggacgacgtaggtaggattcatatgcgcttgctccagttcacgatgaggaaccggctcccaagcaaggccgatcggcgatgcttgcgaagccagcgtttggccgccttgcgtgagtagaatcgcaatggacgcacaggtcgcttgcgactccacacgaaggcacagcctcctgatgggctgacggctatgatgagccacttcatttacgggtcggtagctgtctgatgaaccgcacgttacgggcctcggcctcgataaggcgcaaggtacgctcgcagcgtacgtggtagatcgtcatacagcgggacggtcgggttatggcttcaatgatgcccttggtgcctgccgcgtcggcacccaggtagcggtcgctgtagttcaccagccccacgcggtggccgatacggtagggatcacgcgaggacatggtacgaggttcctgcaatgtcgaagatcgggcgcccgttcgcgcagcccttgcggtattcagcgttgatccagccatacgcctggcaggtgacgtgcccggacagcgggctaccctgtaccagcagcacgtcgaatccttcagagtccaggtcccggctcaggcgatacgcttcgtcatagcggttcacagttacgccggcgcccactaccacgaacccgcctggggtcaggacgtgcgcggtattcaggtcacccatacggaagccatgggcgcacagcgccttgtcggctgcgttgaatgcgttcgacgggtccttggggattgcgatcaacagagtattcaaagcttgcatggtttagttctcgcttgtgatgagtccagcaatggccccggagtaggcgagggtcgcccgccagggccatgacttgagtcaccgcttcaggaggtggatgaagagtaccgtcaggccgctgaaccacaacatgcgcagttcatcctcgccgaggttgaggccgagttcgaggaagggaagggcgatccagaagtccatggtcactcccccttcgcctggacggcctgctcgccgtacgggaactgagccgggcggctgtactgtgccagggcgatttggcgttgcagacgttgcttgaagctcatcgtgtttctccagttgtcattgattccagcggaacgcccgcttagcaggcgttcgacttgagtcaatgggcagcagcgcgcttgctctgctcagcgataggtgcagccttggcggccagcgcttccaggtcacccagcagttccatgccgacgatcaccttgcccttggtctgagcctggagcacctgctttttgatcgtggccagggcagcagccaggttgaactcctggtccagcgctttctcaggcttgaagctgtaccacgggctgttggtggcgccgacgagatcggtcttgccgaacttgttgtacaggaagggtaggtccttgttcgatttcttgtcagtgttaacctgtaccttgccgtgcagcaccaaccactcgaccagcgcattgcggcggctgcccttcggcatggcttcatacagcgccttgactacggtcacgtcgccgcactggtcgatgtggtggatgatcgacaggccggtcagttggatggcttcgtccagttccttgccacggacacggatggcgtcgatagcgcggttgatctcttcggtgccacggaatgcgattacggttttggagattgcgttggtcatggtatgtacctcagatggatttgttcaggtaagcagcggcggccaggtagccagcactgcggggagtggtcagggtatcgacgcggggctgcttagcttgcgcctgctcagccttgcggaagatcgggcagtcggcgcctttcggcatcctgtgcgctagatcaatccggcgtgccttgtcgcggcgagccttggcggccttgcgttgacgcggcgtcagttcattcacacgtggcattacaaacccttcccttgcgacttcttagcgttccacccctttaggatgttccgcgccttgccttcgctacccttcacgaaagccttctgttcagggttgtggtagcgtcctggcgctggctccgggtcggtagcgtagcgcacgtcacgcatcttgcgaagctctttgcgcccttcgacgttatcctgtgcgatgagcttagtacgtttggcttcccagtcccgccagtacgctacctgagcagcaaagggtgacttgggagccttagccttgaagtgtgccatcggcaatcctcactaggtctgtctcttgaatcccctcggtggaagggcctcaagggacaaaccttggcattggcatagtccctgtagtatcagcggttctggcttgtcctgcgcatactcttcgggatcgtcttcactcatcccccgtaccctttgcgctatctgcctggccttgttcaatcggcccgccgatactacccagcatactgtcagtcgcgattaaccgggtattctagtcccgatcccactgacactctattcgttcccaccggacctaccataggccctttgcttaaccgtggacggggaggcttcccgctcagactcttttgggtgagtcttcagcacccgacaggtattccctggaaccctgcctaaccagttgcagcttcggtcaacctaccgcaccagtccatgtaccgctggtgaagcttcgaacctctaccgccagatggctcagccatcctttcgtcttgccgcgcatgttagagacttgcgcttgtcttgtcaatcctctgtcggggattagttcgtccagttctccggcataggcccttttgctgaggggccatcaggtggtgcgaactgtaccgcgtgtcctgcaccgtgtcaatccctgcgatgatgcctgccggccttacacatcgttggtcatgccctaagagtttgccgtgtcccttgcgcctatggcttgtgccgcgcttggaaggttgcaatctcccgtcgttctggctgcgcatcctaccgatgtcctggcagggtgtcaacccctgtctccaggctgcctgtagaggcgttgttgcgtgaagacagggcgaactctacagacctgccgcccacgtgtcaatacccgcgccagggcgctccctggagccttcccacgcgtatagagacccacgcgtgcgaggcttagtctggctagccaggattatcgttcccaggtaacgcaaatccaccacccagggagcagccacccagccagggccaccaccctgaaacccgcgtggcactaaggctgcggttatgtcacacacaatggacaaataggcgtccatcagcgccagcggcgcgaccgaggcaggccgagggagtggcgagggtaagacagcaggaccagcggtagcgccagggagacagacccagggagcaggactagacaagccaggtagaggcgagtagagtacgcggcctagagggaacaacccaggtaggaccagggaagctccagggcagaggcagccaggcagagggcaagggcacagcccaagcacaagaggcaaggccagccactcccgcaaccaccaccagaccagagggcagaggccccaggaggaacgagatgctgagcagacaggacagagccgagcgagcctggcaccagcacgacgcagcatggcagcggaagctagccaggtgggcagcagaggatgagcagcacagcccgtacccagcggccagggccagggccaaggatgaccggaggctagcgctggtggcgcaccgcagggcgctgagtatgagccgatggaccgccaccccgccaggggcttgacactcccggcaggatgcgtagaatgggcggcgaagggcagggaagcccaccgccacccggcgaagccggaagctcccagggatgacccaggcaccacccaggcaatgcgaggggatggcccaccagacggagggcctacgggggaagggtgggctgatcagagtcgggagggttctcacacgacgatatcaaaattggacccggagtaactactcccagcccaggccagccaatccagccagccttccagccgacctcaataaaattccagtagttccagtggagcacccgactatgcaggtgctcggcttgagctactcgatcacttgtagaccagggccttggcggtctcgacagcagccatcagctcgtcgagatgcgcgaccagttcagcgcgcagcttggtctcgttgtagccagaacccagggccgcttcttccagcggacggatcaggttctcgatggtgccggcgaaggcgcggaggtctttctgagttgcagcggcgaaggttgccatggttcagttccttgtgttatggatggagtcaggttggacggggctgtagctcagcccgccggtgcggtgtatacgaccttggtgatagcaccgttggctacggtcaccttcacggaaccaccgccgtccacgggcagggtgtcaccgttcttcaccttgtaggcggtgagcgggtccggtggagtagcgccaccctcgccgcccagggcggtggctgctgcgatcacagcggtggccttggccttgacatcggcctcgtccatgtcgtgcagggcgatgcggttgtcggtgccgggctggcatacctggtagaaggtcaggccggtgttacggccagcgaggtattggtcacgggtgttcgccatggtcagtctccttgattcagggcgttgcataggtccagggcgtcctgataggccgctacagcgcggatcaggccagcctgggtggtagggtcaatcagtgggtgttcgcacagcacagcgggcgccggggcggttgcacaggctgtcaacgacagcagcaggcacaggccggtcagcccacgggcggttctggtccagggcacggtccacctcctggcgctgggtgttggtcttggcggcaacctcctggacgtggcgctgtaaggtggcatagcgcacctccagggcctccgcacgggccgactgccgcttgatctcctcctgggcgatacccaaggcccggtagctctgaacgaagccgtatgaggctcccagggctaccacagcaaggacgagtattgcgacgatggttcgaggcattgcttgatctccgcgttgcggcgattcacgaggcccttggatacgaccttctggccgtcgatcgtgaccttgttccacatggccagggcttggcagccctcagtggcgcggccttggttgaagcgcttgaacgctgtgctggttgtacagactggacccacgttgtagcagaagaacgtcagggcggtttgctcgttgacgttcagcggcaccttgatggcgtccaggacgatgcgctcgaagcgctggtagtccttgagcgtcatctggtagcactgctccggtgtggctttgtcacccatcttgaccccggcagtggtgccagagcagatggtgggtacgccggcgatgtctcggtaggcagtggtctcgctaccttccagggcgacaaggccggcgagggcagccgcaagggctgcgccgcgcaggggcttgttcacttcttgaacctccggcgaagctccgcgatgctatcgagcatcttcgggagcagggtgatgagctgggcgcccacgtagagcgcggtgagtaccgcagcacagaggctggcgatctcatagggcgagtaaacggcgatccccacgccggtgacggcgagggtgcctttgcccgcctcggtggcggtatcgagcatcatagtcttcgtccttttgggcggcccttgcgacgctcccggcccatgccgagagaccgaaggacagacttagtgtaacccatcgggttgttcagccattccttcttggcagcctcttcacgagcgcgggttgcggcttcgtcgtcctttacgagcgtgggtgctagctcgcggacaaggccctcaagggcatcgatccggtcgtccttcggcagtgagcctcggtcggtggtgatgttgtgaatctggtggaacacggagcgctcattgcgcttgtccgctgggtactgctgacaggccacatggtcggaatccatcgccgatacgtggaagatcagacggtgccgctgcatgatgggccgcagggtgtcgatgatgcgacgctctttctgtccggacttctggcggtcttctacgccgatcccctcatagcggggcttgttggtgtccgggtcgatggatcgcatgtggttgcggaagagctggccaactgcaccagcgccgaggtttttctcgacatagatcaccttgacgccataacgcgcagccagggcaatacatttctccaggttctcctcggcaaagccacccttccagccgccgatgctcacgacgtggatgtacgggccaagagtcccgcccacggcatacgacagctcgtcgccaccgtcgccggcagggtccacgaacatcgtcatttgctggagtggtgcccagccgccagccatcagcgccggcaggtacagctcaggtttgatgaccgggaatcggtgggcgtcgaacttgagcttgaagcgctcatcggcagcccaggccacttgctctggcacgctctcatgcgtggcgtcgatgaacagcaggtcgcgcagcttgagctgcatacgctgctcgtcggcgaggctggtgtccagcatgtactgaagctggaagccctcggggccttggtcaagctccttgtcgagcaggtcctcttcgttgtagcgctgcggatcggcagcccagccacgggtcccatccaggcccttgccggtgcgcgggttgtggcctttctcctccaggcgggcaatgcgcgccaggatggaaggtgcgagccagtcaccgtagcgttcctgctcatccagggtcgggaagcggcccggccagatgcgcatcaggaagccccgcgccggcaggccgttgtagatcgactcacgggactgcggcgtgcccaggtagagaatcttaccgtgggtacagatagaggtgaactcctgcgactgtcgcgtcagcttggcccgctcggtggcggtgaggccgttcttcgtggtctcgatgtcgtcagggatcaggatgtcagcccggtagccctggagggcagcggtgatcccgatgcagttgatggaggccgatttctcgacgcccttcaatgcccagttcacgtcgaagctggtggccgaggtacggtcacccatgcgggcctcggggcgcaggtacgccagaaggtcccagtgcatgatcagcttcgtgatcaactggccgttctcctcggccttgtcaccggagccggataccagcatggcgcgggtagccgggttctgagtgatgcaccagaccacgtagatacaggcgatggtggacttggcctcgccacgctgtgcagcgaccatcgccttgttgggcgagtcctgcatgaagtcggcgatgtcgagctgcatccacgtcatcttgaagccgaggaacagcatggcgtccaggcagaagtcccggaagcgcgggtacatgtcccgcacctcgtgggctatctggaatcgttcttgcggcgtcatgctgcctcctagtgggtgtacagtcgttccatctcatcgtcggtctcaccggcgatgaagccctccagggcgatacggcggttctccgcctgcgcctgccgcatttcctcacggagccggtcgatgttgatggtgtcggacggatcgcaggtgatctcgttgtccttgaggaacttggtggcggcagcgatatccgatgcggggatcgggatgtcgttgtccatgtaccacttgaagttgcgttcgatggcggtgcagaccagctcgtgaagcaggcccagccgctcagcactcgcggtctgctttttgctcattacatgtgccctctgaattggacttggaagcgtaggttggttcccatgccgcacttgaccagaggccggaacaccttgccggtgtccacctccaggtgctcctgggtgtagttctcgttctgcgtgcgaacgtacatgttaccgcctcgggtgtagggtacgatgacctgtgcccacgcagttgcgccggggcgcttgtcgtcgagggctaccttggcatagtccacttggcccagctcaactacgatacgacggccctgctgcacgttgaagtacgatagggcgccggtcttgtctgcgcggacgaacacaaagacgtagttcatattgctgtcgaagtccaaggatatcgtcgagatacccgcgtcgatgccatcgccaatgcgcacttcgttggtgccgtcctcccagccgaggtaggtgccgtcattccgcagcatggtgcgccatacccggacgaatagcccctcggaggggtcctggatggcgacccctccgtcgcagaagtcgagcacgtcgctgatgtcacgacgtgccctggcacctacaaacttcgacttggccttgggatcgaggtcttcgttgaagtcgtagatcagtgccatgggttatgccctcgccaccgagaactccattgtaatggagaactcctgagtgttgttcttgactacgggagggtcgatggtgagtgcgtagttccgcccattgtaaatctttaggtccttacagccggtgataccccccggcatgttgccgttatctacggtggcccgtagcataagctgacccttgtaggtgccgcgagtatatcgcgggtacagcttcacccactgaccgtcttggacatcggcaccggacgcattcttgccgtcgatccgtggactctcgttgtagaagatgtagcgctcaccgtagaggttacgccggttcgcgaagggcagcggggtgaggcggatggtacgctcaaccccggagatcacgaacttggcctcggccatcgccacagccttgctgcgcagctcatactgtacgtcgagaatctcgtcagcctgaactaccagggtggtgggttggccggcggcgtctttgatccgggtgtaggatagtggagtacctgccggaatcttcgcgccggtgttactctcaaaccccaccgcggattgagctacgatgcccacggtggccagtacctgaccggccagggtgcctattgggaagcgccaccgcttgtgccagtaaatccactccccgtccaggcccgaggtcacgtcgccgttaggggcatacgaggtggtgcgccgaacttcttccggcagggagggcgcggcggggttagggtccgcagtgctggtactcacggccagggcctgggagaacaggtcagaggtatccatggcgcaaatccaatcaagacctgcgttagtgatgaggttgtcgaaggtgtgttgcgccaggacttcacccgtggctttcatatgggtcaccgtgtagcgacccttaactcgcgtctcaaacattggtcagttccgcctgtttaattgctgttgaggtggtgaaggcgtaaggctccacgatatactcagagtatacgaccacaaccttcaactccgcgcctaccactgcggtctgcgacgagaatgcgtaaggttctgcggtgtagtccttaaccgtatcgcgcagtaaaactgcatggatggcaggtcccgtcaggaacccatcgccaccgccgtagccgagctgagtcagcgaccgcagcagcacgcttaccacactggaggtcgcgtggtaggtgtcctctccgggctggttcaacacctcgtgcagggtgtcgcgtgttagcgctgccacgatgttcggcctacaagaccatgcgtcatccgtagccaggatgggatatgggtaggtcgccaagatgggcttgggccgccgaatttgagaggccatgatgcccgcgataatgccgcgcattattcgtcctccatggctccgaacacgatccagtggttaggcccgagacgcttgagggtacacacgccattctcgccgtagagctgcatggtggtgttctgcaaccggttgatggtcacgccggggccggccacgatgttgaggtcgcgcacacccgcctgttcgaagtgaacctcgctgaactcgatccagggtgcatccgggtcttccatctgcatggtcagggtcagcggcttatcagcggtgatgcagcggttccagtaaccacgccagctcgggtcgatgtccgagtcttccgtaacggtgcgaatctcggcgaagcccagggcgcggcgcagcgcttcgttagcggcgtcgagtgcctcctgtgcaaggcggcgggcctcctcggcgatacggatcgcgtcgagaacaccatccagtgcgaggttcgcggtgttgatgccctcctgcacggcgtacagaagctgcttgttgttcgcgtcgatgtagcgaggcaggaacgggatgccctggctgaactgcgtatccggcacttgggcgggggtgtcgcggaagatgcggacctcttggccctgcttaggcacttccgcaagctgaatgttggtgttgtccacccacgtatagtcggtggtgagtatcttgtcgacctggacgaatacgtcctcacgacgcaggaatgggaagtcgagactgaatacagtctcgaccccatctgcaacgtggatggtctcggggttcttgaaccgagccacgctattcccctttgatggattccaacagcaacttggttgccgggaacacgttgacgaaaggcagtgcgcccgccgcgccgttgacgatatcgccagtggctgctgccgggtcgtcgccggttacgaggtctcgaacgcctcggaacacttcgttggagtgttcagccagtccgaagaccggagcagacattcgggagtggccagtgaccacaccccacatatcggcggtgaagcccagaccggcagtgtagccgatgccgtcgatggccatcttgcggatgccttcatcagaggtgtcgaacttgccgttgatcgctgccttggcacccatcatcagcgcggtgagcggatactggaatgcgaggagcgaggccacgccaagcacgccggagttctcataggttccccggaggagcttgttgtgcgcgaaggccacaaagctgcggaactggcccaggatttggccgacaggtgaccgagcaaagcccgagttctgaccgaccctgccgtacagcagcgagtcgtccatgatccgcagtgcggtgttcatgacggtgttcacgtctgcttggctccaggcgccccaattcatcgattgggcgttccttcctctgtatgtgacataaccgc

SEQ ID NO: 8 - DNA, 42717 bp, unidentified
  source 1..42717: mol_type = genomic DNA
ggcggccagcgcttccaggtcacccagcagttccatgccgacgatcaccttgcccttggtctgagcctggagcacctgctttttgatcgtggccagggcagcagccaggttgaactcctggtccagcgctttctcaggcttgaagctgtaccacgggctgttggtggcgccgacgagatcggtcttgccgaacttgttgtacaggaagggtaggtccttgttcgatttcttgtcagtgttaacctgtaccttgccgtgcagcaccaaccactcgaccagcgcattgcggcggctgcccttcggcatggcttcatacagcgccttgactacggtcacgtcgccgcactggtcgatgtggtggatgatcgacaggccggtcagttggatggcttcgtccagttccttgccacggacacggatggcgtcgatagcgcggttgatctcttcggtgccacggaatgcgattacggttttggagattgcgttggtcatggtatgtacctcagatggatttgttcaggtaagcagcggcggccaggtagccagcactgcggggagtggtcagggtatcgacgcggggctgcttagcttgcgcctgctcagccttgcggaagatcgggcagtcggcgcctttcggcatcctgtgcgctagatcaatccggcgtgccttgtcgcggcgagccttggcggccttgcgttgacgcggcgtcagttcattcacacgtggcattacaaacccttcccttgcgacttcttagcgttccacccctttaggatgttccgcgccttgccttcgctacccttcacgaaagccttctgttcagggttgtggtagcgtcctggcgctggctccgggtcggtagcgtagcgcacgtcacgcatcttgcgaagctctttgcgcccttcgacgttatcctgtgcgatgagcttagtacgtttggcttcccagtcccgccagtacgctacctgagcagcaaagggtgacttgggagccttagccttgaagtgtgccatcggcaatcctcactaggtctgtctcttgaatcccctcggtggaagggcctcaagggacaaaccttggcattggcatagtccctgtagtatcagcggttctggcttgtcctgcgcatactcttcgggatcgtcttcactcatcccccgtaccctttgcgctatctgcctggccttgttcaatcggcccgccgatactacccagcatactgtcagtcgcgattaaccgggtattctagtcccgatcccactgacactctattcgttcccaccggacctaccataggccctttgcttaaccgtggacggggaggcttcccgctcagactcttttgggtgagtcttcagcacccgacaggtattccctggaaccctgcctaaccagttgcagcttcggtcaacctaccgcaccagtccatgtaccgctggtgaagcttcgaacctctaccgccagatggctcagccatcctttcgtcttgccgcgcatgttagagacttgcgcttgtcttgtcaatcctctgtcggggattagttcgtccagttctccggcataggcccttttgctgaggggccatcaggtggtgcgaactgtaccgcgtgtcctgcaccgtgtcaatccctgcgatgatgcctgccggccttacacatcgttggtcatgccctaagagtttgccgtgtcccttgcgcctatggcttgtgccgcgcttggaaggttgcaatctcccgtcgttctggctgcgcatcctaccgatgtcctggcagggtgtcaacccctgtctccaggctgcctgtagaggcgttgttgcgtgaagacagggcgaactctacagacctgccgcccacgtgtcaatacccgcgccagggcgctccctggagccttcccacgcgtatagagacccacgcgtgcgaggcttagtctggctagccaggattatcgttcccaggtaacgcaaatccaccacccagggagcagccacccagccagggccaccaccctgaaacccgcgtggcactaaggctgcggttatgtcacacacaatggacaaataggcgtccatcagcgccagcggcgcgaccgaggcaggccgagggagtggcgagggtaagacagcaggaccagcggtagcgccagggagacagacccagggagcaggactagacaagccaggtagaggcgagtagagtacgcggcctagagggaacaacccaggtaggaccagggaagctccagggcagaggcagccaggcagagggcaagggcacagcccaagcacaagaggcaaggccagccactcccgcaaccaccaccagaccagagggcagaggccccaggaggaacgagatgctgagcagacaggacagagccgagcgagcctggcaccagcacgacgcagcatggcagcggaagctagccaggtgggcagcagaggatgagcagcacagcccgtacccagcggccagggccagggccaaggatgaccggaggctagcgctggtggcgcaccgcagggcgctgagtatgagccgatggaccgccaccccgccaggggcttgacactcccggcaggatgcgtagaatgggcggcgaagggcagggaagcccaccgccacccggcgaagccggaagctcccagggatgacccaggcaccacccaggcaatgcgaggggatggcccaccagacggagggcctacgggggaagggtgggctgatcagagtcgggagggttctcacacgacgatatcaaaattggacccggagtaactactcccagcccaggccagccaatccagccagccttccagccgacctcaataaaattccagtagttccagtggagcacccgactatgcaggtgctcggcttgagctactcgatcacttgtagaccagggccttggcggtctcgacagcagccatcagctcgtcgagatgcgcgaccagttcagcgcgcagcttggtctcgttgtagccagaacccagggccgcttcttccagcggacggatcaggttctcgatggtgccggcgaaggcgcggaggtctttctgagttgcagcggcgaaggttgccatggttcagttccttgtgttatggatggagtcaggttggacggggctgtagctcagcccgccggtgcggtgtatacgaccttggtgatagcaccgttggctacggtcaccttcacggaaccaccgccgtccacgggcagggtgtcaccgttcttcaccttgtaggcggtgagcgggtccggtggagtagcgccaccctcgccgcccagggcggtggctgctgcgatcacagcggtggccttggccttgacatcggcctcgtccatgtcgtgcagggcgatgcggttgtcggtgccgggctggcatacctggtagaaggtcaggccggtgttacggccagcgaggtattggtcacgggtgttcgccatggtcagtctccttgattcagggcgttgcataggtccagggcgtcctgataggccgctacagcgcggatcaggccagcctgggtggtagggtcaatcagtgggtgttcgcacagcacagcgggcgccggggcggttgcacaggctgtcaacgacagcagcaggcacaggccggtcagcccacgggcggttctggtccagggcacggtccacctcctggcgctgggtgttggtcttggcggcaacctcctggacgtggcgctgtaaggtggcatagcgcacctccagggcctccgcacgggccgactgccgcttgatctcctcctgggcgatacccaaggcccggtagctctgaacgaagccgtatgaggctcccagggctaccacagcaaggacgagtattgcgacgatggttcgaggcattgcttgatctccgcgttgcggcgattcacgaggcccttggatacgaccttctggccgtcgatcgtgaccttgttccacatggccagggcttggcagccctcagtggcgcggccttggttgaagcgcttgaacgctgtgctggttgtacagactggacccacgttgtagcagaagaacgtcagggcggtttgctcgttgacgttcagcggcaccttgatggcgtccaggacgatgcgctcgaagcgctggtagtccttgagcgtcatctggtagcactgctccggtgtggctttgtcacccatcttgaccccggcagtggtgccagagcagatggtgggtacgccggcgatgtctcggtaggcagtggtctcgctaccttccagggcgacaaggccggcgagggcagccgcaagggctgcgccgcgcaggggcttgttcacttcttgaacctccggcgaagctccgcgatgctatcgagcatcttcgggagcagggtgatgagctgggcgcccacgtagagcgcggtgagtaccgcagcacagaggctggcgatctcatagggcgagtaaacggcgatccccacgccggtgacggcgagggtgcctttgcccgcctcggtggcggtatcgagcatcatagtcttcgtccttttgggcggcccttgcgacgctcccggcccatgccgagagaccgaaggacagacttagtgtaacccatcgggttgttcagccattccttcttggcagcctcttcacgagcgcgggttgcggcttcgtcgtcctttacgagcgtgggtgctagctcgcggacaaggccctcaagggcatcgatccggtcgtccttcggcagtgagcctcggtcggtggtgatgttgtgaatctggtggaacacggagcgctcattgcgcttgtccgctgggtactgctgacaggccacatggtcggaatccatcgccgatacgtggaagatcagacggtgccgctgcatgatgggccgcagggtgtcgatgatgcgacgctctttctgtccggacttctggcggtcttctacgccgatcccctcatagcggggcttgttggtgtccgggtcgatggatcgcatgtggttgcggaagagctggccaactgcaccagcgccgaggtttttctcgacatagatcaccttgacgccataacgcgcagccagggcaatacatttctccaggttctcctcggcaaagccacccttccagccgccgatgctcacgacgtggatgtacgggccaagagtcccgcccacggcatacgacagctcgtcgccaccgtcgccggcagggtccacgaacatcgtcatttgctggagtggtgcccagccgccagccatcagcgccggcaggtacagctcaggtttgatgaccgggaatcggtgggcgtcgaacttgagcttgaagcgctcatcggcagcccaggccacttgctctggcacgctctcatgcgtggcgtcgatgaacagcaggtcgcgcagcttgagctgcatacgctgctcgtcggcgaggctggtgtccagcatgtactgaagctggaagccctcggggccttggtcaagctccttgtcgagcaggtcctcttcgttgtagcgctgcggatcggcagcccagccacgggtcccatccaggcccttgccggtgcgcgggttgtggcctttctcctccaggcgggcaatgcgcgccaggatggaaggtgcgagccagtcaccgtagcgttcctgctcatccagggtcgggaagcggcccggccagatgcgcatcaggaagccccgcgccggcaggccgttgtagatcgactcacgggactgcggcgtgcccaggtagagaatcttaccgtgggtacagatagaggtgaactcctgcgactgtcgcgtcagcttggcccgctcggtggcggtgaggccgttcttcgtggtctcgatgtcgtcagggatcaggatgtcagcccggtagccctggagggcagcggtgatcccgatgcagttgatggaggccgatttctcgacgcccttcaatgcccagttcacgtcgaagctggtggccgaggtacggtcacccatgcgggcctcggggcgcaggtacgccagaaggtcccagtgcatgatcagcttcgtgatcaactggccgttctcctcggccttgtcaccggagccggataccagcatggcgcgggtagccgggttctgagtgatgcaccagaccacgtagatacaggcgatggtggacttggcctcgccacgctgtgcagcgaccatcgccttgttgggcgagtcctgcatgaagtcggcgatgtcgagctgcatccacgtcatcttgaagccgaggaacagcatggcgtccaggcagaagtcccggaagcgcgggtacatgtcccgcacctcgtgggctatctggaatcgttcttgcggcgtcatgctgcctcctagtgggtgtacagtcgttccatctcatcgtcggtctcaccggcgatgaagccctccagggcgatacggcggttctccgcctgcgcctgccgcatttcctcacggagccggtcgatgttgatggtgtcggacggatcgcaggtgatctcgttgtccttgaggaacttggtggcggcagcgatatccgatgcggggatcgggatgtcgttgtccatgtaccacttgaagttgcgttcgatggcggtgcagaccagctcgtgaagcaggcccagccgctcagcactcgcggtctgctttttgctcattacatgtgccctctgaattggacttggaagcgtaggttggttcccatgccgcacttgaccagaggccggaacaccttgccggtgtccacctccaggtgctcctgggtgtagttctcgttctgcgtgcgaacgtacatgttaccgcctcgggtgtagggtacgatgacctgtgcccacgcagttgcgccggggcgcttgtcgtcgagggctaccttggcatagtccacttggcccagctcaactacgatacgacggccctgctgcacgttgaagtacgatagggcgccggtcttgtctgcgcggacgaacacaaagacgtagttcatattgctgtcgaagtccaaggatatcgtcgagatacccgcgtcgatgccatcgccaatgcgcacttcgttggtgccgtcctcccagccgaggtaggtgccgtcattccgcagcatggtgcgccatacccggacgaatagcccctcggaggggtcctggatggcgacccctccgtcgcagaagtcgagcacgtcgctgatgtcacgacgtgccctggcacctacaaacttcgacttggccttgggatcgaggtcttcgttgaagtcgtagatcagtgccatgggttatgccctcgccaccgagaactccattgtaatggagaactcctgagtgttgttcttgactacgggagggtcgatggtgagtgcgtagttccgcccattgtaaatctttaggtccttacagccggtgataccccccggcatgttgccgttatctacggtggcccgtagcataagctgacccttgtaggtgccgcgagtatatcgcgggtacagcttcacccactgaccgtcttggacatcggcaccggacgcattcttgccgtcgatccgtgaactctcgttgtagaagatgtagcgctcaccgtagaggttacgccggttcgcgaagggcagcggggtgaggcggatggtacgctcaaccccggagatcacgaacttggcctcggccatcgccacagccttgctgcgcagctcatactgtacgtcgagaatctcgtcagcctgaactaccagggtggtgggttggccggcggcgtctttgatccgggtgtaggatagtggagtacctgccggaatcttcgcgccggtgttactctcaaaccccaccgcggattgagctacgatgcccacggtggccagtacctgaccggccagggtgcctattgggaagcgccaccgcttgtgccagtaaatccactccccgtccaggcccgaggtcacgtcgccgttaggggcatacgaggtggtgcgccgaacttcttccggcagggagggcgcggcggggttagggtccgcagtgctggtactcacggccagggcctgggagaacaggtcagaggtatccatggcgcaaatccaatcaagacctgcgttagtgatgaggttgtcgaaggtgtgttgcgccaggacttcacccgtggctttcatatgggtcaccgtgtagcgacccttaactcgcgtctcaaacattggtcagttccgcctgtttaattgctgttgaggtggtgaaggcgtaaggctccacgatatactcagagtatacgaccacaaccttcaactccgcgcctaccactgcggtctgcgacgagaatgcgtaaggttctgcggtgtagtccttaaccgtatcgcgcagtaaaactgcatggatggcaggtcccgtcaggaacccatcgccaccgccgtagccgagctgagtcagcgaccgcagcagcacgcttaccacactggaggtcgcgtggtaggtgtcctctccgggctggttcaacacctcgtgcagggtgtcgcgtgttagcgctgccacgatgttcggcctacaagaccatgcgtcatccgtagccaggatgggatatgggtaggtcgccaagatgggcttgggccgccgaatttgagaggccatgatgcccgcgataatgccgcgcattattcgtcctccatggctccgaacacgatccagtggttaggcccgagacgcttgagggtacacacgccattctcgccgtagagctgcatggtggtgttctgcaaccggttgatggtcacgccggggccggccacgatgttgaggtcgcgcacacccgcctgttcgaagtgaacctcgctgaactcgatccagggtgcatccgggtcttccatctgcatggtcagggtcagcggcttatcagcggtgatgcagcggttccagtaaccacgccagctcgggtcgatgtccgagtcttccgtaacggtgcgaatctcggcgaagcccagggcgcggcgcagcgcttcgttagcggcgtcgagtgcctcctgtgcaaggcggcgggcctcctcggcgatacggatcgcgtcgagaacaccatccagtgcgaggttcgcggtgttgatgccctcctgcacggcgtacagaagctgcttgttgttcgcgtcgatgtagcgaggcaggaacgggatgccctggctgaactgcgtatccggcacttgggcgggggtgtcgcggaagatgcggacctcttggccctgcttaggcacttccgcaagctgaatgttggtgttgtccacccacgtatagtcggtggtgagtatcttgtcgacctggacgaatacgtcctcacgacgcaggaatgggaagtcgagactgaatacagtctcgaccccatctgcaacgtggatggtctcggggttcttgaaccgagccacgctattcccctttgatggattccaacagcaacttggttgccgggaacacgttgacgaaaggcagtgcgcccgccgcgccgttgacgatatcgccagtggctgctgccgggtcgtcgccggttacgaggtctcgaacgcctcggaacacttcgttggagtgttcagccagtccgaagaccggagcagacattcgggagtggccagtgaccacaccccacatatcggcggtgaagcccagaccggcagtgtagccgatgccgtcgatggccatcttgcggatgccttcatcagaggtgtcgaacttgccgttgatcgctgccttggcacccatcatcagcgcggtgagcggatactggaatgcgaggagcgaggccacgccaagcacgccggagttctcataggttccccggaggagcttgttgtgcgcgaaggccacaaagctgcggaactggcccaggatttggccgacaggtgaccgagcaaagcccgagttctgaccgaccctgccgtacagcagcgagtcgtccatgatccgcagtgcggtgttcatgacggtgttcacgtctgcttggctccaggcgccccaattcatcgattgggcgttccttcctctgtatgtgacataaccgcgaacccgcgccaacactggcgtccagtccacgtccttcccgtactgctggagcacgcgaagggctgcttcatccccctgagccgcccgcgccaccttgttcaaggtgaggttggcgttcatacgggattgccagttgtgaatgaacttcatgccgttgagcaccgggacagcctgcttacctgcgtgcaggaagcgatccatgaaggtatcttggctggccaggaaggtgtcgaactgccgcttccagggcttcatccggatatcgttggcgaggttcaggccgaggacggtctgcatctcgtcagcgaggtccgggtcgcgacgcatggcgcccacgaagtctcccaggcgggagttcagcatggccttcatgacgttgaagacgccttgacggtgcgccatcgtggccagctcggcgagctgatacacgcctgagaatcccagcatggtggcgctggtcaggccgctggcccgctgagcaaccgggccgagctgatgctccctcggcacgttgccggtgaagtccccgaagactccccgcagttgccccgtcagctcctgcaccttatcggtgcccaggtgtgctgcctctcgctggtactcccggatgaaggcttcgatctccgagtcccccggcatgcctgcgcgggccaatgctgagcggcccgacatactgccggcgtagttctccatcagccggtccaggtctcggtcgatcaggtcctgcacccgatacacggttccgttgtggttgatctctgcggtcatgtccagcgacagccggcccttgccgtacttgacggtgccctggtcggactgcttctgctcgatcttggccatgatgctgtcgaacttggcctgggacacgttggcctcctccagcgcctgccggatgaatgccgtgtccgccacgcccatcgcgcccatgaactcggagcggattccggtggcccgatcccgcgcccgctgcacaatggcctgtgcgatggtatcggcatcggcgcgctccagcccagggatgccacggaacacggcctcgctgatggcgcggcgggccaggccaggggcggcctcgtccatctgcgccatcttcgaccagttccatgaacggtggaagtaccccggtcggggagcgaagtcctcgaagccacgcacaccggcttccctggcgcgctggcccatcagaccgtgaatctcgtctgagcggtcggccagggccttgatggtcggcggcaggttcgggtccacacggacgctgccgtaggccgtccactcgcggtcccggcgcagcagctcgcgggtgacctgctcgttgagctggtcccggactgccatggcgcggcgggagttcagcgcacgtgccgtcaggcccacaccctgctcagccattgccttggccatcatctcgtcgtaggacttcacgtaaccctcgaactcgttccgatagcggcggagatagctcgctgcgttgtcgttcgtgctgaacccatcccgacgtaccgggtcgtcgataagacggctcaggagtcgccgtgcgccctccccaggctgtgccaggaggtctgcctcgctgaagaacctgttcacgaagccggcaccctcacgggcacgttcacgggtggtccgcacgatggtctccaggctggcctcctcggttaccggagcgcccttgttggcccacttggcctgcgccttagtgtagccgggcatggcctccataatcgtctcagaggcggccaggacgcggctcagggccgtgtcagcatcggaccgcagacccagtagggtgcggatgccctccacgaagcgggaccacaggcccggcccgccgtcactgtagcggaggcggttcagggtcctttggaagcgggtatccgtcaggccccaggctaccagttccttgacgttggccagggtgttggagttaccggctagcagcgtctcttcgaactcggacagttgccgaccggcggcgcggtcctgcttcagggcgttgagcacgttaccccggacgttctccagggtctgcatggcctgagccaccttcggactcatcgcgccaggattccgcaaggcggcgttcatcacgcccacggtggcagcgtgaaccgcctcgtggagcacggtcaccgggttggtgccaactcggccaggtgcggtgctgccgcgtacctggaccaaggtgtcgaggccctgggtggagtgaatccccgccgtacccggtttgaggaaggcagagctggcagtgtcaccgccctgcaccacacggaacgcggtacgctgccccaggccctccagggtcctgatagtatcagccaccttggcggcgatgccctggagcggcttgggcacctctgcgtgggtcttgaggtggtccaggacctcagacagcttccggcccgacaggctatgcagctcgtcgccgaaggcagtgtcacgtcgcggaatagccggtatctcagcctgctccacgcgggcactgacacgggatagcacagtgccctcgtccagcaggtctaccacgtcacctgccttgaagccgcgtgctgcggcctcctcggcggtcatggctacttctggcagcccgacagtaggcgccgatacttcgggcacatgcggttgcgttggggcctctgcggcaatgcgtcccgcaccagaccccagcagagcacccacgccagcgccaagagcaccagccatgatgtaggttccggcatccacgtcggcccctgcggcatccagcccagcaacatacccgacttgcccagcgccgccagcagcagccatgccagcgcgaccgagccgcagagcacggccagcgccgaaagtaaccgcatcaactgccagagcggcagggtccagcatgccagccgcgaagttccagtacgggttgtcccgcacgatttgctcgtcctgctcataccgttgaatcctcgacaggaggtaggccgcgtcctcggcattgccggcacgggccatgatctggagatagttgtcagtcggctggatacctgccgcctggagcgcctggaccccataggtcccagcgtcgaagttagggtccacctcgccggtactgttcgccgcaaggtctgcgtcgagctggagcgcatcgccccagcgtccgacgagggtggactggttccagagtgcggaagcacggtcaagggccggcagttcctggtccgctacgatgcgttccagttcccgcgcattggctcgttggcccgctgccacgttccgttctccgatctcgccacccgtcagggcgtcgaaccccacggtaggcaccgcgtcaagttggccctgtacttgggcctcgtcgagctgtgcttggtcaaggggatacttgggcgtcatgcggcccttgaattgctttgccatgtcttactccgctgttgcggcgctgtaccaatcgacaccgatttgactcggtgtatcgaagtggggcgccatgcgcttgatgaatgcctcggcccggttgggcgtctgcgtgtaccacttgctgtttcgcacaccagcctcgaaggcttccttgttgcgatccttgatcgcctggaaggtgttacggaactgccgggcacgtccttcgcccatctggaaggccataccggccaatcccaggatagaggcattgttcgtaacgcccagctcgtcggccaacctcacaccctggtcgagtgcgcggtcggtgtcctcggcgaaccactgcgcggcttgctcgggcgtgactgtagtgcctgccccagcattgccactgcccaggtaatgccccaggcccacactataaccatcggcatccttatacgcctcccctcggtaagcctcgaactgagccagttccttccgccagttgaacacgtcctgcttcagcatgccggcactgttgcccccgttcatgcgaatgtccgtgccactgaccttgacgttggccccgtactcggcgccccgcatagcgttcagcttgtcggagttgcgcttgagcacctcgttgcccaccgcttgtgggtccacacgggtgcggtccagggcgaccccgttctcgtcgtactcgacggccaggaggctgccactggtgcggtcgtactcgaaggcgactaccgacttgtagccgaggagtccttcgacatgcggcttgtgctgctcggccaggacggttcctatggtctcggtgtcgttggtcccgaatagctgctcggcggtggtgccgcgaggcaggatcagcggcgcgctatcgcggcggctgaataggtccccttccttcaggttccgaccttcgcctacctggatggtgcggttacgcacgttggcggcggcgatctccagcagggcctcgcggcccgtgtcgctggtgagcagacccgcatgcttgcggtcgctggccagccagttcgcctcgtcgatggtcgcccggcgatacatgctcaggacggcctcgttgttgctcaggtcgctctcgccggtcagcatgttccaggctcgaccgaagatgttgttcacgaacttgtcgttgacctgcttaccgaggttgtccttgaatgccttggtgttctggcctctctcgaactcgtccatctgcttcacgacttcggcgttggcgctaaactcgcgcagagcttgagctggtgcgatgcccatcttcatctgcttgagtgcccaggccacggcgccctgctcggcttccgggatgccggatagcatcacgttgccggcggatgggttgatctcctgggccgaggccacctgttcgaagatgctgttcagcgtgttgaccagctccgggtttgcctcgccttccttggcggcctggatcatgcgcaccgcgctgcctacggactcgccgtaggtcttggggaaggtccccaggcgcaggccgagctgtgtgccctgcacgagacggtcagtcaggcttgagccgttggcggcctgcatcttgtcccactgctccagcgcctcggtgacgttggtacccagcgtgtggagggcgttgatgtctccggcttccaaggccgccatgatgccctgcatgcgctgagcgttgcccaggccggtcatggccttggtcatgaacgagatggcctgagcgtcgctccagcggccctcctcgaccatgcctcgtgagtacgcctcaacctcggcaaggtctgtgatggcgccgttggccacccgctgctggaagtccgcgtcggcccgcagggtagccatcgattccttggcgcgggtctgagccttcgacttttcatagaggccgttgagcgcacgccgatcatcgaaggacatgctgtccaggaacccggcatcgcgcaggccctcatagatgccccgctggttcatgtccaggctggccgccaggaactgcatgcctaccttgtcgcgcacctccagcgggatatcctcggaggtcatgatgttggtatagaacaggccggcctcttccaggctgagctgccgggacagttcgtcgccggtggcctgagcctgcacagccttggccaggatgctgttaccctgggtgcggaagccacgggcggcctggtcgatggaccagtccatgtacgccttagcctgcatgccgaagagctgttcctcggccttctgctgctgcgccagcgcctgtaaggcatcgttggggttcatgccctcggtcgaatccaggacgtgcgtagcctcctgggacaggtacttgcggaactcctcgggagtcatctcccggcccttgttggcgatgaatcgctgcatcttgaggctgaagtcggcctgagcgatgcggtagtcctgcttgcgccagccgcccttcacgaatggtttggccagtacgttgctgtctactgcctcctcagcctcgccggccatacgggcacgctcaccgcgcagaacttcctgctgcacgttgtgctcgaaccatttgccagcgatctgctgaccggcacccaggatgccgtcgagaatctgcgagcctacgctcgggccgctgtagttgatctcggagtcgcgcactccgcgccgagcactctggcccggctggagttgcgtctgtccgacgttgatcccaagctcttgggaagcacgttgcgattccgccatcagttgcctcctttaggcgtggcgccgaacttgaagtattgacttgcgtacagggaacccgccgacatcaggccggccaccagcggggaccgttgccccgccgtggtactcttctgccccagcaggccggccttcgcctgagcctggatggagtgcgcctgctcggcgaggttccacatctggttgtccaggttgtcgtcaatctggatcagggcctccccgacctcgcgctcgatgtccagggccaccgcatccacggatgcacccttgacgccgaacgcgccggcctgagcctcggcactgccgccggcgagcatcccctggcgcttggcctccacctgcgaggccacggcctgcttgcggtagctagcggccatgacgcccaggttggcgatgtcgcgggcagcggcgcccaggttgtcgaggtccgccttcagtcgagccttgttctcagccttgatcttcttgcgctcttccttgttggccataccctgctgaagggctgacatgccgccagcggccaatagtggtagccagaaagccatcacaccctccggtagatttggttggacttgaagttgtactcgacagcccggacgttcatgtcgtacggactatggcagctcagctcgaacttggacgtggccatatcgacccgtgccggcagcggcaccacagcgctatccaccagaggctccccggcattgagttgccggctgaacaaccgaaggggcgtcgtgtcgtaccacggctggttgggtcgagccgtgtcgctgatgcgccacaggaactcgccagtccatccgaagttcacgctgtaccggtggagcactgcgcgggtcgcggtcatgggcagcccgttgtggtcccgtagcaccggcggagtgaactccaccttggaccagaactcacagccgaccacgtacacggcaccgactacggcctcgggcacgtcgaggaacaccttcgtattcgtctcgcgcttcacgccgaggtgggtacgttccatgtaggcaccggccacgggctggagctggtatacggcagaggcatccttgatcaggtcccaatgctgcttggtcagctccagctcaccatcgacggtcgcctcgatacgccgccagtaatcgtacttcggatattgcagaccctcgcgggctggcaggctgttcaggtgcatccggcccagggcgatctcctggcccttctggatcaggaccatcaggttgtcgccggtgaagtacgcgccgatgatctgatgccgcagcgtccatcggtggaaggcgttctggactttctcgttgccctgccagaggtactggtggcagatcatctcgtccgccgtgctggtgccgaacaccaggtagccgctggaggccgccgcctggatgtactcagccggccccggcatgtagctcgggatgtggctggtaacgtcctcggcgacgtagtggctgtccgtggacggcgacggggccatctcatgcaggcccatgaaacccagggcacgctccgcagcgaagtacacactgcggccagtcacggcaggtgccgccctggtatcgaggtcgtactgcgtggtgatgctgataaccgccgtacggggagttacaatgccgccaccggggaccacggcctggtacttcttggcgaagacgatcaagtccttgttgaaggtgaccgcgtgctcgtacggttcagtcaggctcccctgggccgcgatctcgataggatcatcgtcgttcagcgcggctgccgacttcttgaaccagcggtgcggattgttactggccgacatgcagacgtactcctgcgacaggagaacgaggcgaccctggaaggtcgtcatgccggtgatgcctcgggtgacgaagttgaacgtggggttcgtatcctcgtcgccggagccacgtcgatcatactccaactcgttcaagctgtaggtgtcggtagcctcatcccagcgcagggccagtggcatcttcttcaggacccaatcggtgccgtaggcggcccgctctgcccagcggcggttagcggaatcccactcgaagtataccggggccttggtggagccggtggccatgacagcgccgtccatgaactgcacccccacaccaggggcgccaactcccggcagcaaggccggcaggtccgccgtagcattgaggctcataccacctgacgcgatgccgtagttgttgcccatatccgtggacacctcgaccacgatgtcgccgtcgccccggaaggcgatgtagccgtcctgcacgccccgctggttgagatagccggctaccgtagccgcagccgggtcagggtcaaccttcgggtacttcttcgtggagttgggcagggcgtactccggggcgccgaagaacttgccgtagagttgccaagcgatgtagcccacgctcgtttggaacggtgcctcagcgaggttggggttcgtgctggcgttgtccggtgtcacgtaggtggccgtgtgactgtaggtggtgcccgtggcgttgtccttgaccttgatggtcagggagaatgccttcgaatactggcctgccttgacgtacagccagccggccttgttggggtctacgcccttgatgtcggtgcggtcggcctcgggcttcacgctcaggttggcgatgaacaggtcatcggccaccgtggcggcccgtagctgcctgtaatcgttggccttgaggtagtcatgcaccaggggctgacccatcagcaggcgaccgtcccgctcgtcgaacaggtacagctcaccacggtgctgcgccaccagcatcgcaatgctgcggccaccgaggttcgtgtggtagaggaacggcctcggccagggctggtcggtatgcaggtgggccatcagctcgataccgctgcgccgccgaagtcctgacacgggatcggataccatgttgatctgctcgctgagctggcccggcaggcgctcgaagggcacctgctggctcacacccatcagcagattgggatacgcggattgcttgtagctcatgctcaggtcctcaagctgcgccgccaccggctgaagctacgcttggcctgggtgttcagcggacgtgatcgggtgtgcatgcgggacagttcgttctgatacgcctgcaattcctgggcgatgacctgggcggtctcgtccggtccaatctcgtgggtgtataccgcgagcgcagcctggtgcgcaatgacgcgctgtgcgatctccgggatacggtcccactcccgagacagcaccaatcggccctcgaccgacttaccgatgcggtcgtcgccggtgttggcatctcgcactcccaggccgtcccactggaggtccggggaatccgggtagaatgccaaggtgcccttgggcaggttgatgcggcccgtgggatcaggtgtcagcttgtgcttccaccaggtgttgaaccaccagccttgggtcagcaactggatgcgttgatcttccagctccgggagggcgatggccatggttggatacgtctcatccatgctcgggatcggcagctcgccgatcttgcgcaggatgacattcactgcgtcgagtagtagcatagggtttctcctaaagcgcaaaaacccacgcagggaatctgcgcgggtcgttaggctttgaagaaaccccacaccgaagtgcggggtttcgtggcatcacgcggtgatgtcgaaggcgccgatacccttcagttcgatggcaccagcggtgtccggacgacgggcaccgatgttgtacatctggaaggtatccaggacccacgagaatttctcgttgtcttcccacagcttggcctggaccggcgccacttgggcggtgatcagggtcttgctcgggaggaacagggcgatctggcgctcggactcctcggcgctcacgttgaagtgacggcccagcgggtgggctgcgattgccttggtggcgaagcgcggagtctccagcaccttgacgccgttgaggatggccacgcgggacttcacgtagtcgttggtcgcgccggttgcctggtactcgacgttcatcagcttgtcgtgctccagcagcaggctgaacacacgcggcgacatcggggtcaggccctcggagtagaccgcatcgcccaggtcgcggtcgatgaaggtctcgactacgcggcggtgcatgcggacgatcttgtcggcagcctgcttggcggtcaggccggtcaggtccagtttctccagcacgcccggcgagaacgcatcttccaggtccaccggcgcgtccatcgcggcagccttgatcacctggatcaggcaggcttggtcgaacttgcgagccagttcctggccgtccagctcggcgacttccttgcgcatgtcgaaggattgggtccactcgtcctggtggtcgaactggtggcggaggtacagcagggtgtcgacggtcaggttccacttgtcgttcacgactcggctgcgctccagctcttcaccggcgcggcggcccttggcctcgacgttacccaggcgatccaggcggaccacgttcgagccacgcaggtcgcggatgttcatcagcggtgcgaacttggaggtgtaggcgaagtgcttatcgacgatgccgaggtgctcttccaggtggatgtcaacgtccgcgttcttgccagcgtagttcggacgggtcaggtcgttcaaaaagctcatacgatgctctctcttttggatgtgggtttaaggccggagtagggcagggtcgttagataccctgcgccatgcctgccttacgacgctcgcgcagcgcagccatctcggcttcggatgcgttcagcggcagcttagatacttccaagcggtactgctcagcgctcagagctgccagtgcaggtgccgcagcacccaggggttggccggtagcctgtaccacggcacccgagccttgtgcgaaggccacaatttgcttcgctgcgtactgcatggcctgggcatcgcccgagtccatcagccgaccgatggcggccttggtggccgggtcagcgtgttggttgaagacgccggcagcctgcttcaggatggcctcaccgccgacggcggcataggtctggctcaggacggctttggtctgcgcatcaacataggtcaggacgcccttggccacgttgatgacgtgctgcgcctgggccgggccgagaacttccttcagatagtgctcgtcgatgaaccgaggatcgcggttctcggcggccttgccgaaggctcggacggtatccagtttgtcagagaacgcctccagatagctgatggagggcgccaactgcgggtcgccttcgaggttccctgccaaggtgcccacgatctccccgttgggagtgaaggccggcggcggcgggacttccaggttctcgggaagaactgcacccgcagccggcggagctaccggggccggctgagcgggtgcttgcggaacaacgggttgacccacggcaggtgccgctaccggctggtagtgcggcgtcatggcgctggtcggaacgggttgcggctgctgagtcgggatggccagttgctgcggcgcacctacctggccgggctggaccggagcctgcggctggatcaccgggttcggcatcacctgcacatgactcggtgtcggcgcggcggcgggcggtacgttggcaaccaggttagcgaggcccggcggcagttgctgttcgttcggttgggacatctatcagactcctgcgagtgcgttggtcatgtcggaagcgccttccagcaaggtctcttgcgcggcctgggcctgcgcggcctgctgacgctgctgctctgcctcggcctgtagctcgtcggcgctcttgtagaactgcgacgtgtctacgctgaaggctgcccaaatcgtgtccatcatcttcggtagcgagatgcggggatcgagctgagcaatcggggccaggccagcgatgacctgggaagcgttgagcatgctctgcacagcggcggagcgggacagggccgggaggcccgtctcgatagccggtttgtgctgcttggtgatcaagccttggagtagcgcatcatccacctcggagaggcagacgtaggccaggggcgactgaaggttctcggccaggagcgagtaagtaccgcccagtgtgttctctgcctcttccgcagtgatgcgtacttcctcggcagtgacgcgctcggcgtcgcgctggttggcaccatacatgaacgcctggttcaagcgaacgactacggcttgcaagctctgctggatagcagccatcttgttgtagtcgccacgctcgtaagcacggacggcttccgcgccacctggcacgtagtcacccatctcggcgtcttggtagtcatcgactaccgcacccttggcctcgtccacgaggttcaggacctccagcgactccagctcgtacaggccgagtttctcgctcagcagggacagcttggcgaagtcgccgatgtagtcctcgacgtggccgcgaccgtagtgctcgccaggggcgaggttccaggtcggcacgatgtacgggcacaggtggataggccagcggccctccttgcccacacgcacgccgtcgatctcgtggtacagctcggcgtattccatcgccgtgcccctcttgcgctgtacgtgggtgtacaggtccacgctacctgaaccggacaggttgcgtcctgcgcgcatcaggtcctgcttgtactcttcatccaggtccttggacttgtagcgctgctttaggacgatatccatccagcggccagtcgcatcccggcgcaccgcataggagcggagcgaccatgcgaccaccgtagcggcggcgctgtctcggtacagcagagcattgccagtcacgatcagtagcttgatcacctgcgtcaggaccgccagggaggcgttctggaacaggcgctgtgttgctttgcgatccacccgagccaaggcagcggtcacttcggtaatgtctgtgtcccggctgtcggcctcgcggcggatcgcatcagtgagttcggatcggaagaacggaatccccgtggggaacagcgatctcgccagcttggcggcgaggttgttcaccaggagggcaccggcggactggaagtcatgctctacgactccccggctgccggacatgggatcgaccatcaggtagggaagcgtggtcttggcgaactcgatggctcgactctccacgctcccatcccgaagtttctcccacagcatagctgcggtggttttcatggcgtacctcgtcagtagttgataccgagggtttgcgatacgcctgtgcccgcctgattccggcgccgtcgcgtgccggtgccagtggcatcggccatcgctcctaggtcaacctgcgccacgttctcggcggtgaggtcaacctgctggtttcgtgcgagctggtccgcctgctgttgcattaggcggttctgctcttccatcttgcgggcatcggattgtgcgccgctcaggtcggtgcccagcaggccatcagcgagtttgccgatgatggtcttgcccagcaccttctttactttcttgcccataaggcttggctctccggtagtggatcgtgtaccggctatcgctttcacgatggctccagcacacgagggggatttgaccccagccggcctgacggtggagttcgcggatgaactcccggaccacgcctgtattgcggtagcgcggtaggacgtactgccactgtgctgtgacgcacgggccgacgtggggatcgtcctcgaacacaatgcaggcaccgccggccaactggccatcgcggaataccaacagctcggttcgatcgttgccctcgatactgtccagcatcgcattcagggcgtcgtctttcgagcggaagagggtgaattcttccaactcctgtattgccagccagcacagcccctggagttccgagggagtgccggcctttgcgtggactcgccagatggacttgttcatcacttcaactccactgcgatggcatcgcgtcggcgcaggcgtactgctcgcaccacgtctcgcctaccggcctggaactggatgtcttccatcgtggttccaggaccgatctgatgttcggggaaggtctgctctaaccactcgatctgctgagaggtgaacgtgacaggacgggccgtacccttgcctgttctcgatccttccactgtgggtgacataaccataggtcggtgggtcttcatagtagccatctatcatatctcctatgctggttagtctattctatctagaatccttcgtagtcatctagtctcatcttctactctacctctactcttcttctaccctctggtcttccctgacctctttctccctgctcccctctacgagggccttggacggatgcacttgctcctatgtgggtgacataatcccctcagcagaagaacgcccaggagtcccgtacagcctccagattcaacgatcctctccggggcggggtagcctctatcccgagctgttttgccagttctacgagcacacaggggccgctgtacatggcgatgaactgctccctgatgtggacgtgcatccgatccacgtctgccgcataggtgcccatgctgtcgtggatggcctggatcgggataccctctgccgcacaggccagggccgtcaggcccaggtggctgctgtccagcccgtggacgaagttcggagcgatgccgttggcgttgcgtaccgggtccagctcgtccttggcctcgtacagggtgacgtactcgacagcctctgcccgcagcctcacccgcacctcctcggtcttcgggtacgactggaacacctgcatgccgagtggcgtgatccagtgcaaatccttggatgcatcaggaagggccttagcgagccgctggagccattccatggcgaagactgccgatggtactgtctcgcgtattgcgtccagtatgagcgttgccatgtagcttcccaggcggtatgacgggataccctcgggaatctccaggccggactcgtccaggtagtccaggcagtggtctaccacgcccttgaacgtggtgccgtataccagcgtcatgcagggcttcttcgtcaggcttcgggatagaccagccttatcccacaatacagcgtagccccgagcctcgccttcagcactttctctgtctcgtgccagagactctgcaacgagaccgagaactcgggagtagatgtcagctttggcaagtccaggtggcagcaggttgacgtaggctccgccgatctcgtctcggagaatggctgagtagtgctggaggccggagcaggttgcatccatgtggacgatgaacccacttcggtaagcctccggctggcctgatgcgtaggccgcccgcagctccagcagacctgcgatggcgcacaggggcgactcgtcttccgggaagagactcggatagttctccggaccttcgttgagtgctcgctggaagtcgtcccatcgctcatcgacccaggctgcccggtcgtcgaagtacaccttgtcacatccgagggagttggcgacgtggactttgagccagtacaggccgcgcttaccgagggcacgcttttcgtggaatcgcagacacgccttggcgatgtcggacccctggggattcggtgtgccccaatagtacatgcggccacgggagtcaacgtgcatcgggaagtacactgccttgccatgatgctctcgaacaactcggtagagtgcagcaaattcgcgaagcttggcggtatgctctcgctccccggtgtaccaccggtggacggagcgtttccaacggttgaaggcctccagctcttgctcactggcattctccttggcccactcgtcgccgagcgggaactcaggtttgtccgggtaggtgcgctgggggatgcccagcacgccgccaccggaggtgaagacgcgctcgatgatctcgtacacgtcgtggttgatctcgtaggccaccgattgcagcgcgttgaccgcctcgtacaccttgggcatcttgtcccggcccaggtggcgtagctgcatctggcgcgcccgcttggtctggtgcttggtacggcgcactagcacatggtgcttctgcgccttagcgctgtagtaaccgccatcgcaccagtcgttccacggtcgcggcggtgccagcatcacgctacggcctgggcctccccaggtcatcgccgccgaagggtcttgcaggaactccttggcttccggcgacggctccaggtggacgctcgtaccgccccgacctgtgaagcggttcggctcgaacaggccgcactgtatcagcggatcaccaatgaacttgccgaggcgcaggtagtcgccatccggcaggtcgatacgtgcctcttccggcagtaccgcgtccagaagagcgtccatcgtcttctggatgtgccggacgctgcgagtcctgctggtcttgaggtagtccagcgtccggtcgtaatagggttggttgaccttgaaggccaaccgcacttcgatctcgcgacagagcatcttacccatgtgggtgtaatacttcgtcgctgtgatcgttggatagttgatgagcatcgacagcccggcccgcagtgccatgactgcgaggtcctgggcgtcgatgatccgcagcaggtgccgcagctttgctgccggccccgccgccttcgcttcctggtgggcgaagatcgcttcggtcacgatggggagcatccgcatcaacatgatgcgcgccctcgggatgcggtcgatggacccttgggcaatcgccttttccaaggcaatgcgggcgtcattctgcgccgccccgaccagggcctcttcgtgggcgatctgctgctgtatcaggtccattccgtctcctatcgtctttcgattacgcgcccgatatcctcgggaccccactcggcctcggccaggctaaccgccccatccagcgtcatcgctcggtagtcacgccattccccgcagctcagaatctcagcgcggaaccagcgcagttccaccagcttcacttcccgctccaggcgctccgccatctcccggagaatgtccgggagtatgacatcgctccagtcctgatggctggccatcgccggcgtgatgtacgctgtgacgtagttgaccccgatgccccgctcgttgaaggcccagatgacccgaacaccttcatcggtctcgtgctgtcgggtacaccaacagattttactcattacctttctcccggtccatcagggcccgctcggcggcggccattgcgttgaatgcctcatgcaccaggtgcatcaggttggactcgtcatccagcggtccgtcgatcagccgcttggactcgtgccggtgttgggcggacttgaactcgcccaccgtcatcttcttccagtcgtgcggcagataccccttgacctcggcagcccattgcatcattcgagcaagctcccgcttcagcagcgggaacccctcgactaccaggtgcatgggaagcttaccgaccttgcgttcttccagactcgcacctttgcggtacggttcagtcgtgatcgtcgactcgtaagagtccgggaatgctaggctcatgctacctccttagttgctcagcagggctttgcgctgttccgaggtgttgcgggtgtaccgcccccggctccagccaccacagccgccgcagtgatagtgctcgtacttgccggtctgcgtatgcacccagccctcttgcttgacatccgtgtcgccgcacttcgggcagcggatggtcggctcggcgtcattgaagtacacggccacgttgggatggccgacgaaccacgggcgcatcagggtgtacagctcctccatcgatcgtacgtcgtcgatgttgtacaggcgcatctcctcccaggcttccgggttgtcctggaggcaggctgcccacaggtcgaatccggggaacttgccgtggaggcgcttcttgatggtgcatgccttgtgggtcatgtactccagcttgcggctggtgaacgcgaattgctgcttggcgatgatcaaggtgtcgatcaccttgaacggtctcggcggcggcatcttgttcaggaagaaccgggcgttgatcttgggcacgtcgaagcgcttgccgttctggacgatgatgatgtcggcctcgtccagcagcttatgcagggcgaccagcaggtgcatgtcgtccagggggtcaccctggcagtccatgtagatcacctcgtcgctgtgcatccacttcgcacagaacgacaggatggtccagtcccgcttgatctggttgaggcccacgttctgcttccagagcgaccagacccagccctcgataggcgaggtctcgatgtccaggctcagcaccttcggaccctggcctaccacgttgcccacggcgccagggaacttgcgcactacctcggcagccttgcggcccagccagtgcatcgcgcccttcttggcgtacatgccgcgcgtcctgctgtcgtggaagcccagcttgatgcaccagttgcggaagcactggcggctcacctcgccgaagcgcgaatgctcggtcaggtgctcggcacccttcttgaggcccagctcgacatagacgtttcgcaggtactcattggtgaattgcttgcggagtttgctcatacgttcctcgcgttgtgctttgcgacggccatcgccgccttgcgtttggcggctgcctgccggcgcttggccagcttcgcttcgtgtttctcctcgtcggtcttgtgcagggggtagatcagcggatgcttcggcccctccagatacgtcaggagggcacgaaggtaggggatgatgtcggaatacttcatcgacttgcatccccaggaacctgccgcattcgttatcttgccttctgcggtgttacaggaccggtgcaggacgccccgcaccagccccgtttcgtggtcgtggtccatcaccgcttcgcccttcacgctgatatcgatgggcttgccgcagagcgggcacagcttgttctgctcggcccatagcttcagggtgaaggtgcgctgttgactgcgcggtatctggtagaccttcggctcactcgtcataatcgctctccctccgcttctggagcagcgcctcgtggtaggcgtccagctcgatgatccactggcggaaggccggacgaaggtcgcggcttaacagatactgcgctgcgttgtcggtaggcgttcggcgcatccacagcacctcggcctctgccagcgggttttgcttgatcttggcgtacgcctccaggatcatgtcgatggcctcgtcctcatccgtgatcggatggaggatgtcgaaggccgtcttcataccgcagagcttaccgttgaatcgatcgatccctcggatgttgtcagcggtgtcgccgccgagccactgcgccaagaagaacttccgtccatggcccttgagcttgaactggccggaaggcgtgtacgcttccttgaggtagccgaatccgccctcgatcctgctcacacacgccgtatcgatctcccaatacgggtagatcgtcatccgcaggtctttgtcgtcggaccggatgatggccttgtcctgcatggcgtaggcgtccatcatcatgccgtcgtccgcctcgaagaacgtgtgcaggatgacatcgatcccctccggcgccccgcctcgctcatgcacgtccgccacggcccgccgcagtggctccagcagcgcgggctttgccttgcccttgcgctggccctggtacggtttcatggtcggatacgtgtcgcggtacgccttcgccccacctgctgccgtgaggtgaacccgtgtccctgtgcagtgcgctaggaactgctgctccaaaatgagcttccagaatcttcggagtgcagtgtccagggtcttagcagtggccgcagccacataggcgggtccgtcggcgtcacacaccaacgtcccgcctgccatgctgcggtcgaactgcgcggatagtcctgccaggaactcttccgatggcaggcgcattagacctgcggtactgccggcactaccgggaccgccgggacttcgaccgctgccggagccgccgtctgagccacctggggcacgtcaggcagcacgttctgtgcctcggcagtacctaccacaggggcggccacattcgccacctggggcacgctgggggccgtctgagccactgcctggggaacagccgggacagccggtgctgccgctacgccggcgtcggcggccacgttgggcactgccggcaggttgctgcctgcggcctgggtcgtcggcttgatgatcagatcatcgccgccgcccaacatgatgtgcagggccgagccggggaagttggtggccgagcgaatggtctcttgcaggaagttcttggacttgccgttgtccgaggtgccttcgatgaacagggcgtcccaggtctccttggtcggcgcgtcgaagaagaaatactgcaacaggtccatcggcagttccggcacgttatacgggctgccatcgaccgggttatagggcttcatgatgccgccccaatcgatgtcgttgcgttccttaccggcgttgttgcccttggtgatcttggtgcgcttgatcgggatgatgaacgcctggccgagcatctgagcgaagtgggtatgctgcccgctccagttcatcttgtcgaaggccagcttggtcttggacttttcgttgttgccgagggtcatctcgaaggtacggaacaggccgggcttgatcgagccgtcggcctcgtaggtgtggaacaggtcgtccgggcggctctgcgggttaccggcctgcgggttcacgtcgccccacaatgcgaagcccaggcggatttgaggcgccggattcttgagcttgccctggaattccttggcgtggtcacccagctcgatgtagatgcagaagcggcccatggcggtgcccgccgggaagatgcgaccgccgccaccgccggtggaggtttcggacatgtcgatggttgcggtctcggcagccttgttggccagggcgagggcggcttgcagagcgttgagttgttgagtcatgcgtggtctctctcgtgtcgaatgaagatttaaggccggagtaggctagggtcggcctagtcccggatcacgtccatgttgaacatgttgggtcccatctcggccaccgccgggaagggaacgtccgcgatgtcgtagcccaatcgctcgctcatgtagcgggcagcgtcggccatgatgtcgcgcacgccacggttgacctcggcggcggtgtccttgtggcagtcggtgtacacggcatcgtgtacgttgttgatcaggaactcggtgaccataaatcctgggcgatgcagcatccaacggaagatgcgccctacgctcacggtcatcatgaacccagcctcgccctggttccagtagttggcgatctgcgtgtccttgaagtccatgaccgtcttgcgctgttccttgtcccagcgctcctgttggcggaagctgtagcaggtgccaccaggcgcttgccagaatccccggcggtactggcgccagttgccatccggccccatctcgctgaaggcgcctgccggcatctggtcctcggccttgtacattacgaggctggtggcctctgcactgtcgcggacgatctgccggaatgcgatggactctgggaacagggccgcctcgttgtccaggaattcctgggcctcttccacggtacagccggtgttgaatgcgataccagccgcactcgcgccgtactgcgccgagaatgccttgggcttgatgttctttcgagcctgcatcatgcgaccgtgccacgggtggttggggtccttcttgatggccacgagctggtcgtagtcgaacccgttccagttgttgtgcttccctgccaggcggtacaagtgcatgtcagtgccggccatcagtttcgccaggaggttccgatccttcgacagggccgccaacatcaccacctccagggcggtatagtcggtctcgccgatcatcccgtccgcgccgaagcgagacacgaacatctccttcacgcggctgccggcttccgggtcgtcctcgtccttcgacgggagctgctggaggttcgggcggctggacgacagacgcgttgtcgccgtcgccgtcgtattcagcgaatggtggatgatgccgtcgtcgtccacgtactggagcatccccttcgtgtccttaatcgtcccatccttgttgtaggtgtgggtgatgtagaacgaggagttgtccttgtgcagctcggccaggcgcatcaacagcttggccgcctcgaagccctgtttctccagagccttgagggcgtcgccgctggtgctgaacacgggcgacccatccgccagggtgagggcgcactggaactccgggcgtttgcccaggaatttctcacgcactacttccggaaggttggtcaggttgatcaggccggggaaccggaatcgctggtcatcatcccacttggtcgccgggatgtccgtatcctcccggaacaccttgacgctgcccttgttcttgccagcggagaacgtgatgaccgggccgtgcttggtcgccagctcggtgatggtgggccagtgccactcaccctggtcggtcacttcatggatcgggacccgaactgaggtactctcgattggagtcccccgcttggccgtaccgaagcgcacgaagtcggctttctccatccggccatcttcgtatggcacccggcccttgtaccgcacctcgccaccgtagagccatgcgctcatatggtagaggctggtatacttgaactcgaagtattccgggaagtcgggcatcagcttcttcagctcggcctcgatcccggccacctcttccagttgcttggcgtggttcaccttggcgacttcgaggtccaccttcaggccggcacactccatcgccgagaaaccgatcagggcctcgcagcgctccaggtagccagcccacatgccacgggcctgaagcttcatcagctggccgtagaacacgagggcggtattctcgatgtcgccgcacgggccggacaggtactcgctcagcaggtcctggtccatctccgaggtgagcacaccctggtcccacagcatcttgatgccgtccaccttgtgggtgccgccgtacttcggagccagctcgtcgagtgccgggtacagccacgtctgatgactcagcagatactcggcttgctgggtacaccagacccggccaccgcgtcgcaagaaggccaggtactcgtcccggtagcgggtgaagaaccagttcgattcgaacatggcattgtgagctacgatcacgtccacgccgtcgaggttgaaccagcggttgttcgggtcttcggcttcggcccggctgcggaagcgatgttccaccttctggccgaccttgccgtcaacatcgtcccgccagccggccatgacgatgtagttgcgggggtcaaagggcgacgccttgcgccccttgtgctcgtagctctcggtttcgaggtcgaggattcggatagtcgtcatttgctgtaccagttgctttgactgtactgctgcgccttgaccagtagaccttccagcacacggcggggaatctcctgcatcaggtagcggaccattccttcacgtccccatatggtcagttggtacagggagaccgcgtggcagaatcccatacggcccagcttcgcatggtcgtagtcaattcgaatcgacagctcttccgcttgcgggtccatatgggccttggtgcggaggccggggaacagcaggtccaggggttcgtggatatccgccagcaagcagcggatcatgcgttcttcctcggtgggcattctcatactttgactcctacctgtcgcagattgcgacgcagacgtcgcatgacccggtgcaacttacggcgaccggcgccgagggattggatgtcccgcgcatgatgccgaacttcggacccaacgtggtcccaagtccctgccatgacgcagatgcggaatgttccgtcctggctgatgaacacggaacccatgacgtacttcggatacagcagcgaatcccggttggtggcgtggtataccatatcttccgggtagttgcggttatgggactttcgaatcttcataccttcactccagggttactggccaggtcgcggaagcgactgaagctgggatggcggagggtgttggctgagcgttccatcgcggagacctcggcgatgcgtccatagttcggcatggcctcgtcgatgcagccgttgaggtgggcgcaggtcaggagctggatgtgctcctcactcaggccggtggcgccaacggtgccggaaccatcttccagctccacacggtagcccacgacgcggcccacgttcttgccagtcttgcccatcacgtacccgacgatacgcccgtccacggtgatctccggcttgcgcttgtagcagccagcaaccttgccgttgcggtaggtcaggctcgggtctttctccatcgacccctcgaagcccatggcgcggtggtagccgtaccagcgtagtaccgcctccatagaacggcaggattgtgcggctacctggaagaagtacggggtgtcgccccgccggcaatcttccatgaggctgcggaccatggcgcggcgctcatcgtatatgaggtgggacttgcgcgatttgcggagcacgccgatatgggtggcgtcgaataccgcgaagtgcaggcacttcagctcggcctcggtcagcggggtcttgcgggccatgcgcccggtcgcctcactgaagggcatgccttccaggtacatctcacagtccaacaccagaccggagtccaggccgggctgggacagtttcgcgatgatgcgatcctccaggccgtccagggcagggaagcggcggccgctgcgggataccacgccgtgcgcacccacgatggcacggcacccgtcgatcttaggctcgacgatcacgtacccgtgcttcttgatgatggcctcgacggccttgtcgttctgatctacgccgcgccagatgcctttctcgatatccaataccacgtcgcgcttgctcatcacacgttctcccatccgtagtacgcggccttggcccgcatcttttcgcatcgctccggcagtcgcgagccggaaccaacttccttgttcacgccccaggtaacgtccttgtgcaggtacacacccagtcgcgggccgccctcggggtccggccagttgtacgcgatgcccacttggttgatggtgaagtcgaacgactccatcacccgaccgaggctgtcggcatcgtagtagttgaagtccacgtccatgccttccaggccacggcagcccaccagggatatcacgcccttgaagataccgccctcacctgcgtcggcgtactcggtactccagccaccgtcccggacgaagcgcgggtccagggtaggaagcacgctgttgatgagcacttcagcctgatactgcgtcatgccgtacagggcgatgtccacgtcctttggagtggcgccatgcatgaggtcgcgagggaacccaccggccagggcgacgccctcgttgggccgtgcatcagagtacaggcgcagcaacagggccttgaccccggtcggcagtgcaatggaacccagtggaatttctttggtgccttcgagcacccggctatgcttagcttgcatggtctacactctcaaagaaacgacaccgtgcggcgtcgaagttaatcatagcctccacgttcgaaggcttcccgtccatctggaacttgttcttcggcagggacaggccgcgcatgacctgttgatccgcaccgttgagacggcccaggtggatttgcacgtccacagcaccctgtaccgccgtcttcgaatccttgaggcaggactgcggtgggaacaactggtcgtgaccgtcgttgctgatctgccacgtcatgaagctgatgaagtcgtgacgcaccgccatctcgcggacctcggccaccttgtactccatctcgtcggtgcggttctggtccttgcgctggccacctttgacgtgggccatcatgtcccaaaacaccaccgccggcttcatcgcgtcaatgacctgctcggcctgggccagggacccaccgtggaagtccttgatgcggatcagctcagagtcgccgccgattttctcggcgtacatcctgcgaacctcctccgggtccagggcaagaatctcgcccacggtcatgcccagggctgccgagtacaggcgcggcttgatccgccggcccttgccctcgttgttcagccacaggatgggccgcccagggtcgaagtaccgcttgagctgcggcgcgatatggacagcgatccaggccatgaacgaggtcttgcccgcatcaggcggcgctgccaccagcaccgaggccccggcgtggaggcccttcatgtacgccggaagcaccagccccggcagcttgatgccgtggtcaccctgctcctccgccaggatatcaaacacgtcgtccgtcacatagtcggtcggcgtactgaccccctcgcggcgcagggcctcgtcgctcagccggcgcagctcatacgccaggtcgatgtcttcgccctggttgtactgcgccaggagggcatccaccctgcctgaaaaatccagttcgttgagctgggacacaacgccctgtagcgagtccgggtctaccggcttgtccagttggttgacgaggttcaggaccaccgccagttgctccggctggtagccacctcgcagctttatcagttcgcgtagcgcctgcgggtctaccttctgatgcgctgggtagaccttccagtattgctcgatccagtcgatgacaaagcacgtctccggccccatcatcccttcaggcaccacactccgcaacgtgcggaagcggtccttgtcactcagtgcgtgtagcgtcaatacgtccaattactaggctccttatctgctcgcgggtcaggtccttgggatcgaacccgtccggcgtgggtattacttggccttcgataagcagggaccggagccggcgcatcacgcctgcactaccacggacacctgccgggtcgccatccaagaagatgaaggcgcgcttgcaggtctgctgcaacatgatcgccgccagcctgtcgcgcagccttgtaccgttcagaccgacagcaaagacttcgggacaggcccaccgcaccttcagcgccgacaagtagtcttccgtcagcacccatggcctgcccattgataattcctggggccatccatggtaatccggggcaggatacccgtagcccacccacttgggattttggtcggcagtagcgcgcccaatccagcccgcgttggtagggaagataagccgatgctgcctttcgctgtacagcagcggcagccctggcgtcatcacgttgtagtcgatacccttggacagcagcaaaccataaagcgattgatagcagtcggcttgcgtccagtccgaggcatcctcgggccagggcatgaagcgttcttgatccgcgcattgtaccctccgcacatgcgttttctcgaccacaccaccctcctgacaggagtagcagtaagccacccagcggtcaggcaggttcttgcaggtcatgttggtcccgccccggctcatgctcttgcatcccaggacgtgtcggaaccggcctacctgcccaaccgccagggattgcgcttgctttagccaggagtcgcggcgcagtgccattggtaccattcctcccacaaaggccgcagcccacctcgggcctcgaacatgtcctggaggtgccaggtcatgcgggcgccgtaggcgggccgccgttgttctgtgtgagcagcacgcccagggccaccagactgaaggcgactccgatgaccagcggtttgttctcgataagccatgtcatcacctcatacgtcatggccgggtgccctcatgtgcaacacgtccggctctcctgctgtccagttcgcctcgcggtgggtggtgctccagcccaagtcggcgtagaacggctccaggaactcgaagcaggtcagatactcggcacccgccagctcggcggcccgcaccagctcagcgccgataccctgcctgctgtgtcggtcatcaacgcacagggccttcagttcaccgcccactacgaggcaggaacctaccatcagacctgacaggtcgaaggcaccgagggccagcacgcctcccttcttgcgccagatgtcgctatcttgccagccactccggcggaggtggagcacacactcggcgatactcgcactcagctccccggctggactcaggctttcccggagcgggtggtacttccgctgccagaggaaccactgccaccagttctcggcgttgctcggggcttggatgctgaatacgtggatcgtcctgatttgaatcaggccgggatgcaggctcagcggatacaggctcgtcttgctcatcttcgatctccctcaacttgcgctggccgaagtcaatcaggtcctgcgccatgtaatgcacaaggctgccggcacacgccgccaccttgtcccaggttgcccgcttaccgtcgatgcacgggaagacagcctcgtcctccagctcgacgccgaagcggtatccgttgtaatgcgtgaaatggtattgcatgttcgtgatcctccagactcacacgagagggcgctctaggaacgccctcggatttgaccccggagtaggccctggtcgcttagacgagcaggtacgtcagcacgctacccacgacgccgccggcgatggtggctgcgaaggttgctgcctgccaggtgtccttagccgccgccttcgcccgctcacgggcctcggcctcagccttcgccacggaagcgcggaaggtataccgcacgccggtcagcttgctgatgagctgacagacggccttggtcggggccaccgtcagcaatcgctgagtctccgcgccgtcccaatacaggccggcccgttgacctacctccaccagccgggtcaaaccctgcttgaggccgaacagttcagcgcccatctcgttattccggtccgcaagcttccgtacccggctgcgcagcggtccgtccatttctattccggcatcgcgcagggcacggtttaccgccagcttggttacgtgcagatcgtgtagacgtacctcgaagtccttggcggacagcgggccggccttcttcgataccagcgggaataccttgagcagcagtttttcgtactcatcggcgcgcttcgcgtcggcctggcacaagctggccgctacccgcgcctctagatcggcatagccacaggtgctgacgcgctccacgttatccaggcgcacctccaccttaccaccgtcacaggtgacgccgctcacacgggcggtgtaagtcccgcccgaagcctgtttcttgggcgtataggcgtgggcgaatgcccggctcttggccacccggcgcatctccggggataccttggcacacggcacgccgaacatgctggccgccagcttggtgaagtgatcgttgcattccattgtcagactcctgccagtttcagggttacggccagacctgcggtcagcaggcatacccaggccatgatggttgccttgcgagcgcggcgctcttgtgcctcgtgggcatcgtgcgctgcgttcaagtcgttctggagcagacggatcgtcgcctgatggctgcgaatctcgtcgatctcccagcggcgcgcccgctcggcggcctggaggcggcggctcagggtgtcgatatcctgggcgcgctcctcgcatacagccagggcggattccaggcgatcttccagggcctggatggcgggtgccttctgtacgctcacgctgcgtaccgggccgctgatgtgctcggggttgtgcttgctcacgttgactcctcctatggtatggctagctcgcaataggcccggcagggccaggcctattacgtgcgggccttactcgccttgggcgatggcttcgtccagggtctcggcggacgctgccggggcctgcactgcgcggatggcaccggccttcacgtccagcagcttggccggggcgctgtcgctgaagcgcaccagtacctgatagacgccggcgactacgctgatgacttcgccgctcagcacttcggctttctcgcccttgccgtggtcgaaggtgatcacgtcgccggcaacgaggctggacaggcgctcggcggtttgcagggcgacgaccgcttcgttgtagacctcggtcagcttggtcagggcgttgtggtggaagacgacgttgttgcggaagtcttcgacggtggccggcttcttgatgagcttggcgcccaggacggttgcgacggtggtttcggtggtggtgttggtcatgatgtagctcctagaggttggttggttcgcggcaaggaatggccacggtggaaggctggcgcaccagccttcgccttggtcactcggcggtgagtgtcacctgggtccccttgtcggcgagggccatgcgccacccgtcgttgcgcagcacggtgggacgcggaccggtcaccttggcagggccgtcgtcatggataaccacgggcagcactgcgggacggcccgtgctgtcccaagctgctacgccgatcaccagtgtgccgcgcttagcctcgggctgcactacccgatacatctcaccggaacgcaattccgtgaggtcgaagagacggcgttgctcgcggtcggtgttgtgggtatgggtgcggatcatgttacctccggtaggttatttgatgttcaggtgacgcttcagcccggtcagcaggccccggcctactgcacgtagtgccaggaatgtgcccacgatgattatgagtggccagaagcacccgatcacgcatgcgtcctggaactgcacttccgtcgggttctcgaacggcggcgacactgcgatgcagtagcaggcgcctgctagtatgccgaggcaacagtacaagccgagtacaagcagcgcggcgatcattggccggcctccccttgaacaagtttgatgtactcacccgcacccaggcggcggcaccgccagtctgtgttgagaatggccgtacccaccgcgtactgcgcggggttcatgctgtgcagtacgatgactgcctgagcgagggcgggcgtctgcttggtcgccagcacaacggcgccctctgccacgctaggcgtcaccaccttgtagagttcacctggtgacaggcgtcctacggacaagactggcggcgccgggtcttcaggcttgacatatatggtcttgacggtcattactcgccctccttcacgaggtcagtgcgatgcacctcttgtacttcacaggccgggtagatagcgaccgcgccgccgaggaaccagagttcgacgaaggcgtggccggcgacgatgctgtcggctaccacctggcgagtagttccgtccttgagacggacgacgtaggtaggattcatatgcgcttgctccagttcacgatgaggaaccggctcccaagcaaggccgatcggcgatgcttgcgaagccagcgtttggccgccttgcgtgagtagaatcgcaatggacgcacaggtcgcttgcgactccacacgaaggcacagcctcctgatgggctgacggctatgatgagccacttcatttacgggtcggtagctgtctgatgaaccgcacgttacgggcctcggcctcgataaggcgcaaggtacgctcgcagcgtacgtggtagatcgtcatacagcgggacggtcgggttatggcttcaatgatgcccttggtgcctgccgcgtcggcacccaggtagcggtcgctgtagttcaccagccccacgcggtggccgatacggtagggatcacgcgaggacatggtacgaggttcctgcaatgtcgaagatcgggcgcccgttcgcgcagcccttgcggtattcagcgttgatccagccatacgcctggcaggtgacgtgcccggacagcgggctaccctgtaccagcagcacgtcgaatccttcagagtccaggtcccggctcaggcgatacgcttcgtcatagcggttcacagttacgccggcgcccactaccacgaacccgcctggggtcaggacgtgcgcggtattcaggtcacccatacggaagccatgggcgcacagcgccttgtcggctgcgttgaatgcgttcgacgggtccttggggattgcgatcaacagagtattcaaagcttgcatggtttagttctcgcttgtgatgagtccagcaatggccccggagtaggcgagggtcgcccgccagggccatgacttgagtcaccgcttcaggaggtggatgaagagtaccgtcaggccgctgaaccacaacatgcgcagttcatcctcgccgaggttgaggccgagttcgaggaagggaagggcgatccagaagtccatggtcactcccccttcgcctggacggcctgctcgccgtacgggaactgagccgggcggctgtactgtgccagggcgatttggcgttgcagacgttgcttgaagctcatcgtgtttctccagttgtcattgattccagcggaacgcccgcttagcaggcgttcgacttgagtcaatgggcagcagcgcgcttgctctgctcagcgataggtgcagcctt

SEQ ID NO: 9 - DNA, 42566 bp, unidentified
  source 1..42566: mol_type = genomic DNA
ccgcctcgaagccctgtttctccagagccttgagggcgtcgccgctggtgctgaacacgggcgacccatccgccagggtgagggcgcactggaactccgggcgtttgcccaggaatttctcacgcactacttccggaaggttggtcaggttgatcaggccggggaaccggaatcgctggtcatcatcccacttggtcgccgggatgtccgtatcctcccggaacaccttgacgctgcccttgttcttgccagcggagaacgtgatgaccgggccgtgcttggtcgccagctcggtgatggtgggccagtgccactcaccctggtcggtcacttcatggatcgggacccgaactgaggtactctcgattggagtcccccgcttggccgtaccgaagcgcacgaagtcggctttctccatccggccatcttcgtatggcacccggcccttgtaccgcacctcgccaccgtagagccatgcgctcatatggtagaggctggtatacttgaactcgaagtattccgggaagtcgggcatcagcttcttcagctcggcctcgatcccggccacctcttccagttgcttggcgtggttcaccttggcgacttcgaggtccaccttcaggccggcacactccatcgccgagaaaccgatcagggcctcgcagcgctccaggtagccagcccacatgccacgggcctgaagcttcatcagctggccgtagaacacgagggcggtattctcgatgtcgccgcacgggccggacaggtactcgctcagcaggtcctggtccatctccgaggtgagcacaccctggtcccacagcatcttgatgccgtccaccttgtgggtgccgccgtacttcggagccagctcgtcgagtgccgggtacagccacgtctgatgactcagcagatactcggcttgctgggtacaccagacccggccaccgcgtcgcaagaaggccaggtactcgtcccggtagcgggtgaagaaccagttcgattcgaacatggcattgtgagctacgatcacgtccacgccgtcgaggttgaaccagcggttgttcgggtcttcggcttcggcccggctgcggaagcgatgttccaccttctggccgaccttgccgtcaacatcgtcccgccagccggccatgacgatgtagttgcgggggtcaaagggcgacgccttgcgccccttgtgctcgtagctctcggtttcgaggtcgaggattcggatagtcgtcatttgctgtaccagttgctttgactgtactgctgcgccttgaccagtagaccttccagcacacggcggggaatctcctgcatcaggtagcggaccattccttcacgtccccatatggtcagttggtacagggagaccgcgtggcagaatcccatacggcccagcttcgcatggtcgtagtcaattcgaatcgacagctcttccgcttgcgggtccatatgggccttggtgcggaggccggggaacagcaggtccaggggttcgtggatatccgccagcaagcagcggatcatgcgttcttcctcggtgggcattctcatactttgactcctacctgtcgcagattgcgacgcagacgtcgcatgacccggtgcaacttacggcgaccggcgccgagggattggatgtcccgcgcatgatgccgaacttcggacccaacgtggtcccaagtccctgccatgacgcagatgcggaatgttccgtcctggctgatgaacacggaacccatgacgtacttcggatacagcagcgaatcccggttggtggcgtggtataccatatcttccgggtagttgcggttatgggactttcgaatcttcataccttcactccagggttactggccaggtcgcggaagcgactgaagctgggatggcggagggtgttggctgagcgttccatcgcggagacctcggcgatgcgtccatagttcggcatggcctcgtcgatgcagccgttgaggtgggcgcaggtcaggagctggatgtgctcctcactcaggccggtggcgccaacggtgccggaaccatcttccagctccacacggtagcccacgacgcggcccacgttcttgccagtcttgcccatcacgtacccgacgatacgcccgtccacggtgatctccggcttgcgcttgtagcagccagcaaccttgccgttgcggtaggtcaggctcgggtctttctccatcgacccctcgaagcccatggcgcggtggtagccgtaccagcgtagtaccgcctccatagaacggcaggattgtgcggctacctggaagaagtacggggtgtcgccccgccggcaatcttccatgaggctgcggaccatggcgcggcgctcatcgtatatgaggtgggacttgcgcgatttgcggagcacgccgatatgggtggcgtcgaataccgcgaagtgcaggcacttcagctcggcctcggtcagcggggtcttgcgggccatgcgcccggtcgcctcactgaagggcatgccttccaggtacatctcacagtccaacaccagaccggagtccaggccgggctgggacagtttcgcgatgatgcgatcctccaggccgtccagggcagggaagcggcggccgctgcgggataccacgccgtgcgcacccacgatggcacggcacccgtcgatcttaggctcgacgatcacgtacccgtgcttcttgatgatggcctcgacggccttgtcgttctgatctacgccgcgccagatgcctttctcgatatccaataccacgtcgcgcttgctcatcacacgttctcccatccgtagtacgcggccttggcccgcatcttttcgcatcgctccggcagtcgcgagccggaaccaacttccttgttcacgccccaggtaacgtccttgtgcaggtacacacccagtcgcgggccgccctcggggtccggccagttgtacgcgatgcccacttggttgatggtgaagtcgaacgactccatcacccgaccgaggctgtcggcatcgtagtagttgaagtccacgtccatgccttccaggccacggcagcccaccagggatatcacgcccttgaagataccgccctcacctgcgtcggcgtactcggtactccagccaccgtcccggacgaagcgcgggtccagggtaggaagcacgctgttgatgagcacttcagcctgatactgcgtcatgccgtacagggcgatgtccacgtcctttggagtggcgccatgcatgaggtcgcgagggaacccaccggccagggcgacgccctcgttgggccgtgcatcagagtacaggcgcagcaacagggccttgaccccggtcggcagtgcaatggaacccagtggaatttctttggtgccttcgagcacccggctatgcttagcttgcatggtctacactctcaaagaaacgacaccgtgcggcgtcgaagttaatcatagcctccacgttcgaaggcttcccgtccatctggaacttgttcttcggcagggacaggccgcgcatgacctgttgatccgcaccgttgagacggcccaggtggatttgcacgtccacagcaccctgtaccgccgtcttcgaatccttgaggcaggactgcggtgggaacaactggtcgtgaccgtcgttgctgatctgccacgtcatgaagctgatgaagtcgtgacgcaccgccatctcgcggacctcggccaccttgtactccatctcgtcggtgcggttctggtccttgcgctggccacctttgacgtgggccatcatgtcccaaaacaccaccgccggcttcatcgcgtcaatgacctgctcggcctgggccagggacccaccgtggaagtccttgatgcggatcagctcagagtcgccgccgattttctcggcgtacatcctgcgaacctcctccgggtccagggcaagaatctcgcccacggtcatgcccagggctgccgagtacaggcgcggcttgatccgccggcccttgccctcgttgttcagccacaggatgggccgcccagggtcgaagtaccgcttgagctgcggcgcgatatggacagcgatccaggccatgaacgaggtcttgcccgcatcaggcggcgctgccaccagcaccgaggccccggcgtggaggcccttcatgtacgccggaagcaccagccccggcagcttgatgccgtggtcaccctgctcctccgccaggatatcaaacacgtcgtccgtcacatagtcggtcggcgtactgaccccctcgcggcgcagggcctcgtcgctcagccggcgcagctcatacgccaggtcgatgtcttcgccctggttgtactgcgccaggagggcatccaccctgcctgaaaaatccagttcgttgagctgggacacaacgccctgtagcgagtccgggtctaccggcttgtccagttggttgacgaggttcaggaccaccgccagttgctccggctggtagccacctcgcagctttatcagttcgcgtagcgcctgcgggtctaccttctgatgcgctgggtagaccttccagtattgctcgatccagtcgatgacaaagcacgtctccggccccatcatcccttcaggcaccacactccgcaacgtgcggaagcggtccttgtcactcagtgcgtgtagcgtcaatacgtccaattactaggctccttatctgctcgcgggtcaggtccttgggatcgaacccgtccggcgtgggtattacttggccttcgataagcagggaccggagccggcgcatcacgcctgcactaccacggacacctgccgggtcgccatccaagaagatgaaggcgcgcttgcaggtctgctgcaacatgatcgccgccagcctgtcgcgcagccttgtaccgttcagaccgacagcaaagacttcgggacaggcccaccgcaccttcagcgccgacaagtagtcttccgtcagcacccatggcctgcccattgataattcctggggccatccatggtaatccggggcaggatacccgtagcccacccacttgggattttggtcggcagtagcgcgcccaatccagcccgcgttggtagggaagataagccgatgctgcctttcgctgtacagcagcggcagccctggcgtcatcacgttgtagtcgatacccttggacagcagcaaaccataaagcgattgatagcagtcggcttgcgtccagtccgaggcatcctcgggccagggcatgaagcgttcttgatccgcgcattgtaccctccgcacatgcgttttctcgaccacaccaccctcctgacaggagtagcagtaagccacccagcggtcaggcaggttcttgcaggtcatgttggtcccgccccggctcatgctcttgcatcccaggacgtgtcggaaccggcctacctgcccaaccgccagggattgcgcttgctttagccaggagtcgcggcgcagtgccattggtaccattcctcccacaaaggccgcagcccacctcgggcctcgaacatgtcctggaggtgccaggtcatgcgggcgccgtaggcgggccgccgttgttctgtgtgagcagcacgcccagggccaccagactgaaggcgactccgatgaccagcggtttgttctcgataagccatgtcatcacctcatacgtcatggccgggtgccctcatgtgcaacacgtccggctctcctgctgtccagttcgcctcgcggtgggtggtgctccagcccaagtcggcgtagaacggctccaggaactcgaagcaggtcagatactcggcacccgccagctcggcggcccgcaccagctcagcgccgataccctgcctgctgtgtcggtcatcaacgcacagggccttcagttcaccgcccactacgaggcaggaacctaccatcagacctgacaggtcgaaggcaccgagggccagcacgcctcccttcttgcgccagatgtcgctatcttgccagccactccggcggaggtggagcacacactcggcgatactcgcactcagctccccggctggactcaggctttcccggagcgggtggtacttccgctgccagaggaaccactgccaccagttctcggcgttgctcggggcttggatgctgaatacgtggatcgtcctgatttgaatcaggccgggatgcaggctcagcggatacaggctcgtcttgctcatcttcgatctccctcaacttgcgctggccgaagtcaatcaggtcctgcgccatgtaatgcacaaggctgccggcacacgccgccaccttgtcccaggttgcccgcttaccgtcgatgcacgggaagacagcctcgtcctccagctcgacgccgaagcggtatccgttgtaatgcgtgaaatggtattgcatgttcgtgatcctccagactcacacgagagggcgctctaggaacgccctcggatttgaccccggagtaggccctggtcgcttagacgagcaggtacgtcagcacgctacccacgacgccgccggcgatggtggctgcgaaggttgctgcctgccaggtgtccttagccgccgccttcgcccgctcacgggcctcggcctcagccttcgccacggaagcgcggaaggtataccgcacgccggtcagcttgctgatgagctgacagacggccttggtcggggccaccgtcagcaatcgctgagtctccgcgccgtcccaatacaggccggcccgttgacctacctccaccagccgggtcaaaccctgcttgaggccgaacagttcagcgcccatctcgttattccggtccgcaagcttccgtacccggctgcgcagcggtccgtccatttctattccggcatcgcgcagggcacggtttaccgccagcttggttacgtgcagatcgtgtagacgtacctcgaagtccttggcggacagcgggccggccttcttcgataccagcgggaataccttgagcagcagtttttcgtactcatcggcgcgcttcgcgtcggcctggcacaagctggccgctacccgcgcctctagatcggcatagccacaggtgctgacgcgctccacgttatccaggcgcacctccaccttaccaccgtcacaggtgacgccgctcacacgggcggtgtaagtcccgcccgaagcctgtttcttgggcgtataggcgtgggcgaatgcccggctcttggccacccggcgcatctccggggataccttggcacacggcacgccgaacatgctggccgccagcttggtgaagtgatcgttgcattccattgtcagactcctgccagtttcagggttacggccagacctgcggtcagcaggcatacccaggccatgatggttgccttgcgagcgcggcgctcttgtgcctcgtgggcatcgtgcgctgcgttcaagtcgttctggagcagacggatcgtcgcctgatggctgcgaatctcgtcgatctcccagcggcgcgcccgctcggcggcctggaggcggcggctcagggtgtcgatatcctgggcgcgctcctcgcatacagccagggcggattccaggcgatcttccagggcctggatggcgggtgccttctgtacgctcacgctgcgtaccgggccgctgatgtgctcggggttgtgcttgctcacgttgactcctcctatggtatggctagctcgcaataggcccggcagggccaggcctattacgtgcgggccttactcgccttgggcgatggcttcgtccagggtctcggcggacgctgccggggcctgcactgcgcggatggcaccggccttcacgtccagcagcttggccggggcgctgtcgctgaagcgcaccagtacctgatagacgccggcgactacgctgatgacttcgccgctcagcacttcggctttctcgcccttgccgtggtcgaaggtgatcacgtcgccggcaacgaggctggacaggcgctcggcggtttgcagggcgacgaccgcttcgttgtagacctcggtcagcttggtcagggcgttgtggtggaagacgacgttgttgcggaagtcttcgacggtggccggcttcttgatgagcttggcgcccaggacggttgcgacggtggtttcggtggtggtgttggtcatgatgtagctcctagaggttggttggttcgcggcaaggaatggccacggtggaaggctggcgcaccagccttcgccttggtcactcggcggtgagtgtcacctgggtccccttgtcggcgagggccatgcgccacccgtcgttgcgcagcacggtgggacgcggaccggtcaccttggcagggccgtcgtcatggataaccacgggcagcactgcgggacggcccgtgctgtcccaagctgctacgccgatcaccagtgtgccgcgcttagcctcgggctgcactacccgatacatctcaccggaacgcaattccgtgaggtcgaagagacggcgttgctcgcggtcggtgttgtgggtatgggtgcggatcatgttacctccggtaggttatttgatgttcaggtgacgcttcagcccggtcagcaggccccggcctactgcacgtagtgccaggaatgtgcccacgatgattatgagtggccagaagcacccgatcacgcatgcgtcctggaactgcacttccgtcgggttctcgaacggcggcgacactgcgatgcagtagcaggcgcctgctagtatgccgaggcaacagtacaagccgagtacaagcagcgcggcgatcattggccggcctccccttgaacaagtttgatgtactcacccgcacccaggcggcggcaccgccagtctgtgttgagaatggccgtacccaccgcgtactgcgcggggttcatgctgtgcagtacgatgactgcctgagcgagggcgggcgtctgcttggtcgccagcacaacggcgccctctgccacgctaggcgtcaccaccttgtagagttcacctggtgacaggcgtcctacggacaagactggcggcgccgggtcttcaggcttgacatatatggtcttgacggtcattactcgccctccttcacgaggtcagtgcgatgcacctcttgtacttcacaggccgggtagatagcgaccgcgccgccgaggaaccagagttcgacgaaggcgtggccggcgacgatgctgtcggctaccacctggcgagtagttccgtccttgagacggacgacgtaggtaggattcatatgcgcttgctccagttcacgatgaggaaccggctcccaagcaaggccgatcggcgatgcttgcgaagccagcgtttggccgccttgcgtgagtagaatcgcaatggacgcacaggtcgcttgcgactccacacgaaggcacagcctcctgatgggctgacggctatgatgagccacttcatttacgggtcggtagctgtctgatgaaccgcacgttacgggcctcggcctcgataaggcgcaaggtacgctcgcagcgtacgtggtagatcgtcatacagcgggacggtcgggttatggcttcaatgatgcccttggtgcctgccgcgtcggcacccaggtagcggtcgctgtagttcaccagccccacgcggtggccgatacggtagggatcacgcgaggacatggtacgaggttcctgcaatgtcgaagatcgggcgcccgttcgcgcagcccttgcggtattcagcgttgatccagccatacgcctggcaggtgacgtgcccggacagcgggctaccctgtaccagcagcacgtcgaatccttcagagtccaggtcccggctcaggcgatacgcttcgtcatagcggttcacagttacgccggcgcccactaccacgaacccgcctggggtcaggacgtgcgcggtattcaggtcacccatacggaagccatgggcgcacagcgccttgtcggctgcgttgaatgcgttcgacgggtccttggggattgcgatcaacagagtattcaaagcttgcatggtttagttctcgcttgtgatgagtccagcaatggccccggagtaggcgagggtcgcccgccagggccatgacttgagtcaccgcttcaggaggtggatgaagagtaccgtcaggccgctgaaccacaacatgcgcagttcatcctcgccgaggttgaggccgagttcgaggaagggaagggcgatccagaagtccatggtcactcccccttcgcctggacggcctgctcgccgtacgggaactgagccgggcggctgtactgtgccagggcgatttggcgttgcagacgttgcttgaagctcatcgtgtttctccagttgtcattgattccagcggaacgcccgcttagcaggcgttcgacttgagtcaatgggcagcagcgcgcttgctctgctcagcgataggtgcagccttggcggccagcgcttccaggtcacccagcagttccatgccgacgatcaccttgcccttggtctgagcctggagcacctgctttttgatcgtggccagggcagcagccaggttgaactcctggtccagcgctttctcaggcttgaagctgtaccacgggctgttggtggcgccgacgagatcggtcttgccgaacttgttgtacaggaagggtaggtccttgttcgatttcttgtcagtgttaacctgtaccttgccgtgcagcaccaaccactcgaccagcgcattgcggcggctgcccttcggcatggcttcatacagcgccttgactacggtcacgtcgccgcactggtcgatgtggtggatgatcgacaggccggtcagttggatggcttcgtccagttccttgccacggacacggatggcgtcgatagcgcggttgatctcttcggtgccacggaatgcgattacggttttggagattgcgttggtcatggtatgtacctcagatggatttgttcaggtaagcagcggcggccaggtagccagcactgcggggagtggtcagggtatcgacgcggggctgcttagcttgcgcctgctcagccttgcggaagatcgggcagtcggcgcctttcggcatcctgtgcgctagatcaatccggcgtgccttgtcgcggcgagccttggcggccttgcgttgacgcggcgtcagttcattcacacgtggcattacaaacccttcccttgcgacttcttagcgttccacccctttaggatgttccgcgccttgccttcgctacccttcacgaaagccttctgttcagggttgtggtagcgtcctggcgctggctccgggtcggtagcgtagcgcacgtcacgcatcttgcgaagctctttgcgcccttcgacgttatcctgtgcgatgagcttagtacgtttggcttcccagtcccgccagtacgctacctgagcagcaaagggtgacttgggagccttagccttgaagtgtgccatcggcaatcctcactaggtctgtctcttgaatcccctcggtggaagggcctcaagggacaaaccttggcattggcatagtccctgtagtatcagcggttctggcttgtcctgcgcatactcttcgggatcgtcttcactcatcccccgtaccctttgcgctatctgcctggccttgttcaatcggcccgccgatactacccagcatactgtcagtcgcgattaaccgggtattctagtcccgatcccactgacactctattcgttcccaccggacctaccataggccctttgcttaaccgtggacggggaggcttcccgctcagactcttttgggtgagtcttcagcacccgacaggtattccctggaaccctgcctaaccagttgcagcttcggtcaacctaccgcaccagtccatgtaccgctggtgaagcttcgaacctctaccgccagatggctcagccatcctttcgtcttgccgcgcatgttagagacttgcgcttgtcttgtcaatcctctgtcggggattagttcgtccagttctccggcataggcccttttgctgaggggccatcaggtggtgcgaactgtaccgcgtgtcctgcaccgtgtcaatccctgcgatgatgcctgccggccttacacatcgttggtcatgccctaagagtttgccgtgtcccttgcgcctatggcttgtgccgcgcttggaaggttgcaatctcccgtcgttctggctgcgcatcctaccgatgtcctggcagggtgtcaacccctgtctccaggctgcctgtagaggcgttgttgcgtgaagacagggcgaactctacagacctgccgcccacgtgtcaatacccgcgccagggcgctccctggagccttcccacgcgtatagagacccacgcgtgcgaggcttagtctggctagccaggattatcgttcccaggtaacgcaaatccaccacccagggagcagccacccagccagggccaccaccctgaaacccgcgtggcactaaggctgcggttatgtcacacacaatggacaaataggcgtccatcagcgccagcggcgcgaccgaggcaggccgagggagtggcgagggtaagacagcaggaccagcggtagcgccagggagacagacccagggagcaggactagacaagccaggtagaggcgagtagagtacgcggcctagagggaacaacccaggtaggaccagggaagctccagggcagaggcagccaggcagagggcaagggcacagcccaagcacaagaggcaaggccagccactcccgcaaccaccaccagaccagagggcagaggccccaggaggaacgagatgctgagcagacaggacagagccgagcgagcctggcaccagcacgacgcagcatggcagcggaagctagccaggtgggcagcagaggatgagcagcacagcccgtacccagcggccagggccagggccaaggatgaccggaggctagcgctggtggcgcaccgcagggcgctgagtatgagccgatggaccgccaccccgccaggggcttgacactcccggcaggatgcgtagaatgggcggcgaagggcagggaagcccaccgccacccggcgaagccggaagctcccagggatgacccaggcaccacccaggcaatgcgaggggatggcccaccagacggagggcctacgggggaagggtgggctgatcagagtcgggagggttctcacacgacgatatcaaaattggacccggagtaactactcccagcccaggccagccaatccagccagccttccagccgacctcaataaaattccagtagttccagtggagcacccgactatgcaggtgctcggcttgagctactcgatcacttgtagaccagggccttggcggtctcgacagcagccatcagctcgtcgagatgcgcgaccagttcagcgcgcagcttggtctcgttgtagccagaacccagggccgcttcttccagcggacggatcaggttctcgatggtgccggcgaaggcgcggaggtctttctgagttgcagcggcgaaggttgccatggttcagttccttgtgttatggatggagtcaggttggacggggctgtagctcagcccgccggtgcggtgtatacgaccttggtgatagcaccgttggctacggtcaccttcacggaaccaccgccgtccacgggcagggtgtcaccgttcttcaccttgtaggcggtgagcgggtccggtggagtagcgccaccctcgccgcccagggcggtggctgctgcgatcacagcggtggccttggccttgacatcggcctcgtccatgtcgtgcagggcgatgcggttgtcggtgccgggctggcatacctggtagaaggtcaggccggtgttacggccagcgaggtattggtcacgggtgttcgccatggtcagtctccttgattcagggcgttgcataggtccagggcgtcctgataggccgctacagcgcggatcaggccagcctgggtggtagggtcaatcagtgggtgttcgcacagcacagcgggcgccggggcggttgcacaggctgtcaacgacagcagcaggcacaggccggtcagcccacgggcggttctggtccagggcacggtccacctcctggcgctgggtgttggtcttggcggcaacctcctggacgtggcgctgtaaggtggcatagcgcacctccagggcctccgcacgggccgactgccgcttgatctcctcctgggcgatacccaaggcccggtagctctgaacgaagccgtatgaggctcccagggctaccacagcaaggacgagtattgcgacgatggttcgaggcattgcttgatctccgcgttgcggcgattcacgaggcccttggatacgaccttctggccgtcgatcgtgaccttgttccacatggccagggcttggcagccctcagtggcgcggccttggttgaagcgcttgaacgctgtgctggttgtacagactggacccacgttgtagcagaagaacgtcagggcggtttgctcgttgacgttcagcggcaccttgatggcgtccaggacgatgcgctcgaagcgctggtagtccttgagcgtcatctggtagcactgctccggtgtggctttgtcacccatcttgaccccggcagtggtgccagagcagatggtgggtacgccggcgatgtctcggtaggcagtggtctcgctaccttccagggcgacaaggccggcgagggcagccgcaagggctgcgccgcgcaggggcttgttcacttcttgaacctccggcgaagctccgcgatgctatcgagcatcttcgggagcagggtgatgagctgggcgcccacgtagagcgcggtgagtaccgcagcacagaggctggcgatctcatagggcgagtaaacggcgatccccacgccggtgacggcgagggtgcctttgcccgcctcggtggcggtatcgagcatcatagtcttcgtccttttgggcggcccttgcgacgctcccggcccatgccgagagaccgaaggacagacttagtgtaacccatcgggttgttcagccattccttcttggcagcctcttcacgagcgcgggttgcggcttcgtcgtcctttacgagcgtgggtgctagctcgcggacaaggccctcaagggcatcgatccggtcgtccttcggcagtgagcctcggtcggtggtgatgttgtgaatctggtggaacacggagcgctcattgcgcttgtccgctgggtactgctgacaggccacatggtcggaatccatcgccgatacgtggaagatcagacggtgccgctgcatgatgggccgcagggtgtcgatgatgcgacgctctttctgtccggacttctggcggtcttctacgccgatcccctcatagcggggcttgttggtgtccgggtcgatggatcgcatgtggttgcggaagagctggccaactgcaccagcgccgaggtttttctcgacatagatcaccttgacgccataacgcgcagccagggcaatacatttctccaggttctcctcggcaaagccacccttccagccgccgatgctcacgacgtggatgtacgggccaagagtcccgcccacggcatacgacagctcgtcgccaccgtcgccggcagggtccacgaacatcgtcatttgctggagtggtgcccagccgccagccatcagcgccggcaggtacagctcaggtttgatgaccgggaatcggtgggcgtcgaacttgagcttgaagcgctcatcggcagcccaggccacttgctctggcacgctctcatgcgtggcgtcgatgaacagcaggtcgcgcagcttgagctgcatacgctgctcgtcggcgaggctggtgtccagcatgtactgaagctggaagccctcggggccttggtcaagctccttgtcgagcaggtcctcttcgttgtagcgctgcggatcggcagcccagccacgggtcccatccaggcccttgccggtgcgcgggttgtggcctttctcctccaggcgggcaatgcgcgccaggatggaaggtgcgagccagtcaccgtagcgttcctgctcatccagggtcgggaagcggcccggccagatgcgcatcaggaagccccgcgccggcaggccgttgtagatcgactcacgggactgcggcgtgcccaggtagagaatcttaccgtgggtacagatagaggtgaactcctgcgactgtcgcgtcagcttggcccgctcggtggcggtgaggccgttcttcgtggtctcgatgtcgtcagggatcaggatgtcagcccggtagccctggagggcagcggtgatcccgatgcagttgatggaggccgatttctcgacgcccttcaatgcccagttcacgtcgaagctggtggccgaggtacggtcacccatgcgggcctcggggcgcaggtacgccagaaggtcccagtgcatgatcagcttcgtgatcaactggccgttctcctcggccttgtcaccggagccggataccagcatggcgcgggtagccgggttctgagtgatgcaccagaccacgtagatacaggcgatggtggacttggcctcgccacgctgtgcagcgaccatcgccttgttgggcgagtcctgcatgaagtcggcgatgtcgagctgcatccacgtcatcttgaagccgaggaacagcatggcgtccaggcagaagtcccggaagcgcgggtacatgtcccgcacctcgtgggctatctggaatcgttcttgcggcgtcatgctgcctcctagtgggtgtacagtcgttccatctcatcgtcggtctcaccggcgatgaagccctccagggcgatacggcggttctccgcctgcgcctgccgcatttcctcacggagccggtcgatgttgatggtgtcggacggatcgcaggtgatctcgttgtccttgaggaacttggtggcggcagcgatatccgatgcggggatcgggatgtcgttgtccatgtaccacttgaagttgcgttcgatggcggtgcagaccagctcgtgaagcaggcccagccgctcagcactcgcggtctgctttttgctcattacatgtgccctctgaattggacttggaagcgtaggttggttcccatgccgcacttgaccagaggccggaacaccttgccggtgtccacctccaggtgctcctgggtgtagttctcgttctgcgtgcgaacgtacatgttaccgcctcgggtgtagggtacgatgacctgtgcccacgcagttgcgccggggcgcttgtcgtcgagggctaccttggcatagtccacttggcccagctcaactacgatacgacggccctgctgcacgttgaagtacgatagggcgccggtcttgtctgcgcggacgaacacaaagacgtagttcatattgctgtcgaagtccaaggatatcgtcgagatacccgcgtcgatgccatcgccaatgcgcacttcgttggtgccgtcctcccagccgaggtaggtgccgtcattccgcagcatggtgcgccatacccggacgaatagcccctcggaggggtcctggatggcgacccctccgtcgcagaagtcgagcacgtcgctgatgtcacgacgtgccctggcacctacaaacttcgacttggccttgggatcgaggtcttcgttgaagtcgtagatcagtgccatgggttatgccctcgccaccgagaactccattgtaatggagaactcctgagtgttgttcttgactacgggagggtcgatggtgagtgcgtagttccgcccattgtaaatctttaggtccttacagccggtgataccccccggcatgttgccgttatctacggtggcccgtagcataagctgacccttgtaggtgccgcgagtatatcgcgggtacagcttcacccactgaccgtcttggacatcggcaccggacgcattcttgccgtcgatccgtggactctcgttgtagaagatgtagcgctcaccgtagaggttacgccggttcgcgaagggcagcggggtgaggcggatggtacgctcaaccccggagatcacgaacttggcctcggccatcgccacagccttgctgcgcagctcatactgtacgtcgagaatctcgtcagcctgaactaccagggtggtgggttggccggcggcgtctttgatccgggtgtaggatagtggagtacctgccggaatcttcgcgccggtgttactctcaaaccccaccgcggattgagctacgatgcccacggtggccagtacctgaccggccagggtgcctattgggaagcgccaccgcttgtgccagtaaatccactccccgtccaggcccgaggtcacgtcgccgttaggggcatacgaggtggtgcgccgaacttcttccggcagggagggcgcggcggggttagggtccgcagtgctggtactcacggccagggcctgggagaacaggtcagaggtatccatggcgcaaatccaatcaagacctgcgttagtgatgaggttgtcgaaggtgtgttgcgccaggacttcacccgtggctttcatatgggtcaccgtgtagcgacccttaactcgcgtctcaaacattggtcagttccgcctgtttaattgctgttgaggtggtgaaggcgtaaggctccacgatatactcagagtatacgaccacaaccttcaactccgcgcctaccactgcggtctgcgacgagaatgcgtaaggttctgcggtgtagtccttaaccgtatcgcgcagtaaaactgcatggatggcaggtcccgtcaggaacccatcgccaccgccgtagccgagctgagtcagcgaccgcagcagcacgcttaccacactggaggtcgcgtggtaggtgtcctctccgggctggttcaacacctcgtgcagggtgtcgcgtgttagcgctgccacgatgttcggcctacaagaccatgcgtcatccgtagccaggatgggatatgggtaggtcgccaagatgggcttgggccgccgaatttgagaggccatgatgcccgcgataatgccgcgcattattcgtcctccatggctccgaacacgatccagtggttaggcccgagacgcttgagggtacacacgccattctcgccgtagagctgcatggtggtgttctgcaaccggttgatggtcacgccggggccggccacgatgttgaggtcgcgcacacccgcctgttcgaagtgaacctcgctgaactcgatccagggtgcatccgggtcttccatctgcatggtcagggtcagcggcttatcagcggtgatgcagcggttccagtaaccacgccagctcgggtcgatgtccgagtcttccgtaacggtgcgaatctcggcgaagcccagggcgcggcgcagcgcttcgttagcggcgtcgagtgcctcctgtgcaaggcggcgggcctcctcggcgatacggatcgcgtcgagaacaccatccagtgcgaggttcgcggtgttgatgccctcctgcacggcgtacagaagctgcttgttgttcgcgtcgatgtagcgaggcaggaacgggatgccctggctgaactgcgtatccggcacttgggcgggggtgtcgcggaagatgcggacctcttggccctgcttaggcacttccgcaagctgaatgttggtgttgtccacccacgtatagtcggtggtgagtatcttgtcgacctggacgaatacgtcctcacgacgcaggaatgggaagtcgagactgaatacagtctcgaccccatctgcaacgtggatggtctcggggttcttgaaccgagccacgctattcccctttgatggattccaacagcaacttggttgccgggaacacgttgacgaaaggcagtgcgcccgccgcgccgttgacgatatcgccagtggctgctgccgggtcgtcgccggttacgaggtctcgaacgcctcggaacacttcgttggagtgttcagccagtccgaagaccggagcagacattcgggagtggccagtgaccacaccccacatatcggcggtgaagcccagaccggcagtgtagccgatgccgtcgatggccatcttgcggatgccttcatcagaggtgtcgaacttgccgttgatcgctgccttggcacccatcatcagcgcggtgagcggatactggaatgcgaggagcgaggccacgccaagcacgccggagttctcataggttccccggaggagcttgttgtgcgcgaaggccacaaagctgcggaactggcccaggatttggccgacaggtgaccgagcaaagcccgagttctgaccgaccctgccgtacagcagcgagtcgtccatgatccgcagtgcggtgttcatgacggtgttcacgtctgcttggctccaggcgccccaattcatcgattgggcgttccttcctctgtatgtgacataaccgcgaacccgcgccaacactggcgtccagtccacgtccttcccgtactgctggagcacgcgaagggctgcttcatccccctgagccgcccgcgccaccttgttcaaggtgaggttggcgttcatacgggattgccagttgtgaatgaacttcatgccgttgagcaccgggacagcctgcttacctgcgtgcaggaagcgatccatgaaggtatcttggctggccaggaaggtgtcgaactgccgcttccagggcttcatccggatatcgttggcgaggttcaggccgaggacggtctgcatctcgtcagcgaggtccgggtcgcgacgcatggcgcccacgaagtctcccaggcgggagttcagcatggccttcatgacgttgaagacgccttgacggtgcgccatcgtggccagctcggcgagctgatacacgcctgagaatcccagcatggtggcgctggtcaggccgctggcccgctgagcaaccgggccgagctgatgctccctcggcacgttgccggtgaagtccccgaagactccccgcagttgccccgtcagctcctgcaccttatcggtgcccaggtgtgctgcctctcgctggtactcccggatgaaggcttcgatctccgagtcccccggcatgcctgcgcgggccaatgctgagcggcccgacatactgccggcgtagttctccatcagccggtccaggtctcggtcgatcaggtcctgcacccgatacacggttccgttgtggttgatctctgcggtcatgtccagcgacagccggcccttgccgtacttgacggtgccctggtcggactgcttctgctcgatcttggccatgatgctgtcgaacttggcctgggacacgttggcctcctccagcgcctgccggatgaatgccgtgtccgccacgcccatcgcgcccatgaactcggagcggattccggtggcccgatcccgcgcccgctgcacaatggcctgtgcgatggtatcggcatcggcgcgctccagcccagggatgccacggaacacggcctcgctgatggcgcggcgggccaggccaggggcggcctcgtccatctgcgccatcttcgaccagttccatgaacggtggaagtaccccggtcggggagcgaagtcctcgaagccacgcacaccggcttccctggcgcgctggcccatcagaccgtgaatctcgtctgagcggtcggccagggccttgatggtcggcggcaggttcgggtccacacggacgctgccgtaggccgtccactcgcggtcccggcgcagcagctcgcgggtgacctgctcgttgagctggtcccggactgccatggcgcggcgggagttcagcgcacgtgccgtcaggcccacaccctgctcagccattgccttggccatcatctcgtcgtaggacttcacgtaaccctcgaactcgttccgatagcggcggagatagctcgctgcgttgtcgttcgtgctgaacccatcccgacgtaccgggtcgtcgataagacggctcaggagtcgccgtgcgccctccccaggctgtgccaggaggtctgcctcgctgaagaacctgttcacgaagccggcaccctcacgggcacgttcacgggtggtccgcacgatggtctccaggctggcctcctcggttaccggagcgcccttgttggcccacttggcctgcgccttagtgtagccgggcatggcctccataatcgtctcagaggcggccaggacgcggctcagggccgtgtcagcatcggaccgcagacccagtagggtgcggatgccctccacgaagcgggaccacaggcccggcccgccgtcactgtagcggaggcggttcagggtcctttggaagcgggtatccgtcaggccccaggctaccagttccttgacgttggccagggtgttggagttaccggctagcagcgtctcttcgaactcggacagttgccgaccggcggcgcggtcctgcttcagggcgttgagcacgttaccccggacgttctccagggtctgcatggcctgagccaccttcggactcatcgcgccaggattccgcaaggcggcgttcatcacgcccacggtggcagcgtgaaccgcctcgtggagcacggtcaccgggttggtgccaactcggccaggtgcggtgctgccgcgtacctggaccaaggtgtcgaggccctgggtggagtgaatccccgccgtacccggtttgaggaaggcagagctggcagtgtcaccgccctgcaccacacggaacgcggtacgctgccccaggccctccagggtcctgatagtatcagccaccttggcggcgatgccctggagcggcttgggcacctctgcgtgggtcttgaggtggtccaggacctcagacagcttccggcccgacaggctatgcagctcgtcgccgaaggcagtgtcacgtcgcggaatagccggtatctcagcctgctccacgcgggcactgacacgggatagcacagtgccctcgtccagcaggtctaccacgtcacctgccttgaagccgcgtgctgcggcctcctcggcggtcatggctacttctggcagcccgacagtaggcgccgatacttcgggcacatgcggttgcgttggggcctctgcggcaatgcgtcccgcaccagaccccagcagagcacccacgccagcgccaagagcaccagccatgatgtaggttccggcatccacgtcggcccctgcggcatccagcccagcaacatacccgacttgcccagcgccgccagcagcagccatgccagcgcgaccgagccgcagagcacggccagcgccgaaagtaaccgcatcaactgccagagcggcagggtccagcatgccagccgcgaagttccagtacgggttgtcccgcacgatttgctcgtcctgctcataccgttgaatcctcgacaggaggtaggccgcgtcctcggcattgccggcacgggccatgatctggagatagttgtcagtcggctggatacctgccgcctggagcgcctggaccccataggtcccagcgtcgaagttagggtccacctcgccggtactgttcgccgcaaggtctgcgtcgagctggagcgcatcgccccagcgtccgacgagggtggactggttccagagtgcggaagcacggtcaagggccggcagttcctggtccgctacgatgcgttccagttcccgcgcattggctcgttggcccgctgccacgttccgttctccgatctcgccacccgtcagggcgtcgaaccccacggtaggcaccgcgtcaagttggccctgtacttgggcctcgtcgagctgtgcttggtcaaggggatacttgggcgtcatgcggcccttgaattgctttgccatgtcttactccgctgttgcggcgctgtaccaatcgacaccgatttgactcggtgtatcgaagtggggcgccatgcgcttgatgaatgcctcggcccggttgggcgtctgcgtgtaccacttgctgtttcgcacaccagcctcgaaggcttccttgttgcgatccttgatcgcctggaaggtgttacggaactgccgggcacgtccttcgcccatctggaaggccataccggccaatcccaggatagaggcattgttcgtaacgcccagctcgtcggccaacctcacaccctggtcgagtgcgcggtcggtgtcctcggcgaaccactgcgcggcttgctcgggcgtgactgtagtgcctgccccagcattgccactgcccaggtaatgccccaggcccacactataaccatcggcatccttatacgcctcccctcggtaagcctcgaactgagccagttccttccgccagttgaacacgtcctgcttcagcatgccggcactgttgcccccgttcatgcgaatgtccgtgccactgaccttgacgttggccccgtactcggcgccccgcatagcgttcagcttgtcggagttgcgcttgagcacctcgttgcccaccgcttgtgggtccacacgggtgcggtccagggcgaccccgttctcgtcgtactcgacggccaggaggctgccactggtgcggtcgtactcgaaggcgactaccgacttgtagccgaggagtccttcgacatgcggcttgtgctgctcggccaggacggttcctatggtctcggtgtcgttggtcccgaatagctgctcggcggtggtgccgcgaggcaggatcagcggcgcgctatcgcggcggctgaataggtccccttccttcaggttccgaccttcgcctacctggatggtgcggttacgcacgttggcggcggcgatctccagcagggcctcgcggcccgtgtcgctggtgagcagacccgcatgcttgcggtcgctggccagccagttcgcctcgtcgatggtcgcccggcgatacatgctcaggacggcctcgttgttgctcaggtcgctctcgccggtcagcatgttccaggctcgaccgaagatgttgttcacgaacttgtcgttgacctgcttaccgaggttgtccttgaatgccttggtgttctggcctttctcgaactcgtccatctgcttcacgacttcggcgttggcgctaaactcgcgcagagcttgagctggtgcgatgcccatcttcatctgcttgagtgcccaggccacggcgccctgctcggcttccgggatgccggatagcatcacgttgccggcggatgggttgatctcctgggccgaggccacctgttcgaagatgctgttcagcgtgttgaccagctccgggtttgcctcgccttccttggcggcctggatcatgcgcaccgcgctgcctacggactcgccgtaggtcttggggaaggtccccaggcgcaggccgagctgtgtgccctgcacgagacggtcagtcaggcttgagccgttggcggcctgcatcttgtcccactgctccagcgcctcggtgacgttggtacccagcgtgtggagggcgttgatgtctccggcttccaaggccgccatgatgccctgcatgcgctgagcgttgcccaggccggtcatggccttggtcatgaacgagatggcctgagcgtcgctccagcggccctcctcgaccatgcctcgtgagtacgcctcaacctcggcaaggtctgtgatggcgccgttggccacccgctgctggaagtccgcgtcggcccgcagggtagccatcgattccttggcgcgggtctgagccttcgacttttcatagaggccgttgagcgcacgccgatcatcgaaggacatgctgtccaggaacccggcatcgcgcaggccctcatagatgccccgctggttcatgtccaggctggccgccaggaactgcatgcctaccttgtcgcgcacctccagcgggatatcctcggaggtcatgatgttggtatagaacaggccggcctcttccaggctgagctgccgggacagttcgtcgccggtggcctgagcctgcacagccttggccaggatgctgttaccctgggtgcggaagccacgggcggcctggtcgatggaccagtccatgtacgccttagcctgcatgccgaagagctgttcctcggccttctgctgctgcgccagcgcctgtaaggcatcgttggggttcatgccctcggtcgaatccaggacgtgcgtagcctcctgggacaggtacttgcggaactcctcgggagtcatctcccggcccttgttggcgatgaatcgctgcatcttgaggctgaagtcggcctgagcgatgcggtagtcctgcttgcgccagccgcccttcacgaatggtttggccagtacgttgctgtctactgcctcctcagcctcgccggccatacgggcacgctcaccgcgcagaacttcctgctgcacgttgtgctcgaaccatttgccagcgatctgctgaccggcacccaggatgccgtcgagaatctgcgagcctacgctcgggccgctgtagttgatctcggagtcgcgcactccgcgccgagcactctggcccggctggagttgcgtctgtccgacgttgatcccaagctcttgggaagcacgttgcgattccgccatcagttgcctcctttaggcgtggcgccgaacttgaagtattgacttgcgtacagggaacccgccgacatcaggccggccaccagcggggaccgttgccccgccgtggtactcttctgccccagcaggccggccttcgcctgagcctggatggagtgcgcctgctcggcgaggttccacatctggttgtccaggttgtcgtcaatctggatcagggcctccccgacctcgcgctcgatgtccagggccaccgcatccacggatgcacccttgacgccgaacgcgccggcctgagcctcggcactgccgccggcgagcatcccctggcgcttggcctccacctgcgaggccacggcctgcttgcggtagctagcggccatgacgcccaggttggcgatgtcgcgggcagcggcgcccaggttgtcgaggtccgccttcagtcgagccttgttctcagccttgatcttcttgcgctcttccttgttggccataccctgctgaagggctgacatgccgccagcggccaatagtggtagccagaaagccatcacaccctccggtagatttggttggacttgaagttgtactcgacagcccggacgttcatgtcgtacggactatggcagctcagctcgaacttggacgtggccatatcgacccgtgccggcagcggcaccacagcgctatccaccagaggctccccggcattgagttgccggctgaacaaccgaaggggcgtcgtgtcgtaccacggctggttgggtcgagccgtgtcgctgatgcgccacaggaactcgccagtccatccgaagttcacgctgtaccggtggagcactgcgcgggtcgcggtcatgggcagcccgttgtggtcccgtagcaccggcggagtgaactccaccttggaccagaactcacagccgaccacgtacacggcaccgactacggcctcgggcacgtcgaggaacaccttcgtattcgtctcgcgcttcacgccgaggtgggtacgttccatgtaggcaccggccacgggctggagctggtatacggcagaggcatccttgatcaggtcccaatgctgcttggtcagctccagctcaccatcgacggtcgcctcgatacgccgccagtaatcgtacttcggatattgcagaccctcgcgggctggcaggctgttcaggtgcatccggcccagggcgatctcctggcccttctggatcaggaccatcaggttgtcgccggtgaagtacgcgccgatgatctgatgccgcagcgtccatcggtggaaggcgttctggactttctcgttgccctgccagaggtactggtggcagatcatctcgtccgccgtgctggtgccgaacaccaggtagccgctggaggccgccgcctggatgtactcagccggccccggcatgtagctcgggatgtggctggtaacgtcctcggcgacgtagtggctgtccgtggacggcgacggggccatctcatgcaggcccatgaaacccagggcacgctccgcagcgaagtacacactgcggccagtcacggcaggtgccgccctggtatcgaggtcgtactgcgtggtgatgctgataaccgccgtacggggagttacaatgccgccaccggggaccacggcctggtacttcttggcgaagacgatcaagtccttgttgaaggtgaccgcgtgctcgtacggttcagtcaggctcccctgggccgcgatctcgataggatcatcgtcgttcagcgcggctgccgacttcttgaaccagcggtgcggattgttactggccgacatgcagacgtactcctgcgacaggagaacgaggcgaccctggaaggtcgtcatgccggtgatgcctcgggtgacgaagttgaacgtggggttcgtatcctcgtcgccggagccacgtcgatcatactccaactcgttcaagctgtaggtgtcggtagcctcatcccagcgcagggccagtggcatcttcttcaggacccaatcggtgccgtaggcggcccgctctgcccagcggcggttagcggaatcccactcgaagtataccggggccttggtggagccggtggccatgacagcgccgtccatgaactgcacccccacaccaggggcgccaactcccggcagcaaggccggcaggtccgccgtagcattgaggctcataccacctgacgcgatgccgtagttgttgcccatatccgtggacacctcgaccacgatgtcgccgtcgccccggaaggcgatgtagccgtcctgcacgccccgctggttgagatagccggctaccgtagccgcagccgggtcagggtcaaccttcgggtacttcttcgtggagttgggcagggcgtactccggggcgccgaagaacttgccgtagagttgccaagcgatgtagcccacgctcgtttggaacggtgcctcagcgaggttggggttcgtgctggcgttgtccggtgtcacgtaggtggccgtgtgactgtaggtggtgcccgtggcgttgtccttgaccttgatggtcagggagaatgccttcgaatactggcctgccttgacgtacagccagccggccttgttggggtctacgcccttgatgtcggtgcggtcggcctcgggcttcacgctcaggttggcgatgaacaggtcatcggccaccgtggcggcccgtagctgcctgtaatcgttggccttgaggtagtcatgcaccaggggctgacccatcagcaggcgaccgtcccgctcgtcgaacaggtacagctcaccacggtgctgcgccaccagcatcgcaatgctgcggccaccgaggttcgtgtggtagaggaacggcctcggccagggctggtcggtatgcaggtgggccatcagctcgataccgctgcgccgccgaagtcctgacacgggatcggataccatgttgatctgctcgctgagctggcccggcaggcgctcgaagggcacctgctggctcacacccatcagcagattgggatacgcggattgcttgtagctcatgctcaggtcctcaagctgcgccgccaccggctgaagctacgcttggcctgggtgttcagcggacgtgatcgggtgtgcatgcgggacagttcgttctgatacgcctgcaattcctgggcgatgacctgggcggtctcgtccggtccaatctcgtgggtgtataccgcgagcgcagcctggtgcgcaatgacgcgctgtgcgatctccgggatacggtcccactcccgagacagcaccaatcggccctcgaccgacttaccgatgcggtcgtcgccggtgttggcatctcgcactcccaggccgtcccactggaggtccggggaatccgggtagaatgccaaggtgcccttgggcaggttgatgcggcccgtgggatcaggtgtcagcttgtgcttccaccaggtgttgaaccaccagccttgggtcagcaactggatgcgttgatcttccagctccgggagggcgatggccatggttggatacgtctcatccatgctcgggatcggcagctcgccgatcttgcgcaggatgacattcactgcgtcgagtagtagcatagggtttctcctaaagcgcaaaaacccacgcagggaatctgcgcgggtcgttaggctttgaagaaaccccacaccgaagtgcggggtttcgtggcatcacgcggtgatgtcgaaggcgccgatacccttcagttcgatggcaccagcggtgtccggacgacgggcaccgatgttgtacatctggaaggtatccaggacccacgagaatttctcgttgtcttcccacagcttggcctggaccggcgccacttgggcggtgatcagggtcttgctcgggaggaacagggcgatctggcgctcggactcctcggcgctcacgttgaagtgacggcccagcgggtgggctgcgattgccttggtggcgaagcgcggagtctccagcaccttgacgccgttgaggatggccacgcgggacttcacgtagtcgttggtcgcgccggttgcctggtactcgacgttcatcagcttgtcgtgctccagccggtcaggccggtcaggtccagtttctccagcacgcccggcgagaacgcatcttccaggtccaccggcgcgtccatcgcggcagccttgatcacctggatcaggcaggcttggtcgaacttgcgagccagttcctggccgtccagctcggcgacttccttgcgcatgtcgaaggattgggtccactcgtcctggtggtcgaactggtggcggaggtacagcagggtgtcgacggtcaggttccacttgtcgttcacgactcggctgcgctccagctcttcaccggcgcggcggcccttggcctcgacgttacccaggcgatccaggcggaccacgttcgagccacgcaggtcgcggatgttcatcagcggtgcgaacttggaggtgtaggcgaagtgcttatcgacgatgccgaggtgctcttccaggtggatgtcaacgtccgcgttcttgccagcgtagttcggacgggtcaggtcgttcaaaaagctcatacgatgctctctcttttggatgtgggtttaaggccggagtagggcagggtcgttagataccctgcgccatgcctgccttacgacgctcgcgcagcgcagccatctcggcttcggatgcgttcagcggcagcttagatacttccaagcggtactgctcagcgctcagagctgccagtgcaggtgccgcagcacccaggggttggccggtagcctgtaccacggcacccgagccttgtgcgaaggccacaatttgcttcgctgcgtactgcatggcctgggcatcgcccgagtccatcagccgaccgatggcggccttggtggccgggtcagcgtgttggttgaagacgccggcagcctgcttcaggatggcctcaccgccgacggcggcataggtctggctcaggacggctttggtctgcgcatcaacataggtcaggacgcccttggccacgttgatgacgtgctgcgcctgggccgggccgagaacttccttcagatagtgctcgtcgatgaaccgaggatcgcggttctcggcggccttgccgaaggctcggacggtatccagtttgtcagagaacgcctccagatagctgatggagggcgccaactgcgggtcgccttcgaggttccctgccaaggtgcccacgatctccccgttgggagtgaaggccggcggcggcgggacttccaggttctcgggaagaactgcacccgcagccggcggagctaccggggccggctgagcgggtgcttgcggaacaacgggttgacccacggcaggtgccgctaccggctggtagtgcggcgtcatggcgctggtcggaacgggttgcggctgctgagtcgggatggccagttgctgcggcgcacctacctggccgggctggaccggagcctgcggctggatcaccgggttcggcatcacctgcacatgactcggtgtcggcgcggcggcgggcggtacgttggcaaccaggttagcgaggcccggcggcagttgctgttcgttcggttgggacatctatcagactcctgcgagtgcgttggtcatgtcggaagcgccttccagcaaggtctcttgcgcggcctgggcctgcgcggcctgctgacgctgctgctctgcctcggcctgtagctcgtcggcgctcttgtagaactgcgacgtgtctacgctgaaggctgcccaaatcgtgtccatcatcttcggtagcgagatgcggggatcgagctgagcaatcggggccaggccagcgatgacctgggaagcgttgagcatgctctgcacagcggcggagcgggacagggccgggaggcccgtctcgatagccggtttgtgctgcttggtgatcaagccttggagtagcgcatcatccacctcggagaggcagacgtaggccaggggcgactgaaggttctcggccaggagcgagtaagtaccgcccagtgtgttctctgcctcttccgcagtgatgcgtacttcctcggcagtgacgcgctcggcgtcgcgctggttggcaccatacatgaacgcctggttcaagcgaacgactacggcttgcaagctctgctggatagcagccatcttgttgtagtcgccacgctcgtaagcacggacggcttccgcgccacctggcacgtagtcacccatctcggcgtcttggtagtcatcgactaccgcacccttggcctcgtccacgaggttcaggacctccagcgactccagctcgtacaggccgagtttctcgctcagcagggacagcttggcgaagtcgccgatgtagtcctcgacgtggccgcgaccgtagtgctcgccaggggcgaggttccaggtcggcacgatgtacgggcacaggtggataggccagcggccctccttgcccacacgcacgccgtcgatctcgtggtacagctcggcgtattccatcgccgtgcccctcttgcgctgtacgtgggtgtacaggtccacgctacctgaaccggacaggttgcgtcctgcgcgcatcaggtcctgcttgtactcttcatccaggtccttggacttgtagcgctgctttaggacgatatccatccagcggccagtcgcatcccggcgcaccgcataggagcggagcgaccatgcgaccaccgtagcggcggcgctgtctcggtacagcagagcattgccagtcacgatcagtagcttgatcacctgcgtcaggaccgccagggaggcgttctggaacaggcgctgtgttgctttgcgatccacccgagccaaggcagcggtcacttcggtaatgtctgtgtcccggctgtcggcctcgcggcggatcgcatcagtgagttcggatcggaagaacggaatccccgtggggaacagcgatctcgccagcttggcggcgaggttgttcaccaggagggcaccggcggactggaagtcatgctctacgactccccggctgccggacatgggatcgaccatcaggtagggaagcgtggtcttggcgaactcgatggctcgactctccacgctcccatcccgaagtttctcccacagcatagctgcggtggttttcatggcgtacctcgtcagtagttgataccgagggtttgcgatacgcctgtgcccgcctgattccggcgccgtcgcgtgccggtgccagtggcatcggccatcgctcctaggtcaacctgcgccacgttctcggcggtgaggtcaacctgctggtttcgtgcgagctggtccgcctgctgttgcattaggcggttctgctcttccatcttgcgggcatcggattgtgcgccgctcaggtcggtgcccagcaggccatcagcgagtttgccgatgatggtcttgcccagcaccttctttactttcttgcccataaggcttggctctccggtagtggatcgtgtaccggctatcgctttcacgatggctccagcacacgagggggatttgaccccagccggcctgacggtggagttcgcggatgaactcccggaccacgcctgtattgcggtagcgcggtaggacgtactgccactgtgctgtgacgcacgggccgacgtggggatcgtcctcgaacacaatgcaggcaccgccggccaactggccatcgcggaataccaacagctcggttcgatcgttgccctcgatactgtccagcatcgcattcagggcgtcgtctttcgagcggaagagggtgaattcttccaactcctgtattgccagccagcacagcccctggagttccgagggagtgccggcctttgcgtggactcgccagatggacttgttcatcacttcaactccactgcgatggcatcgcgtcggcgcaggcgtactgctcgcaccacgtctcgcctaccggcctggaactggatgtcttccatcgtggttccaggaccgatctgatgttcggggaaggtctgctctaaccactcgatctgctgagaggtgaacgtgacaggacgggccgtacccttgcctgttctcgatccttccactgtgggtgacataaccataggtcggtgggtcttcatagtagccatctatcatatctcctatgctggttagtctattctatctagaatccttcgtagtcatctagtctcatcttctactctacctctactcttcttctaccctctggtcttccctgacctctttctccctgctcccctctacgagggccttggacggatgcacttgctcctatgtgggtgacataatcccctcagcagaagaacgcccaggagtcccgtacagcctccagattcaacgatcctctccggggcggggtagcctctatcccgagctgttttgccagttctacgagcacacaggggccgctgtacatggcgatgaactgctccctgatgtggacgtgcatccgatccacgtctgccgcataggtgcccatgctgtcgtggatggcctggatcgggataccctctgccgcacaggccagggccgtcaggcccaggtggctgctgtccagcccgtggacgaagttcggagcgatgccgttggcgttgcgtaccgggtccagctcgtccttggcctcgtacagggtgacgtactcgacagcctctgcccgcagcctcacccgcacctcctcggtcttcgggtacgactggaacacctgcatgccgagtggcgtgatccagtgcaaatccttggatgcatcaggaagggccttagcgagccgctggagccattccatggcgaagactgccgatggtactgtctcgcgtattgcgtccagtatgagcgttgccatgtagcttcccaggcggtatgacgggataccctcgggaatctccaggccggactcgtccaggtagtccaggcagtggtctaccacgcccttgaacgtggtgccgtataccagcgtcatgcagggcttcttcgtcaggcttcgggatagaccagccttatcccacaatacagcgtagccccgagcctcgccttcagcactttctctgtctcgtgccagagactctgcaacgagaccgagaactcgggagtagatgtcagctttggcaagtccaggtggcagcaggttgacgtaggctccgccgatctcgtctcggagaatggctgagtagtgctggaggccggagcaggttgcatccatgtggacgatgaacccacttcggtaagcctccggctggcctgatgcgtaggccgcccgcagctccagcagacctgcgatggcgcacaggggcgactcgtcttccgggaagagactcggatagttctccggaccttcgttgagtgctcgctggaagtcgtcccatcgctcatcgacccaggctgcccggtcgtcgaagtacaccttgtcacatccgagggagttggcgacgtggactttgagccagtacaggccgcgcttaccgagggcacgcttttcgtggaatcgcagacacgccttggcgatgtcggacccctggggattcggtgtgccccaatagtacatgcggccacgggagtcaacgtgcatcgggaagtacactgccttgccatgatgctctcgaacaactcggtagagtgcagcaaattcgcgaagcttggcggtatgctctcgctccccggtgtaccaccggtggacggagcgtttccaacggttgaaggcctccagctcttgctcactggcattctccttggcccactcgtcgccgagcgggaactcaggtttgtccgggtaggtgcgctgggggatgcccagcacgccgccaccggaggtgaagacgcgctcgatgatctcgtacacgtcgtggttgatctcgtaggccaccgattgcagcgcgttgaccgcctcgtacaccttgggcatcttgtcccggcccaggtggcgtagctgcatctggcgcgcccgcttggtctggtgcttggtacggcgcactagcacatggtgcttctgcgccttagcgctgtagtaaccgccatcgcaccagtcgttccacggtcgcggcggtgccagcatcacgctacggcctgggcctccccaggtcatcgccgccgaagggtcttgcaggaactccttggcttccggcgacggctccaggtggacgctcgtaccgccccgacctgtgaagcggttcggctcgaacaggccgcactgtatcagcggatcaccaatgaacttgccgaggcgcaggtagtcgccatccggcaggtcgatacgtgcctcttccggcagtaccgcgtccagaagagcgtccatcgtcttctggatgtgccggacgctgcgagtcctgctggtcttgaggtagtccagcgtccggtcgtaatagggttggttgaccttgaaggccaaccgcacttcgatctcgcgacagagcatcttacccatgtgggtgtaatacttcgtcgctgtgatcgttggatagttgatgagcatcgacagcccggcccgcagtgccatgactgcgaggtcctgggcgtcgatgatccgcagcaggtgccgcagctttgctgccggccccgccgccttcgcttcctggtgggcgaagatcgcttcggtcacgatggggagcatccgcatcaacatgatgcgcgccctcgggatgcggtcgatggacccttgggcaatcgccttttccaaggcaatgcgggcgtcattctgcgccgccccgaccagggcctcttcgtgggcgatctgctgctgtatcaggtccattccgtctcctatcgtctttcgattacgcgcccgatatcctcgggaccccactcggcctcggccaggctaaccgccccatccagcgtcatcgctcggtagtcacgccattccccgcagctcagaatctcagcgcggaaccagcgcagttccaccagcttcacttcccgctccaggcgctccgccatctcccggagaatgtccgggagtatgacatcgctccagtcctgatggctgaccatcgccggcgtgatgtacgctgtgacgtagttgaccccgatgccccgctcgttgaaggcccagatgacccgaacaccttcatcggtctcgtgctgtcgggtacaccaacagattttactcattacctttctcccggtccatcagggcccgctcggcggcggccattgcgttgaatgcctcatgcaccaggtgcatcaggttggactcgtcatccagcggtccgtcgatcagccgcttggactcgtgccggtgttgggcggacttgaactcgcccaccgtcatcttcttccagtcgtgcggcagataccccttgacctcggcagcccattgcatcattcgagcaagctcccgcttcagcagcgggaacccctcgactaccaggtgcatgggaagcttaccgaccttgcgttcttccagactcgcacctttgcggtacggttcagtcgtgatcgtcgactcgtaagagtccgggaatgctaggctcatgctacctccttagttgctcagcagggctttgcgctgttccgaggtgttgcgggtgtaccgcccccggctccagccaccacagccgccgcagtgatagtgctcgtacttgccggtctgcgtatgcacccagccctcttgcttgacatccgtgtcgccgcacttcgggcagcggatggtcggctcggcgtcattgaagtacacggccacgttgggatggccgacgaaccacgggcgcatcagggtgtacagctcctccatcgatcgtacgtcgtcgatgttgtacaggcgcatctcctcccaggcttccgggttgtcctggaggcaggctgcccacaggtcgaatccggggaacttgccgtggaggcgcttcttgatggtgcatgccttgtgggtcatgtactccagcttgcggctggtgaacgcgaattgctgcttggcgatgatcaaggtgtcgatcaccttgaacggtctcggcggcggcatcttgttcaggaagaaccgggcgttgatcttgggcacgtcgaagcgcttgccgttctggacgatgatgatgtcggcctcgtccagcagcttatgcagggcgaccagcaggtgcatgtcgtccagggggtcaccctggcagtccatgtagatcacctcgtcgctgtgcatccacttcgcacagaacgacaggatggtccagtcccgcttgatctggttgaggcccacgttctgcttccagagcgaccagacccagccctcgataggcgaggtctcgatgtccaggctcagcaccttcggaccctggcctaccacgttgcccacggcgccagggaacttgcgcactacctcggcagccttgcggcccagccagtgcatcgcgcccttcttggcgtacatgccgcgcgtcctgctgtcgtggaagcccagcttgatgcaccagttgcggaagcactggcggctcacctcgccgaagcgcgaatgctcggtcaggtgctcggcacccttcttgaggcccagctcgacatagacgtttcgcaggtactcattggtgaattgcttgcggagtttgctcatacgttcctcgcgttgtgctttgcgacggccatcgccgccttgcgtttggcggctgcctgccggcgcttggccagcttcgcttcgtgtttctcctcgtcggtcttgtgcagggggtagatcagcggatgcttcggcccctccagatacgtcaggagggcacgaaggtaggggatgatgtcggaatacttcatcgacttgcatccccaggaacctgccgcattcgttatcttgccttctgcggtgttacaggaccggtgcaggacgccccgcaccagccccgtttcgtggtcgtggtccatcaccgcttcgcccttcacgctgatatcgatgggcttgccgcagagcgggcacagcttgttctgctcggcccatagcttcagggtgaaggtgcgctgttgactgcgcggtatctggtagaccttcggctcactcgtcataatcgctctccctccgcttctggagcagcgcctcgtggtaggcgtccagctcgatgatccactggcggaaggccggacgaaggtcgcggcttaacagatactgcgctgcgttgtcggtaggcgttcggcgcatccacagcacctcggcctctgccagcgggttttgcttgatcttggcgtacgcctccaggatcatgtcgatggcctcgtcctcatccgtgatcggatggaggatgtcgaaggccgtcttcataccgcagagcttaccgttgaatcgatcgatccctcggatgttgtcagcggtgtcgccgccgagccactgcgccaagaagaacttccgtccatggcccttgagcttgaactggccggaaggcgtgtacgcttccttgaggtagccgaatccgccctcgatcctgctcacacacgccgtatcgatctcccaatacgggtagatcgtcatccgcaggtctttgtcgtcggaccggatgatggccttgtcctgcatggcgtaggcgtccatcatcatgccgtcgtccgcctcgaagaacgtgtgcaggatgacatcgatcccctccggcgccccgcctcgctcatgcacgtccgccacggcccgccgcagtggctccagcagcgcgggctttgccttgcccttgcgctggccctggtacggtttcatggtcggatacgtgtcgcggtacgccttcgccccacctgctgccgtgaggtgaacccgtgtccctgtgcagtgcgctaggaactgctgctccaaaatgagcttccagaatcttcggagtgcagtgtccagggtcttagcagtggccgcagccacataggcgggtccgtcggcgtcacacaccaacgtcccgcctgccatgctgcggtcgaactgcgcggatagtcctgccaggaactcttccgatggcaggcgcattagacctgcggtactgccggcactaccgggaccgccgggacttcgaccgctgccggagccgccgtctgagccacctggggcacgtcaggcagcacgttctgtgcctcggcagtacctaccacaggggcggccacattcgccacctggggcacgctgggggccgtctgagccactgcctggggaacagccgggacagccggtgctgccgctacgccggcgtcggcggccacgttgggcactgccggcaggttgctgcctgcggcctgggtcgtcggcttgatgatcagatcatcgccgccgcccaacatgatgtgcagggccgagccggggaagttggtggccgagcgaatggtctcttgcaggaagttcttggacttgccgttgtccgaggtgccttcgatgaacagggcgtcccaggtctccttggtcggcgcgtcgaagaagaaatactgcaacaggtccatcggcagttccggcacgttatacgggctgccatcgaccgggttatagggcttcatgatgccgccccaatcgatgtcgttgcgttccttaccggcgttgttgcccttggtgatcttggtgcgcttgatcgggatgatgaacgcctggccgagcatctgagcgaagtgggtatgctgcccgctccagttcatcttgtcgaaggccagcttggtcttggacttttcgttgttgccgagggtcatctcgaaggtacggaacaggccgggcttgatcgagccgtcggcctcgtaggtgtggaacaggtcgtccgggcggctctgcgggttaccggcctgcgggttcacgtcgccccacaatgcgaagcccaggcggatttgaggcgccggattcttgagcttgccctggaattccttggcgtggtcacccagctcgatgtagatgcagaagcggcccatggcggtgcccgccgggaagatgcgaccgccgccaccgccggtggaggtttcggacatgtcgatggttgcggtctcggcagccttgttggccagggcgagggcggcttgcagagcgttgagttgttgagtcatgcgtggtctctctcgtgtcgaatgaagatttaaggccggagtaggctagggtcggcctagtcccggatcacgtccatgttgaacatgttgggtcccatctcggccaccgccgggaagggaacgtccgcgatgtcgtagcccaatcgctcgctcatgtagcgggcagcgtcggccatgatgtcgcgcacgccacggttgacctcggcggcggtgtccttgtggcagtcggtgtacacggcatcgtgtacgttgttgatcaggaactcggtgaccataaatcctgggcgatgcagcatccaacggaagatgcgccctacgctcacggtcatcatgaacccagcctcgccctggttccagtagttggcgatctgcgtgtccttgaagtccatgaccgtcttgcgctgttccttgtcccagcgctcctgttggcggaagctgtagcaggtgccaccaggcgcttgccagaatccccggcggtactggcgccagttgccatccggccccatctcgctgaaggcgcctgccggcatctggtcctcggccttgtacattacgaggctggtggcctctgcactgtcgcggacgatctgccggaatgcgatggactctgggaacagggccgcctcgttgtccaggaattcctgggcctcttccacggtacagccggtgttgaatgcgataccagccgcactcgcgccgtactgcgccgagaatgccttgggcttgatgttctttcgagcctgcatcatgcgaccgtgccacgggtggttggggtccttcttgatggccacgagctggtcgtagtcgaacccgttccagttgttgtgcttccctgccaggcggtacaagtgcatgtcagtgccggccatcagtttcgccaggaggttccgatccttcgacagggccgccaacatcaccacctccagggcggtatagtcggtctcgccgatcatcccgtccgcgccgaagcgagacacgaacatctccttcacgcggctgccggcttccgggtcgtcctcgtccttcgacgggagctgctggaggttcgggcggctggacgacagacgcgttgtcgccgtcgccgtcgtattcagcgaatggtggatgatgccgtcgtcgtccacgtactggagcatccccttcgtgtccttaatcgtcccatccttgttgtaggtgtgggtgatgtagaacgaggagttgtccttgtgcagctcgg

SEQ ID NO: 10 - DNA, 42600 bp, unidentified
  source 1..42600: mol_type = genomic DNA
agttcgacaccttcctggccagccaagataccttcatggatcgcttcctgcacgcaggtaagcaggctgtcccggtgctcaacggcatgaagttcattcacaactggcaatcccgtatgaacgccaacctcaccttgaacaaggtggcgcgggcggctcagggggatgaagcagcccttcgcgtgctccagcagtacgggaaggacgtggactggacgccagtgttggcgcgggttcgcggttatgtcacatacagaggaaggaacgcccaatcgatgaattggggcgcctggagccaagcagacgtgaacaccgtcatgaacaccgcactgcggatcatggacgactcgctgctgtacggcagggtcggtcagaactcgggctttgctcggtcacctgtcggccaaatcctgggccagttccgcagctttgtggccttcgcgcacaacaagctcctccggggaacctatgagaactccggcgtgcttggcgtggcctcgctcctcgcattccagtatccgctcaccgcgctgatgatgggtgccaaggcagcgatcaacggcaagttcgacacctctgatgaaggcatccgcaagatggccatcgacggcatcggctacactgccggtctgggcttcaccgccgatatgtggggtgtggtcactggccactcccgaatgtctgctccggtcttcggactggctgaacactccaacgaagtgttccgaggcgttcgagacctcgtaaccggcgacgacccggcagcagccactggcgatatcgtcaacggcgcggcgggcgcactgcctttcgtcaacgtgttcccggcaaccaagttgctgttggaatccatcaaaggggaatagcgtggctcggttcaagaaccccgagaccatccacgttgcagatggggtcgagactgtattcagtctcgacttcccattcctgcgtcgtgaggacgtattcgtccaggtcgacaagatactcaccaccgactatacgtgggtggacaacaccaacattcagcttgcggaagtgcctaagcagggccaagaggtccgcatcttccgcgacacccccgcccaagtgccggatacgcagttcagccagggcatcccgttcctgcctcgctacatcgacgcgaacaacaagcagcttctgtacgccgtgcaggagggcatcaacaccgcgaacctcgcactggatggtgttctcgacgcgatccgtatcgccgaggaggcccgccgccttgcacaggaggcactcgacgccgctaacgaagcgctgcgccgcgccctgggcttcgccgagattcgcaccgttacggaagactcggacatcgacccgagctggcgtggttactggaaccgctgcatcaccgctgataagccgctgaccctgaccatgcagatggaagacccggatgcaccctggatcgagttcagcgaggttcacttcgaacaggcgggtgtgcgcgacctcaacatcgtggccggccccggcgtgaccatcaaccggttgcagaacaccaccatgcagctctacggcgagaatggcgtgtgtaccctcaagcgtctcgggcctaaccactggatcgtgttcggagccatggaggacgaataatgcgcggcattatcgcgggcatcatggcctctcaaattcggcggcccaagcccatcttggcgacctacccatatcccatcctggctacggatgacgcatggtcttgtaggccgaacatcgtggcagcgctaacacgcgacaccctgcacgaggtgttgaaccagcccggagaggacacctaccacgcgacctccagtgtggtaagcgtgctgctgcggtcgctgactcagctcggctacggcggtggcgatgggttcctgacgggacctgccatccatgcagttttactgcgcgatacggttaaggactacaccgcagaaccttacgcattctcgtcgcagaccgcagtggtaggcgcggagttgaaggttgtggtcgtatactctgagtatatcgtggagccttacgccttcaccacctcaacagcaattaaacaggcggaactgaccaatgtttgagacgcgagttaagggtcgctacacggtgacccatatgaaagccacgggtgaagtcctggcgcaacacaccttcgacaacctcatcactaacgcaggtcttgattggatttgcgccatggatacctctgacctgttctcccaggccctggccgtgagtaccagcactgcggaccctaaccccgccgcgccctccctgccggaagaagttcggcgcaccacctcgtatgcccctaacggcgacgtgacctcgggcctggacggggagtggatttactggcacaagcggtggcgcttcccaataggcaccctggccggtcaggtactggccaccgtgggcatcgtagctcaatccgcggtggggtttgagagtaacaccggcgcgaagattccggcaggtactccactatcctacacccggatcaaagacgccgccggccaacccaccaccctggtagttcaggctgacgagattctcgacgtacagtatgagctgcgcagcaaggctgtggcgatggccgaggccaagttcgtgatctccggggttgagcgtaccatccgcctcaccccgctgcccttcgcgaaccggcgtaacctctacggtgagcgctacatcttctacaacgagagtccacggatcgacggcaagaatgcgtccggtgccgatgtccaagacggtcagtgggtgaagctgtacccgcgatatactcgcggcacctacaagggtcagcttatgctacgggccaccgtagataacggcaacatgccggggggtatcaccggctgtaaggacctaaagatttacaatgggcggaactacgcactcaccatcgaccctcccgtagtcaagaacaacactcaggagttctccattacaatggagttctcggtggcgagggcataacccatggcactgatctacgacttcaacgaagacctcgatcccaaggccaagtcgaagtttgtaggtgccagggcacgtcgtgacatcagcgacgtgctcgacttctgcgacggaggggtcgccatccaggacccctccgaggggctattcgtccgggtatggcgcaccatgctgcggaatgacggcacctacctcggctgggaggacggcaccaacgaagtgcgcattggcgatggcatcgacgcgggtatctcgacgatatccttggacttcgacagcaatatgaactacgtctttgtgttcgtccgcgcagacaagaccggcgccctatcgtacttcaacgtgcagcagggccgtcgtatcgtagttgagctgggccaagtggactatgccaaggtagccctcgacgacaagcgccccggcgcaactgcgtgggcacaggtcatcgtaccctacacccgaggcggtaacatgtacgttcgcacgcagaacgagaactacacccaggagcacctggaggtggacaccggcaaggtgttccggcctctggtcaagtgcggcatgggaaccaacctacgcttccaagtccaattcagagggcacatgtaatgagcaaaaagcagaccgcgagtgctgagcggctgggcctgcttcacgagctggtctgcaccgccatcgaacgcaacttcaagtggtacatggacaacgacatcccgatccccgcatcggatatcgctgccgccaccaagttcctcaaggacaacgagatcacctgcgatccgtccgacaccatcaacatcgaccggctccgtgaggaaatgcggcaggcgcaggcggagaaccgccgtatcgccctggagggcttcatcgccggtgagaccgacgatgagatggaacgactgtacacccactaggaggcagcatgacgccgcaagaacgattccagatagcccacgaggtgcgggacatgtacccgcgcttccgggacttctgcctggacgccatgctgttcctcggcttcaagatgacgtggatgcagctcgacatcgccgacttcatgcaggactcgcccaacaaggcgatggtcgctgcacagcgtggcgaggccaagtccaccatcgcctgtatctacgtggtctggtgcatcactcagaacccggctacccgcgccatgctggtatccggctccggtgacaaggccgaggagaacggccagttgatcacgaagctgatcatgcactgggaccttctggcgtacctgcgccccgaggcccgcatgggtgaccgtacctcggccaccagcttcgacgtgaactgggcattgaagggcgtcgagaaatcggcctccatcaactgcatcgggatcaccgctgccctccagggctaccgggctgacatcctgatccctgacgacatcgagaccacgaagaacggcctcaccgccaccgagcgggccaagctgacgcgacagtcgcaggagttcacctctatctgtacccacggtaagattctctacctgggcacgccgcagtcccgtgagtcgatctacaacggcctgccggcgcggggcttcctgatgcgcatctggccgggccgcttcccgaccctggatgagcaggaacgctacggtgactggctcgcaccttccatcctggcgcgcattgcccgcctggaggagaaaggccacaacccgcgcaccggcaagggcctggatgggacccgtggctgggctgccgatccgcagcgctacaacgaagaggacctgctcgacaaggagcttgaccaaggccccgagggcttccagcttcagtacatgctggacaccagcctcgccgacgagcagcgtatgcagctcaagctgcgcgacctgctgttcatcgacgccacgcatgagagcgtgccagagcaagtggcctgggctgccgatgagcgcttcaagctcaagttcgacgcccaccgattcccggtcatcaaacctgagctgtacctgccggcgctgatggctggcggctgggcaccactccagcaaatgacgatgttcgtggaccctgccggcgacggtggcgacgagctgtcgtatgccgtgggcgggactcttggcccgtacatccacgtcgtgagcatcggcggctggaagggtggctttgccgaggagaacctggagaaatgtattgccctggctgcgcgttatggcgtcaaggtgatctatgtcgagaaaaacctcggcgctggtgcagttggccagctcttccgcaaccacatgcgatccatcgacccggacaccaacaagccccgctatgaggggatcggcgtagaagaccgccagaagtccggacagaaagagcgtcgcatcatcgacaccctgcggcccatcatgcagcggcaccgtctgatcttccacgtatcggcgatggattccgaccatgtggcctgtcagcagtacccagcggacaagcgcaatgagcgctccgtgttccaccagattcacaacatcaccaccgaccgaggctcactgccgaaggacgaccggatcgatgcccttgagggccttgtccgcgagctagcacccacgctcgtaaaggacgacgaagccgcaacccgcgctcgtgaagaggctgccaagaaggaatggctgaacaacccgatgggttacactaagtctgtccttcggtctctcggcatgggccgggagcgtcgcaagggccgcccaaaaggacgaagactatgatgctcgataccgccaccgaggcgggcaaaggcaccctcgccgtcaccggcgtggggatcgccgtttactcgccctatgagatcgccagcctctgtgctgcggtactcaccgcgctctacgtgggcgcccagctcatcaccctgctcccgaagatgctcgatagcatcgcggagcttcgccggaggttcaagaagtgaacaagcccctgcgcggcgcagcccttgcggctgccctcgccggccttgtcgccctggaaggtagcgagaccactgcctaccgagacatcgccggcgtacccaccatctgctctggcaccactgccggggtcaagatgggtgacaaagccacaccggagcagtgctaccagatgacgctcaaggactaccagcgcttcgagcgcatcgtcctggacgccatcaaggtgccgctgaacgtcaacgagcaaaccgccctgacgttcttctgctacaacgtgggtccagtctgtacaaccagcacagcgttcaagcgcttcaaccaaggccgcgccactgagggctgccaagccctggccatgtggaacaaggtcacgatcgacggccagaaggtcgtatccaagggcctcgtgaatcgccgcaacgcggagatcaagcaatgcctcgaaccatcgtcgcaatactcgtccttgctgtggtagccctgggagcctcatacggcttcgttcagagctaccgggccttgggtatcgcccaggaggagatcaagcggcagtcggcccgtgcggaggccctggaggtgcgctatgccaccttacagcgccacgtccaggaggttgccgccaagaccaacacccagcgccaggaggtggaccgtgccctggaccagaaccgcccgtgggctgaccggcctgtgcctgctgctgtcgttgacagcctgtgcaaccgccccggcgcccgctgtgctgtgcgaacacccactgattgaccctaccacccaggctggcctgatccgcgctgtagcggcctatcaggacgccctggacctatgcaacgccctgaatcaaggagactgaccatggcgaacacccgtgaccaatacctcgctggccgtaacaccggcctgaccttctaccaggtatgccagcccggcaccgacaaccgcatcgccctgcacgacatggacgaggccgatgtcaaggccaaggccaccgctgtgatcgcagcagccaccgccctgggcggcgagggtggcgctactccaccggacccgctcaccgcctacaaggtgaagaacggtgacaccctgcccgtggacggcggtggttccgtgaaggtgaccgtagccaacggtgctatcaccaaggtcgtatacaccgcaccggcgggctgagctacagccccgtccaacctgactccatccataacacaaggaactgaaccatggcaaccttcgccgctgcaactcagaaagacctccgcgccttcgccggcaccatcgagaacctgatccgtccgctggaagaagcggccctgggttctggctacaacgagaccaagctgcgcgctgaactggtcgcgcatctcgacgagctgatggctgctgtcgagaccgccaaggccctggtctacaagtgatcgagtagctcaagccgagcacctgcatagtcgggtgctccactggaactactggaattttattgaggtcggctggaaggctggctggattggctggcctgggctgggagtagttactccgggtccaattttgatatcgtcgtgtgagaaccctcccgactctgatcagcccacccttcccccgtaggccctccgtctggtgggccatcccctcgcattgcctgggtggtgcctgggtcatccctgggagcttccggcttcgccgggtggcggtgggcttccctgcccttcgccgcccattctacgcatcctgccgggagtgtcaagcccctggcggggtggcggtccatcggctcatactcagcgccctgcggtgcgccaccagcgctagcctccggtcatccttggccctggccctggccgctgggtacgggctgtgctgctcatcctctgctgcccacctggctagcttccgctgccatgctgcgtcgtgctggtgccaggctcgctcggctctgtcctgtctgctcagcatctcgttcctcctggggcctctgccctctggtctggtggtggttgcgggagtggctggccttgcctcttgtgcttgggctgtgcccttgccctctgcctggctgcctctgccctggagcttccctggtcctacctgggttgttccctctaggccgcgtactctactcgcctctacctggcttgtctagtcctgctccctgggtctgtctccctggcgctaccgctggtcctgctgtcttaccctcgccactccctcggcctgcctcggtcgcgccgctggcgctgatggacgcctatttgtccattgtgtgtgacataaccgcagccttagtgccacgcgggtttcagggtggtggccctggctgggtggctgctccctgggtggtggatttgcgttacctgggaacgataatcctggctagccagactaagcctcgcacgcgtgggtctctatacgcgtgggaaggctccagggagcgccctggcgcgggtattgacacgtgggcggcaggtctgtagagttcgccctgtcttcacgcaacaacgcctctacaggcagcctggagacaggggttgacaccctgccaggacatcggtaggatgcgcagccagaacgacgggagattgcaaccttccaagcgcggcacaagccataggcgcaagggacacggcaaactcttagggcatgaccaacgatgtgtaaggccggcaggcatcatcgcagggattgacacggtgcaggacacgcggtacagttcgcaccacctgatggcccctcagcaaaagggcctatgccggagaactggacgaactaatccccgacagaggattgacaagacaagcgcaagtctctaacatgcgcggcaagacgaaaggatggctgagccatctggcggtagaggttcgaagcttcaccagcggtacatggactggtgcggtaggttgaccgaagctgcaactggttaggcagggttccagggaatacctgtcgggtgctgaagactcacccaaaagagtctgagcgggaagcctccccgtccacggttaagcaaagggcctatggtaggtccggtgggaacgaatagagtgtcagtgggatcgggactagaatacccggttaatcgcgactgacagtatgctgggtagtatcggcgggccgattgaacaaggccaggcagatagcgcaaagggtacgggggatgagtgaagacgatcccgaagagtatgcgcaggacaagccagaaccgctgatactacagggactatgccaatgccaaggtttgtcccttgaggcccttccaccgaggggattcaagagacagacctagtgaggattgccgatggcacacttcaaggctaaggctcccaagtcaccctttgctgctcaggtagcgtactggcgggactgggaagccaaacgtactaagctcatcgcacaggataacgtcgaagggcgcaaagagcttcgcaagatgcgtgacgtgcgctacgctaccgacccggagccagcgccaggacgctaccacaaccctgaacagaaggctttcgtgaagggtagcgaaggcaaggcgcggaacatcctaaaggggtggaacgctaagaagtcgcaagggaagggtttgtaatgccacgtgtgaatgaactgacgccgcgtcaacgcaaggccgccaaggctcgccgcgacaaggcacgccggattgatctagcgcacaggatgccgaaaggcgccgactgcccgatcttccgcaaggctgagcaggcgcaagctaagcagccccgcgtcgataccctgaccactccccgcagtgctggctacctggccgccgctgcttacctgaacaaatccatctgaggtacataccatgaccaacgcaatctccaaaaccgtaatcgcattccgtggcaccgaagagatcaaccgcgctatcgacgccatccgtgtccgtggcaaggaactggacgaagccatccaactgaccggcctgtcgatcatccaccacatcgaccagtgcggcgacgtgaccgtagtcaaggcgctgtatgaagccatgccgaagggcagccgccgcaatgcgctggtcgagtggttggtgctgcacggcaaggtacaggttaacactgacaagaaatcgaacaaggacctacccttcctgtacaacaagttcggcaagaccgatctcgtcggcgccaccaacagcccgtggtacagcttcaagcctgagaaagcgctggaccaggagttcaacctggctgctgccctggccacgatcaaaaagcaggtgctccaggctcagaccaagggcaaggtgatcgtcggcatggaactgctgggtgacctggaagcgctggccgccaaggctgcacctatcgctgagcagagcaagcgcgctgctgcccattgactcaagtcgaacgcctgctaagcgggcgttccgctggaatcaatgacaactggagaaacacgatgagcttcaagcaacgtctgcaacgccaaatcgccctggcacagtacagccgcccggctcagttcccgtacggcgagcaggccgtccaggcgaagggggagtgaccatggacttctggatcgcccttcccttcctcgaactcggcctcaacctcggcgaggatgaactgcgcatgttgtggttcagcggcctgacggtactcttcatccacctcctgaagcggtgactcaagtcatggccctggcgggcgaccctcgcctactccggggccattgctggactcatcacaagcgagaactaaaccatgcaagctttgaatactctgttgatcgcaatccccaaggacccgtcgaacgcattcaacgcagccgacaaggcgctgtgcgcccatggcttccgtatgggtgacctgaataccgcgcacgtcctgaccccaggcgggttcgtggtagtgggcgccggcgtaactgtgaaccgctatgacgaagcgtatcgcctgagccgggacctggactctgaaggattcgacgtgctgctggtacagggtagcccgctgtccgggcacgtcacctgccaggcgtatggctggatcaacgctgaataccgcaagggctgcgcgaacgggcgcccgatcttcgacattgcaggaacctcgtaccatgtcctcgcgtgatccctaccgtatcggccaccgcgtggggctggtgaactacagcgaccgctacctgggtgccgacgcggcaggcaccaagggcatcattgaagccataacccgaccgtcccgctgtatgacgatctaccacgtacgctgcgagcgtaccttgcgccttatcgaggccgaggcccgtaacgtgcggttcatcagacagctaccgacccgtaaatgaagtggctcatcatagccgtcagcccatcaggaggctgtgccttcgtgtggagtcgcaagcgacctgtgcgtccattgcgattctactcacgcaaggcggccaaacgctggcttcgcaagcatcgccgatcggccttgcttgggagccggttcctcatcgtgaactggagcaagcgcatatgaatcctacctacgtcgtccgtctcaaggacggaactactcgccaggtggtagccgacagcatcgtcgccggccacgccttcgtcgaactctggttcctcggcggcgcggtcgctatctacccggcctgtgaagtacaagaggtgcatcgcactgacctcgtgaaggagggcgagtaatgaccgtcaagaccatatatgtcaagcctgaagacccggcgccgccagtcttgtccgtaggacgcctgtcaccaggtgaactctacaaggtggtgacgcctagcgtggcagagggcgccgttgtgctggcgaccaagcagacgcccgccctcgctcaggcagtcatcgtactgcacagcatgaaccccgcgcagtacgcggtgggtacggccattctcaacacagactggcggtgccgccgcctgggtgcgggtgagtacatcaaacttgttcaaggggaggccggccaatgatcgccgcgctgcttgtactcggcttgtactgttgcctcggcatactagcaggcgcctgctactgcatcgcagtgtcgccgccgttcgagaacccgacggaagtgcagttccaggacgcatgcgtgatcgggtgcttctggccactcataatcatcgtgggcacattcctggcactacgtgcagtaggccggggcctgctgaccgggctgaagcgtcacctgaacatcaaataacctaccggaggtaacatgatccgcacccatacccacaacaccgaccgcgagcaacgccgtctcttcgacctcacggaattgcgttccggtgagatgtatcgggtagtgcagcccgaggctaagcgcggcacactggtgatcggcgtagcagcttgggacagcacgggccgtcccgcagtgctgcccgtggttatccatgacgacggccctgccaaggtgaccggtccgcgtcccaccgtgctgcgcaacgacgggtggcgcatggccctcgccgacaaggggacccaggtgacactcaccgccgagtgaccaaggcgaaggctggtgcgccagccttccaccgtggccattccttgccgcgaaccaaccaacctctaggagctacatcatgaccaacaccaccaccgaaaccaccgtcgcaaccgtcctgggcgccaagctcatcaagaagccggccaccgtcgaagacttccgcaacaacgtcgtcttccaccacaacgccctgaccaagctgaccgaggtctacaacgaagcggtcgtcgccctgcaaaccgccgagcgcctgtccagcctcgttgccggcgacgtgatcaccttcgaccacggcaagggcgagaaagccgaagtgctgagcggcgaagtcatcagcgtagtcgccggcgtctatcaggtactggtgcgcttcagcgacagcgccccggccaagctgctggacgtgaaggccggtgccatccgcgcagtgcaggccccggcagcgtccgccgagaccctggacgaagccatcgcccaaggcgagtaaggcccgcacgtaataggcctggccctgccgggcctattgcgagctagccataccataggaggagtcaacgtgagcaagcacaaccccgagcacatcagcggcccggtacgcagcgtgagcgtacagaaggcacccgccatccaggccctggaagatcgcctggaatccgccctggctgtatgcgaggagcgcgcccaggatatcgacaccctgagccgccgcctccaggccgccgagcgggcgcgccgctgggagatcgacgagattcgcagccatcaggcgacgatccgtctgctccagaacgacttgaacgcagcgcacgatgcccacgaggcacaagagcgccgcgctcgcaaggcaaccatcatggcctgggtatgcctgctgaccgcaggtctggccgtaaccctgaaactggcaggagtctgacaatggaatgcaacgatcacttcaccaagctggcggccagcatgttcggcgtgccgtgtgccaaggtatccccggagatgcgccgggtggccaagagccgggcattcgcccacgcctatacgcccaagaaacaggcttcgggcgggacttacaccgcccgtgtgagcggcgtcacctgtgacggtggtaaggtggaggtgcgcctggataacgtggagcgcgtcagcacctgtggctatgccgatctagaggcgcgggtagcggccagcttgtgccaggccgacgcgaagcgcgccgatgagtacgaaaaactgctgctcaaggtattcccgctggtatcgaagaaggccggcccgctgtccgccaaggacttcgaggtacgtctacacgatctgcacgtaaccaagctggcggtaaaccgtgccctgcgcgatgccggaatagaaatggacggaccgctgcgcagccgggtacggaagcttgcggaccggaataacgagatgggcgctgaactgttcggcctcaagcagggtttgacccggctggtggaggtaggtcaacgggccggcctgtattgggacggcgcggagactcagcgattgctgacggtggccccgaccaaggccgtctgtcagctcatcagcaagctgaccggcgtgcggtataccttccgcgcttccgtggcgaaggctgaggccgaggcccgtgagcgggcgaaggcggcggctaaggacacctggcaggcagcaaccttcgcagccaccatcgccggcggcgtcgtgggtagcgtgctgacgtacctgctcgtctaagcgaccagggcctactccggggtcaaatccgagggcgttcctagagcgccctctcgtgtgagtctggaggatcacgaacatgcaataccatttcacgcattacaacggataccgcttcggcgtcgagctggaggacgaggctgtcttcccgtgcatcgacggtaagcgggcaacctgggacaaggtggcggcgtgtgccggcagccttgtgcattacatggcgcaggacctgattgacttcggccagcgcaagttgagggagatcgaagatgagcaagacgagcctgtatccgctgagcctgcatcccggcctgattcaaatcaggacgatccacgtattcagcatccaagccccgagcaacgccgagaactggtggcagtggttcctctggcagcggaagtaccacccgctccgggaaagcctgagtccagccggggagctgagtgcgagtatcgccgagtgtgtgctccacctccgccggagtggctggcaagatagcgacatctggcgcaagaagggaggcgtgctggccctcggtgccttcgacctgtcaggtctgatggtaggttcctgcctcgtagtgggcggtgaactgaaggccctgtgcgttgatgaccgacacagcaggcagggtatcggcgctgagctggtgcgggccgccgagctggcgggtgccgagtatctgacctgcttcgagttcctggagccgttctacgccgacttgggctggagcaccacccaccgcgaggcgaactggacagcaggagagccggacgtgttgcacatgagggcacccggccatgacgtatgaggtgatgacatggcttatcgagaacaaaccgctggtcatcggagtcgccttcagtctggtggccctgggcgtgctgctcacacagaacaacggcggcccgcctacggcgcccgcatgacctggcacctccaggacatgttcgaggcccgaggtgggctgcggcctttgtgggaggaatggtaccaatggcactgcgccgcgactcctggctaaagcaagcgcaatccctggcggttgggcaggtaggccggttccgacacgtcctgggatgcaagagcatgagccggggcgggaccaacatgacctgcaagaacctgcctgaccgctgggtggcttactgctactcctgtcaggagggtggtgtggtcgagaaaacgcatgtgcggagggtacaatgcgcggatcaagaacgcttcatgccctggcccgaggatgcctcggactggacgcaagccgactgctatcaatcgctttatggtttgctgctgtccaagggtatcgactacaacgtgatgacgccagggctgccgctgctgtacagcgaaaggcagcatcggcttatcttccctaccaacgcgggctggattgggcgcgctactgccgaccaaaatcccaagtgggtgggctacgggtatcctgccccggattaccatggatggccccaggaattatcaatgggcaggccatgggtgctgacggaagactacttgtcggcgctgaaggtgcggtgggcctgtcccgaagtctttgctgtcggtctgaacggtacaaggctgcgcgacaggctggcggcgatcatgttgcagcagacctgcaagcgcgccttcatcttcttggatggcgacccggcaggtgtccgtggtagtgcaggcgtgatgcgccggctccggtccctgcttatcgaaggccaagtaatacccacgccggacgggttcgatcccaaggacctgacccgcgagcagataaggtgcctagtaattggacgtattgacgctacacgcactgagtgacaaggaccgcttccgcacgttgcggagtgtggtgcctgaagggatgatggggccggagacgtgctttgtcatcgactggatcgagcaatactggaaggtctacccagcgcatcagaaggtagacccgcaggcgctacgcgaactgataaagctgcgaggtggctaccagccggagcaactggcggtggtcctgaacctcgtcaaccaactggacaagccggtagacccggactcgctacagggcgttgtgtcccagctcaacgaactggatttttcaggcagggtggatgccctcctggcgcagtacaaccagggcgaagacatcgacctggcgtatgagctgcgccggctgagcgacgaggccctgcgccgcgagggggtcagtacgccgaccgactatgtgacggacgacgtgtttgatatcctggcggaggagcagggtgaccacggcatcaagctgccggggctggtgcttccggcgtacatgaagggcctccacgccggggcctcggtgctggtggcagcgccgcctgatgcgggcaagacctcgttcatggcctggatcgctgtccatatcgcgccgcagctcaagcggtacttcgaccctgggcggcccatcctgtggctgaacaacgagggcaagggccggcggatcaagccgcgcctgtactcggcagccctgggcatgaccgtgggcgagattcttgccctggacccggaggaggttcgcaggatgtacgccgagaaaatcggcggcgactctgagctgatccgcatcaaggacttccacggtgggtccctggcccaggccgagcaggtcattgacgcgatgaagccggcggtggtgttttgggacatgatggcccacgtcaaaggtggccagcgcaaggaccagaaccgcaccgacgagatggagtacaaggtggccgaggtccgcgagatggcggtgcgtcacgacttcatcagcttcatgacgtggcagatcagcaacgacggtcacgaccagttgttcccaccgcagtcctgcctcaaggattcgaagacggcggtacagggtgctgtggacgtgcaaatccacctgggccgtctcaacggtgcggatcaacaggtcatgcgcggcctgtccctgccgaagaacaagttccagatggacgggaagccttcgaacgtggaggctatgattaacttcgacgccgcacggtgtcgtttctttgagagtgtagaccatgcaagctaagcatagccgggtgctcgaaggcaccaaagaaattccactgggttccattgcactgccgaccggggtcaaggccctgttgctgcgcctgtactctgatgcacggcccaacgagggcgtcgccctggccggtgggttccctcgcgacctcatgcatggcgccactccaaaggacgtggacatcgccctgtacggcatgacgcagtatcaggctgaagtgctcatcaacagcgtgcttcctaccctggacccgcgcttcgtccgggacggtggctggagtaccgagtacgccgacgcaggtgagggcggtatcttcaagggcgtgatatccctggtgggctgccgtggcctggaaggcatggacgtggacttcaactactacgatgccgacagcctcggtcgggtgatggagtcgttcgacttcaccatcaaccaagtgggcatcgcgtacaactggccggaccccgagggcggcccgcgactgggtgtgtacctgcacaaggacgttacctggggcgtgaacaaggaagttggttccggctcgcgactgccggagcgatgcgaaaagatgcgggccaaggccgcgtactacggatgggagaacgtgtgatgagcaagcgcgacgtggtattggatatcgagaaaggcatctggcgcggcgtagatcagaacgacaaggccgtcgaggccatcatcaagaagcacgggtacgtgatcgtcgagcctaagatcgacgggtgccgtgccatcgtgggtgcgcacggcgtggtatcccgcagcggccgccgcttccctgccctggacggcctggaggatcgcatcatcgcgaaactgtcccagcccggcctggactccggtctggtgttggactgtgagatgtacctggaaggcatgcccttcagtgaggcgaccgggcgcatggcccgcaagaccccgctgaccgaggccgagctgaagtgcctgcacttcgcggtattcgacgccacccatatcggcgtgctccgcaaatcgcgcaagtcccacctcatatacgatgagcgccgcgccatggtccgcagcctcatggaagattgccggcggggcgacaccccgtacttcttccaggtagccgcacaatcctgccgttctatggaggcggtactacgctggtacggctaccaccgcgccatgggcttcgaggggtcgatggagaaagacccgagcctgacctaccgcaacggcaaggttgctggctgctacaagcgcaagccggagatcaccgtggacgggcgtatcgtcgggtacgtgatgggcaagactggcaagaacgtgggccgcgtcgtgggctaccgtgtggagctggaagatggttccggcaccgttggcgccaccggcctgagtgaggggcacatccagctcctgacctgcgcccacctcaacggctgcatcgacgaggccatgccgaactatggacgcatcgccgaggtctccgcgatggaacgctcagccaacaccctccgccatcccagcttcagtcgcttccgcgacctggccagtaaccctggagtgaaggtatgaagattcgaaagtcccataaccgcaactacccggaagatatggtataccacgccaccaaccgggattcgctgctgtatccgaagtacgtcatgggttccgtgttcatcagccaggacggaacattccgcatctgcgtcatggcagggacttgggaccacgttgggtccgaagttcggcatcatgcgcgggacatccaatccctcggcgccggtcgccgtaagttgcaccgggtcatgcgacgtctgcgtcgcaatctgcgacaggtaggagtcaaagtatgagaatgcccaccgaggaagaacgcatgatccgctgcttgctggcggatatccacgaacccctggacctgctgttccccggcctccgcaccaaggcccatatggacccgcaagcggaagagctgtcgattcgaattgactacgaccatgcgaagctgggccgtatgggattctgccacgcggtctccctgtaccaactgaccatatggggacgtgaaggaatggtccgctacctgatgcaggagattccccgccgtgtgctggaaggtctactggtcaaggcgcagcagtacagtcaaagcaactggtacagcaaatgacgactatccgaatcctcgacctcgaaaccgagagctacgagcacaaggggcgcaaggcgtcgccctttgacccccgcaactacatcgtcatggccggctggcgggacgatgttgacggcaaggtcggccagaaggtggaacatcgcttccgcagccgggccgaagccgaagacccgaacaaccgctggttcaacctcgacggcgtggacgtgatcgtagctcacaatgccatgttcgaatcgaactggttcttcacccgctaccgggacgagtacctggccttcttgcgacgcggtggccgggtctggtgtacccagcaagccgagtatctgctgagtcatcagacgtggctgtacccggcactcgacgagctggctccgaagtacggcggcacccacaaggtggacggcatcaagatgctgtgggaccagggtgtgctcacctcggagatggaccaggacctgctgagcgagtacctgtccggcccgtgcggcgacatcgagaataccgccctcgtgttctacggccagctgatgaagcttcaggcccgtggcatgtgggctggctacctggagcgctgcgaggccctgatcggtttctcggcgatggagtgtgccggcctgaaggtggacctcgaagtcgccaaggtgaaccacgccaagcaactggaagaggtggccgggatcgaggccgagctgaagaagctgatgcccgacttcccggaatacttcgagttcaagtataccagcctctaccatatgagcgcatggctctacggtggcgaggtgcggtacaagggccgggtgccatacgaagatggccggatggagaaagccgacttcgtgcgcttcggtacggccaagcgggggactccaatcgagagtacctcagttcgggtcccgatccatgaagtgaccgaccagggtgagtggcactggcccaccatcaccgagctggcgaccaagcacggcccggtcatcacgttctccgctggcaagaacaagggcagcgtcaaggtgttccgggaggatacggacatcccggcgaccaagtgggatgatgaccagcgattccggttccccggcctgatcaacctgaccaaccttccggaagtagtgcgtgagaaattcctgggcaaacgcccggagttccagtgcgccctcaccctggcggatgggtcgcccgtgttcagcaccagcggcgacgccctcaaggctctggagaaacagggcttcgaggcggccaagctgttgatgcgcctggccgagctgcacaaggacaactcctcgttctacatcacccacacctacaacaaggatgggacgattaaggacacgaaggggatgctccagtacgtggacgacgacggcatcatccaccattcgctgaatacgacggcgacggcgacaacgcgtctgtcgtccagccgcccgaacctccagcagctcccgtcgaaggacgaggacgacccggaagccggcagccgcgtgaaggagatgttcgtgtctcgcttcggcgcggacgggatgatcggcgagaccgactataccgccctggaggtggtgatgttggcggccctgtcgaaggatcggaacctcctggcgaaactgatggccggcactgacatgcacttgtaccgcctggcagggaagcacaacaactggaacgggttcgactacgaccagctcgtggccatcaagaaggaccccaaccacccgtggcacggtcgcatgatgcaggctcgaaagaacatcaagcccaaggcattctcggcgcagtacggcgcgagtgcggctggtatcgcattcaacaccggctgtaccgtggaagaggcccaggaattcctggacaacgaggcggccctgttcccagagtccatcgcattccggcagatcgtccgcgacagtgcagaggccaccagcctcgtaatgtacaaggccgaggaccagatgccggcaggcgccttcagcgagatggggccggatggcaactggcgccagtaccgccggggattctggcaagcgcctggtggcacctgctacagcttccgccaacaggagcgctgggacaaggaacagcgcaagacggtcatggacttcaaggacacgcagatcgccaactactggaaccagggcgaggctgggttcatgatgaccgtgagcgtagggcgcatcttccgttggatgctgcatcgcccaggatttatggtcaccgagttcctgatcaacaacgtacacgatgccgtgtacaccgactgccacaaggacaccgccgccgaggtcaaccgtggcgtgcgcgacatcatggccgacgctgcccgctacatgagcgagcgattgggctacgacatcgcggacgttcccttcccggcggtggccgagatgggacccaacatgttcaacatggacgtgatccgggactaggccgaccctagcctactccggccttaaatcttcattcgacacgagagagaccacgcatgactcaacaactcaacgctctgcaagccgccctcgccctggccaacaaggctgccgagaccgcaaccatcgacatgtccgaaacctccaccggcggtggcggcggtcgcatcttcccggcgggcaccgccatgggccgcttctgcatctacatcgagctgggtgaccacgccaaggaattccagggcaagctcaagaatccggcgcctcaaatccgcctgggcttcgcattgtggggcgacgtgaacccgcaggccggtaacccgcagagccgcccggacgacctgttccacacctacgaggccgacggctcgatcaagcccggcctgttccgtaccttcgagatgaccctcggcaacaacgaaaagtccaagaccaagctggccttcgacaagatgaactggagcgggcagcatacccacttcgctcagatgctcggccaggcgttcatcatcccgatcaagcgcaccaagatcaccaagggcaacaacgccggtaaggaacgcaacgacatcgattggggcggcatcatgaagccctataacccggtcgatggcagcccgtataacgtgccggaactgccgatggacctgttgcagtatttcttcttcgacgcgccgaccaaggagacctgggacgccctgttcatcgaaggcacctcggacaacggcaagtccaagaacttcctgcaagagaccattcgctcggccaccaacttccccggctcggccctgcacatcatgttgggcggcggcgatgatctgatcatcaagccgacgacccaggccgcaggcagcaacctgccggcagtgcccaacgtggccgccgacgccggcgtagcggcagcaccggctgtcccggctgttccccaggcagtggctcagacggcccccagcgtgccccaggtggcgaatgtggccgcccctgtggtaggtactgccgaggcacagaacgtgctgcctgacgtgccccaggtggctcagacggcggctccggcagcggtcgaagtcccggcggtcccggtagtgccggcagtaccgcaggtctaatgcgcctgccatcggaagagttcctggcaggactatccgcgcagttcgaccgcagcatggcaggcgggacgttggtgtgtgacgccgacggacccgcctatgtggctgcggccactgctaagaccctggacactgcactccgaagattctggaagctcattttggagcagcagttcctagcgcactgcacagggacacgggttcacctcacggcagcaggtggggcgaaggcgtaccgcgacacgtatccgaccatgaaaccgtaccagggccagcgcaagggcaaggcaaagcccgcgctgctggagccactgcggcgggccgtggcggacgtgcatgagcgaggcggggcgccggaggggatcgatgtcatcctgcacacgttcttcgaggcggacgacggcatgatgatggacgcctacgccatgcaggacaaggccatcatccggtccgacgacaaagacctgcggatgacgatctacccgtattgggagatcgatacggcgtgtgtgagcaggatcgagggcggattcggctacctcaaggaagcgtacacgccttccggccagttcaagctcaagggccatggacggaagttcttcttggcgcagtggctcggcggcgacaccgctgacaacatccgagggatcgatcgattcaacggtaagctctgcggtatgaagacggccttcgacatcctccatccgatcacggatgaggacgaggccatcgacatgatcctggaggcgtacgccaagatcaagcaaaacccgctggcagaggccgaggtgctgtggatgcgccgaacgcctaccgacaacgcagcgcagtatctgttaagccgcgaccttcgtccggccttccgccagtggatcatcgagctggacgcctaccacgaggcgctgctccagaagcggagggagagcgattatgacgagtgagccgaaggtctaccagataccgcgcagtcaacagcgcaccttcaccctgaagctatgggccgagcagaacaagctgtgcccgctctgcggcaagcccatcgatatcagcgtgaagggcgaagcggtgatggaccacgaccacgaaacggggctggtgcggggcgtcctgcaccggtcctgtaacaccgcagaaggcaagataacgaatgcggcaggttcctggggatgcaagtcgatgaagtattccgacatcatcccctaccttcgtgccctcctgacgtatctggaggggccgaagcatccgctgatctaccccctgcacaagaccgacgaggagaaacacgaagcgaagctggccaagcgccggcaggcagccgccaaacgcaaggcggcgatggccgtcgcaaagcacaacgcgaggaacgtatgagcaaactccgcaagcaattcaccaatgagtacctgcgaaacgtctatgtcgagctgggcctcaagaagggtgccgagcacctgaccgagcattcgcgcttcggcgaggtgagccgccagtgcttccgcaactggtgcatcaagctgggcttccacgacagcaggacgcgcggcatgtacgccaagaagggcgcgatgcactggctgggccgcaaggctgccgaggtagtgcgcaagttccctggcgccgtgggcaacgtggtaggccagggtccgaaggtgctgagcctggacatcgagacctcgcctatcgagggctgggtctggtcgctctggaagcagaacgtgggcctcaaccagatcaagcgggactggaccatcctgtcgttctgtgcgaagtggatgcacagcgacgaggtgatctacatggactgccagggtgaccccctggacgacatgcacctgctggtcgccctgcataagctgctggacgaggccgacatcatcatcgtccagaacggcaagcgcttcgacgtgcccaagatcaacgcccggttcttcctgaacaagatgccgccgccgagaccgttcaaggtgatcgacaccttgatcatcgccaagcagcaattcgcgttcaccagccgcaagctggagtacatgacccacaaggcatgcaccatcaagaagcgcctccacggcaagttccccggattcgacctgtgggcagcctgcctccaggacaacccggaagcctgggaggagatgcgcctgtacaacatcgacgacgtacgatcgatggaggagctgtacaccctgatgcgcccgtggttcgtcggccatcccaacgtggccgtgtacttcaatgacgccgagccgaccatccgctgcccgaagtgcggcgacacggatgtcaagcaagagggctgggtgcatacgcagaccggcaagtacgagcactatcactgcggcggctgtggtggctggagccgggggcggtacacccgcaacacctcggaacagcgcaaagccctgctgagcaactaaggaggtagcatgagcctagcattcccggactcttacgagtcgacgatcacgactgaaccgtaccgcaaaggtgcgagtctggaagaacgcaaggtcggtaagcttcccatgcacctggtagtcgaggggttcccgctgctgaagcgggagcttgctcgaatgatgcaatgggctgccgaggtcaaggggtatctgccgcacgactggaagaagatgacggtgggcgagttcaagtccgcccaacaccggcacgagtccaagcggctgatcgacggaccgctggatgacgagtccaacctgatgcacctggtgcatgaggcattcaacgcaatggccgccgccgagcgggccctgatggaccgggagaaaggtaatgagtaaaatctgttggtgtacccgacagcacgagaccgatgaaggtgttcgggtcatctgggccttcaacgagcggggcatcggggtcaactacgtcacagcgtacatcacgccggcgatggtcagccatcaggactggagcgatgtcatactcccggacattctccgggagatggcggagcgcctggagcgggaagtgaagctggtggaactgcgctggttccgcgctgagattctgagctgcggggaatggcgtgactaccgagcgatgacgctggatggggcggttagcctggccgaggccgagtggggtcccgaggatatcgggcgcgtaatcgaaagacgataggagacggaatggacctgatacagcagcagatcgcccacgaagaggccctggtcggggcggcgcagaatgacgcccgcattgccttggaaaaggcgattgcccaagggtccatcgaccgcatcccgagggcgcgcatcatgttgatgcggatgctccccatcgtgaccgaagcgatcttcgcccaccaggaagcgaaggcggcggggccggcagcaaagctgcggcacctgctgcggatcatcgacgcccaggacctcgcagtcatggcactgcgggccgggctgtcgatgctcatcaactatccaacgatcacagcgacgaagtattacacccacatgggtaagatgctctgtcgcgagatcgaagtgcggttggccttcaaggtcaaccaaccctattacgaccggacgctggactacctcaagaccagcaggactcgcagcgtccggcacatccagaagacgatggacgctcttctggacgcggtactgccggaagaggcacgtatcgacctgccggatggcgactacctgcgcctcggcaagttcattggtgatccgctgatacagtgcggcctgttcgagccgaaccgcttcacaggtcggggcggtacgagcgtccacctggagccgtcgccggaagccaaggagttcctgcaagacccttcggcggcgatgacctggggaggcccaggccgtagcgtgatgctggcaccgccgcgaccgtggaacgactggtgcgatggcggttactacagcgctaaggcgcagaagcaccatgtgctagtgcgccgtaccaagcaccagaccaagcgggcgcgccagatgcagctacgccacctgggccgggacaagatgcccaaggtgtacgaggcggtcaacgcgctgcaatcggtggcctacgagatcaaccacgacgtgtacgagatcatcgagcgcgtcttcacctccggtggcggcgtgctgggcatcccccagcgcacctacccggacaaacctgagttcccgctcggcgacgagtgggccaaggagaatgccagtgagcaagagctggaggccttcaaccgttggaaacgctccgtccaccggtggtacaccggggagcgagagcataccgccaagcttcgcgaatttgctgcactctaccgagttgttcgagagcatcatggcaaggcagtgtacttcccgatgcacgttgactcccgtggccgcatgtactattggggcacaccgaatccccaggggtccgacatcgccaaggcgtgtctgcgattccacgaaaagcgtgccctcggtaagcgcggcctgtactggctcaaagtccacgtcgccaactccctcggatgtgacaaggtgtacttcgacgaccgggcagcctgggtcgatgagcgatgggacgacttccagcgagcactcaacgaaggtccggagaactatccgagtctcttcccggaagacgagtcgcccctgtgcgccatcgcaggtctgctggagctgcgggcggcctacgcatcaggccagccggaggcttaccgaagtgggttcatcgtccacatggatgcaacctgctccggcctccagcactactcagccattctccgagacgagatcggcggagcctacgtcaacctgctgccacctggacttgccaaagctgacatctactcccgagttctcggtctcgttgcagagtctctggcacgagacagagaaagtgctgaaggcgaggctcggggctacgctgtattgtgggataaggctggtctatcccgaagcctgacgaagaagccctgcatgacgctggtatacggcaccacgttcaagggcgtggtagaccactgcctggactacctggacgagtccggcctggagattcccgagggtatcccgtcataccgcctgggaagctacatggcaacgctcatactggacgcaatacgcgagacagtaccatcggcagtcttcgccatggaatggctccagcggctcgctaaggcccttcctgatgcatccaaggatttgcactggatcacgccactcggcatgcaggtgttccagtcgtacccgaagaccgaggaggtgcgggtgaggctgcgggcagaggctgtcgagtacgtcaccctgtacgaggccaaggacgagctggacccggtacgcaacgccaacggcatcgctccgaacttcgtccacgggctggacagcagccacctgggcctgacggccctggcctgtgcggcagagggtatcccgatccaggccatccacgacagcatgggcacctatgcggcagacgtggatcggatgcacgtccacatcagggagcagttcatcgccatgtacagcggcccctgtgtgctcgtagaactggcaaaacagctcgggatagaggctaccccgccccggagaggatcgttgaatctggaggctgtacgggactcctgggcgttcttctgctgaggggattatgtcacccacataggagcaagtgcatccgtccaaggccctcgtagaggggagcagggagaaagaggtcagggaagaccagagggtagaagaagagtagaggtagagtagaagatgagactagatgactacgaaggattctagatagaatagactaaccagcataggagatatgatagatggctactatgaagacccaccgacctatggttatgtcacccacagtggaaggatcgagaacaggcaagggtacggcccgtcctgtcacgttcacctctcagcagatcgagtggttagagcagaccttccccgaacatcagatcggtcctggaaccacgatggaagacatccagttccaggccggtaggcgagacgtggtgcgagcagtacgcctgcgccgacgcgatgccatcgcagtggagttgaagtgatgaacaagtccatctggcgagtccacgcaaaggccggcactccctcggaactccaggggctgtgctggctggcaatacaggagttggaagaattcaccctcttccgctcgaaagacgacgccctgaatgcgatgctggacagtatcgagggcaacgatcgaaccgagctgttggtattccgcgatggccagttggccggcggtgcctgcattgtgttcgaggacgatccccacgtcggcccgtgcgtcacagcacagtggcagtacgtcctaccgcgctaccgcaatacaggcgtggtccgggagttcatccgcgaactccaccgtcaggccggctggggtcaaatccccctcgtgtgctggagccatcgtgaaagcgatagccggtacacgatccactaccggagagccaagccttatgggcaagaaagtaaagaaggtgctgggcaagaccatcatcggcaaactcgctgatggcctgctgggcaccgacctgagcggcgcacaatccgatgcccgcaagatggaagagcagaaccgcctaatgcaacagcaggcggaccagctcgcacgaaaccagcaggttgacctcaccgccgagaacgtggcgcaggttgacctaggagcgatggccgatgccactggcaccggcacgcgacggcgccggaatcaggcgggcacaggcgtatcgcaaaccctcggtatcaactactgacgaggtacgccatgaaaaccaccgcagctatgctgtgggagaaacttcgggatgggagcgtggagagtcgagccatcgagttcgccaagaccacgcttccctacctgatggtcgatcccatgtccggcagccggggagtcgtagagcatgacttccagtccgccggtgccctcctggtgaacaacctcgccgccaagctggcgagatcgctgttccccacggggattccgttcttccgatccgaactcactgatgcgatccgccgcgaggccgacagccgggacacagacattaccgaagtgaccgctgccttggctcgggtggatcgcaaagcaacacagcgcctgttccagaacgcctccctggcggtcctgacgcaggtgatcaagctactgatcgtgactggcaatgctctgctgtaccgagacagcgccgccgctacggtggtcgcatggtcgctccgctcctatgcggtgcgccgggatgcgactggccgctggatggatatcgtcctaaagcagcgctacaagtccaaggacctggatgaagagtacaagcaggacctgatgcgcgcaggacgcaacctgtccggttcaggtagcgtggacctgtacacccacgtacagcgcaagaggggcacggcgatggaatacgccgagctgtaccacgagatcgacggcgtgcgtgtgggcaaggagggccgctggcctatccacctgtgcccgtacatcgtgccgacctggaacctcgcccctggcgagcactacggtcgcggccacgtcgaggactacatcggcgacttcgccaagctgtccctgctgagcgagaaactcggcctgtacgagctggagtcgctggaggtcctgaacctcgtggacgaggccaagggtgcggtagtcgatgactaccaagacgccgagatgggtgactacgtgccaggtggcgcggaagccgtccgtgcttacgagcgtggcgactacaacaagatggctgctatccagcagagcttgcaagccgtagtcgttcgcttgaaccaggcgttcatgtatggtgccaaccagcgcgacgccgagcgcgtcactgccgaggaagtacgcatcactgcggaagaggcagagaacacactgggcggtacttactcgctcctggccgagaaccttcagtcgcccctggcctacgtctgcctctccgaggtggatgatgcgctactccaaggcttgatcaccaagcagcacaaaccggctatcgagacgggcctcccggccctgtcccgctccgccgctgtgcagagcatgctcaacgcttcccaggtcatcgctggcctggccccgattgctcagctcgatccccgcatctcgctaccgaagatgatggacacgatttgggcagccttcagcgtagacacgtcgcagttctacaagagcgccgacgagctacaggccgaggcagagcagcagcgtcagcaggccgcgcaggcccaggccgcgcaagagaccttgctggaaggcgcttccgacatgaccaacgcactcgcaggagtctgatagatgtcccaaccgaacgaacagcaactgccgccgggcctcgctaacctggttgccaacgtaccgcccgccgccgcgccgacaccgagtcatgtgcaggtgatgccgaacccggtgatccagccgcaggctccggtccagcccggccaggtaggtgcgccgcagcaactggccatcccgactcagcagccgcaacccgttccgaccagcgccatgacgccgcactaccagccggtagcggcacctgccgtgggtcaacccgttgttccgcaagcacccgctcagccggccccggtagctccgccggctgcgggtgcagttcttcccgagaacctggaagtcccgccgccgccggccttcactcccaacggggagatcgtgggcaccttggcagggaacctcgaaggcgacccgcagttggcgccctccatcagctatctggaggcgttctctgacaaactggataccgtccgagccttcggcaaggccgccgagaaccgcgatcctcggttcatcgacgagcactatctgaaggaagttctcggcccggcccaggcgcagcacgtcatcaacgtggccaagggcgtcctgacctatgttgatgcgcagaccaaagccgtcctgagccagacctatgccgccgtcggcggtgaggccatcctgaagcaggctgccggcgtcttcaaccaacacgctgacccggccaccaaggccgccatcggtcggctgatggactcgggcgatgcccaggccatgcagtacgcagcgaagcaaattgtggccttcgcacaaggctcgggtgccgtggtacaggctaccggccaacccctgggtgctgcggcacctgcactggcagctctgagcgctgagcagtaccgcttggaagtatctaagctgccgctgaacgcatccgaagccgagatggctgcgctgcgcgagcgtcgtaaggcaggcatggcgcagggtatctaacgaccctgccctactccggccttaaacccacatccaaaagagagagcatcgtatgagctttttgaacgacctgacccgtccgaactacgctggcaagaacgcggacgttgacatccacctggaagagcacctcggcatcgtcgataagcacttcgcctacacctccaagttcgcaccgctgatgaacatccgcgacctgcgtggctcgaacgtggtccgcctggatcgcctgggtaacgtcgaggccaagggccgccgcgccggtgaagagctggagcgcagccgagtcgtgaacgacaagtggaacctgaccgtcgacaccctgctgtacctccgccaccagttcgaccaccaggacgagtggacccaatccttcgacatgcgcaaggaagtcgccgagctggacggccaggaactggctcgcaagttcgaccaagcctgcctgatccaggtgatcaaggctgccgcgatggacgcgccggtggacctggaagatgcgttctcgccgggcgtgctggagaaactggacctgaccggcctgaccgccaagcaggctgccgacaagatcgtccgcatgcaccgccgcgtagtcgagaccttcatcgaccgcgacctgggcgatgcggtctactccgagggcctgaccccgatgtcgccgcgtgtgttcagcctgctgctggagcacgacaagctgatgaacgtcgagtaccaggcaaccggcgcgaccaacgactacgtgaagtcccgcgtggccatcctcaacggcgtcaaggtgctggagactccgcgcttcgccaccaaggcaatcgcagcccacccgctgggccgtcacttcaacgtgagcgccgaggagtccgagcgccagatcgccctgttcctcccgagcaagaccctgatcaccgcccaagtggcgccggtccaggccaagctgtgggaagacaacgagaaattctcgtgggtcctggataccttccagatgtacaacatcggtgcccgtcgtccggacaccgctggtgccatcgaactgaagggtatcggcgccttcgacatcaccgcgtgatgccacgaaaccccgcacttcggtgtggggtttcttcaaagcctaacgacccgcgcagattccctgcgtgggtttttgcgctttaggagaaaccctatgctactactcgacgcagtgaatgtcatcctgcgcaagatcggcgagctgccgatcccgagcatggatgagacgtatccaaccatggccatcgccctcccggagctggaagatcaacgcatccagttgctgacccaaggctggtggttcaacacctggtggaagcacaagctgacacctgatcccacgggccgcatcaacctgcccaagggcaccttggcattctacccggattccccggacctccagtgggacggcctgggagtgcgagatgccaacaccggcgacgaccgcatcggtaagtcggtcgagggccgattggtgctgtctcgggagtgggaccgtatcccggagatcgcacagcgcgtcattgcgcaccaggctgcgctcgcggtatacacccacgagattggaccggacgagaccgcccaggtcatcgcccaggaattgcaggcgtatcagaacgaactgtcccgcatgcacacccgatcacgtccgctgaacacccaggccaagcgtagcttcagccggtggcggcgcagcttgaggacctgagcatgagctacaagcaatccgcgtatcccaatctgctgatgggtgtgagccagcaggtgcccttcgagcgcctgccgggccagctcagcgagcagatcaacatggtatccgatcccgtgtcaggacttcggcggcgcagcggtatcgagctgatggcccacctgcataccgaccagccctggccgaggccgttcctctaccacacgaacctcggtggccgcagcattgcgatgctggtggcgcagcaccgtggtgagctgtacctgttcgacgagcgggacggtcgcctgctgatgggtcagcccctggtgcatgactacctcaaggccaacgattacaggcagctacgggccgccacggtggccgatgacctgttcatcgccaacctgagcgtgaagcccgaggccgaccgcaccgacatcaagggcgtagaccccaacaaggccggctggctgtacgtcaaggcaggccagtattcgaaggcattctccctgaccatcaaggtcaaggacaacgccacgggcaccacctacagtcacacggccacctacgtgacaccggacaacgccagcacgaaccccaacctcgctgaggcaccgttccaaacgagcgtgggctacatcgcttggcaactctacggcaagttcttcggcgccccggagtacgccctgcccaactccacgaagaagtacccgaaggttgaccctgacccggctgcggctacggtagccggctatctcaaccagcggggcgtgcaggacggctacatcgccttccggggcgacggcgacatcgtggtcgaggtgtccacggatatgggcaacaactacggcatcgcgtcaggtggtatgagcctcaatgctacggcggacctgccggccttgctgccgggagttggcgcccctggtgtgggggtgcagttcatggacggcgctgtcatggccaccggctccaccaaggccccggtatacttcgagtgggattccgctaaccgccgctgggcagagcgggccgcctacggcaccgattgggtcctgaagaagatgccactggccctgcgctgggatgaggctaccgacacctacagcttgaacgagttggagtatgatcgacgtggctccggcgacgaggatacgaaccccacgttcaacttcgtcacccgaggcatcaccggcatgacgaccttccagggtcgcctcgttctcctgtcgcaggagtacgtctgcatgtcggccagtaacaatccgcaccgctggttcaagaagtcggcagccgcgctgaacgacgatgatcctatcgagatcgcggcccaggggagcctgactgaaccgtacgagcacgcggtcaccttcaacaaggacttgatcgtcttcgccaagaagtaccaggccgtggtccccggtggcggcattgtaactccccgtacggcggttatcagcatcaccacgcagtacgacctcgataccagggcggcacctgccgtgactggccgcagtgtgtacttcgctgcggagcgtgccctgggtttcatgggcctgcatgagatggccccgtcgccgtccacggacagccactacgtcgccgaggacgttaccagccacatcccgagctacatgccggggccggctgagtacatccaggcggcggcctccagcggctacctggtgttcggcaccagcacggcggacgagatgatctgccaccagtacctctggcagggcaacgagaaagtccagaacgccttccaccgatggacgctgcggcatcagatcatcggcgcgtacttcaccggcgacaacctgatggtcctgatccagaagggccaggagatcgccctgggccggatgcacctgaacagcctgccagcccgcgagggtctgcaatatccgaagtacgattactggcggcgtatcgaggcgaccgtcgatggtgagctggagctgaccaagcagcattgggacctgatcaaggatgcctctgccgtataccagctccagcccgtggccggtgcctacatggaacgtacccacctcggcgtgaagcgcgagacgaatacgaaggtgttcctcgacgtgcccgaggccgtagtcggtgccgtgtacgtggtcggctgtgagttctggtccaaggtggagttcactccgccggtgctacgggaccacaacgggctgcccatgaccgcgacccgcgcagtgctccaccggtacagcgtgaacttcggatggactggcgagttcctgtggcgcatcagcgacacggctcgacccaaccagccgtggtacgacacgacgccccttcggttgttcagccggcaactcaatgccggggagcctctggtggatagcgctgtggtgccgctgccggcacgggtcgatatggccacgtccaagttcgagctgagctgccatagtccgtacgacatgaacgtccgggctgtcgagtacaacttcaagtccaaccaaatctaccggagggtgtgatggctttctggctaccactattggccgctggcggcatgtcagcccttcagcagggtatggccaacaaggaagagcgcaagaagatcaaggctgagaacaaggctcgactgaaggcggacctcgacaacctgggcgccgctgcccgcgacatcgccaacctgggcgtcatggccgctagctaccgcaagcaggccgtggcctcgcaggtggaggccaagcgccaggggatgctcgccggcggcagtgccgaggctcaggccggcgcgttcggcgtcaagggtgcatccgtggatgcggtggccctggacatcgagcgcgaggtcggggaggccctgatccagattgacgacaacctggacaaccagatgtggaacctcgccgagcaggcgcactccatccaggctcaggcgaaggccggcctgctggggcagaagagtaccacggcggggcaacggtccccgctggtggccggcctgatgtcggcgggttccctgtacgcaagtcaatacttcaagttcggcgccacgcctaaaggaggcaactgatggcggaatcgcaacgtgcttcccaagagcttgggatcaacgtcggacagacgcaactccagccgggccagagtgctcggcgcggagtgcgcgactccgagatcaactacagcggcccgagcgtaggctcgcagattctcgacggcatcctgggtgccggtcagcagatcgctggcaaatggttcgagcacaacgtgcagcaggaagttctgcgcggtgagcgtgcccgtatggccggcgaggctgaggaggcagtagacagcaacgtactggccaaaccattcgtgaagggcggctggcgcaagcaggactaccgcatcgctcaggccgacttcagcctcaagatgcagcgattcatcgccaacaagggccgggagatgactcccgaggagttccgcaagtacctgtcccaggaggctacgcacgtcctggattcgaccgagggcatgaaccccaacgatgccttacaggcgctggcgcagcagcagaaggccgaggaacagctcttcggcatgcaggctaaggcgtacatggactggtccatcgaccaggccgcccgtggcttccgcacccagggtaacagcatcctggccaaggctgtgcaggctcaggccaccggcgacgaactgtcccggcagctcagcctggaagaggccggcctgttctataccaacatcatgacctccgaggatatcccgctggaggtgcgcgacaaggtaggcatgcagttcctggcggccagcctggacatgaaccagcggggcatctatgagggcctgcgcgatgccgggttcctggacagcatgtccttcgatgatcggcgtgcgctcaacggcctctatgaaaagtcgaaggctcagacccgcgccaaggaatcgatggctaccctgcgggccgacgcggacttccagcagcgggtggccaacggcgccatcacagaccttgccgaggttgaggcgtactcacgaggcatggtcgaggagggccgctggagcgacgctcaggccatctcgttcatgaccaaggccatgaccggcctgggcaacgctcagcgcatgcagggcatcatggcggccttggaagccggagacatcaacgccctccacacgctgggtaccaacgtcaccgaggcgctggagcagtgggacaagatgcaggccgccaacggctcaagcctgactgaccgtctcgtgcagggcacacagctcggcctgcgcctggggaccttccccaagacctacggcgagtccgtaggcagcgcggtgcgcatgatccaggccgccaaggaaggcgaggcaaacccggagctggtcaacacgctgaacagcatcttcgaacaggtggcctcggcccaggagatcaacccatccgccggcaacgtgatgctatccggcatcccggaagccgagcagggcgccgtggcctgggcactcaagcagatgaagatgggcatcgcaccagctcaagctctgcgcgagtttagcgccaacgccgaagtcgtgaagcagatggacgagttcgagaaaggccagaacaccaaggcattcaaggacaacctcggtaagcaggtcaacgacaagttcgtgaacaacatcttcggtcgagcctggaacatgctgaccggcgagagcgacctgagcaacaacgaggccgtcctgagcatgtatcgccgggcgaccatcgacgaggcgaactggctggccagcgaccgcaagcatgcgggtctgctcaccagcgacacgggccgcgaggccctgctggagatcgccgccgccaacgtgcgtaaccgcaccatccaggtaggcgaaggtcggaacctgaaggaaggggacctattcagccgccgcgatagcgcgccgctgatcctgcctcgcggcaccaccgccgagcagctattcgggaccaacgacaccgagaccataggaaccgtcctggccgagcagcacaagccgcatgtcgaaggactcctcggctacaagtcggtagtcgccttcgagtacgaccgcaccagtggcagcctcctggccgtcgagtacgacgagaacggggtcgccctggaccgcacccgtgtggacccacaagcggtgggcaacgaggtgctcaagcgcaactccgacaagctgaacgctatgcggggcgccgagtacggggccaacgtcaaggtcagtggcacggacattcgcatgaacgggggcaacagtgccggcatgctgaagcaggacgtgttcaactggcggaaggaactggctcagttcgaggcttaccgaggggaggcgtataaggatgccgatggttatagtgtgggcctggggcattacctgggcagtggcaatgctggggcaggcactacagtcacgcccgagcaagccgcgcagtggttcgccgaggacaccgaccgcgcactcgaccagggtgtgaggttggccgacgagctgggcgttacgaacaatgcctctatcctgggattggccggtatggccttccagatgggcgaaggacgtgcccggcagttccgtaacaccttccaggcgatcaaggatcgcaacaaggaagccttcgaggctggtgtgcgaaacagcaagtggtacacgcagacgcccaaccgggccgaggcattcatcaagcgcatggcgccccacttcgatacaccgagtcaaatcggtgtcgattggtacagcgccgcaacagcggagtaagacatggcaaagcaattcaagggccgcatgacgcccaagtatccccttgaccaagcacagctcgacgaggcccaagtacagggccaacttgacgcggtgcctaccgtggggttcgacgccctgacgggtggcgagatcggagaacggaacgtggcagcgggccaacgagccaatgcgcgggaactggaacgcatcgtagcggaccaggaactgccggcccttgaccgtgcttccgcactctggaaccagtccaccctcgtcggacgctggggcgatgcgctccagctcgacgcagaccttgcggcgaacagtaccggcgaggtggaccctaacttcgacgctgggacctatggggtccaggcgctccaggcggcaggtatccagccgactgacaactatctccagatcatggcccgtgccggcaatgccgaggacgcggcctacctcctgtcgaggattcaacggtatgagcaggacgagcaaatcgtgcgggacaacccgtactggaacttcgcggctggcatgctggaccctgccgctctggcagttgatgcggttactttcggcgctggccgtgctctgcggctcggtcgcgctggcatggctgctgctggcggcgctgggcaagtcgggtatgttgctgggctggatgccgcaggggccgacgtggatgccggaacctacatcatggctggtgctcttggcgctggcgtgggtgctctgctggggtctggtgcgggacgcattgccgcagaggccccaacgcaaccgcatgtgcccgaagtatcggcgcctactgtcgggctgccagaagtagccatgaccgccgaggaggccgcagcacgcggcttcaaggcaggtgacgtggtagacctgctggacgagggcactgtgctatcccgtgtcagtgcccgcgtggagcaggctgagataccggctattccgcgacgtgacactgccttcggcgacgagctgcatagcctgtcgggccggaagctgtctgaggtcctggaccacctcaagacccacgcagaggtgcccaagccgctccagggcatcgccgccaaggtggctgatactatcaggaccctggagggcctggggcagcgtaccgcgttccgtgtggtgcagggcggtgacactgccagctctgccttcctcaaaccgggtacggcggggattcactccacccagggcctcgacaccttggtccaggtacgcggcagcaccgcacctggccgagttggcaccaacccggtgaccgtgctccacgaggcggttcacgctgccaccgtgggcgtgatgaacgccgccttgcggaatcctggcgcgatgagtccgaaggtggctcaggccatgcagaccctggagaacgtccggggtaacgtgctcaacgccctgaagcaggaccgcgccgccggtcggcaactgtccgagttcgaagagacgctgctagccggtaactccaacaccctggccaacgtcaaggaactggtagcctggggcctgacggatacccgcttccaaaggaccctgaaccgcctccgctacagtgacggcgggccgggcctgtggtcccgcttcgtggagggcatccgcaccctactgggtctgcggtccgatgctgacacggccctgagccgcgtcctggccgcctctgagacgattatggaggccatgcccggctacactaaggcgcaggccaagtgggccaacaagggcgctccggtaaccgaggaggccagcctggagaccatcgtgcggaccacccgtgaacgtgcccgtgagggtgccggcttcgtgaacaggttcttcagcgaggcagacctcctggcacagcctggggagggcgcacggcgactcctgagccgtcttatcgacgacccggtacgtcgggatgggttcagcacgaacgacaacgcagcgagctatctccgccgctatcggaacgagttcgagggttacgtgaagtcctacgacgagatgatggccaaggcaatggctgagcagggtgtgggcctgacggcacgtgcgctgaactcccgccgcgccatggcagtccgggaccagctcaacgagcaggtcacccgcgagctgctgcgccgggaccgcgagtggacggcctacggcagcgtccgtgtggacccgaacctgccgccgaccatcaaggccctggccgaccgctcagacgagattcacggtctgatgggccagcgcgccagggaagccggtgtgcgtggcttcgaggacttcgctccccgaccggggtacttccaccgttcatggaactggtcgaagatggcgcagatggacgaggccgcccctggcctggcccgccgcgccatcagcgaggccgtgttccgtggcatccctgggctggagcgcgccgatgccgataccatcgcacaggccattgtgcagcgggcgcgggatcgggccaccggaatccgctccgagttcatgggcgcgatgggcgtggcggacacggcattcatccggcaggcgctggaggaggccaacgtgtcccaggccaagttcgacagcatcatggccaagatcgagcagaagcagtccgaccagggcaccgtcaagtacggcaagggccggctgtcgctggacatgaccgcagagatcaaccacaacggaaccgtgtatcgggtgcaggacctgatcgaccgagacctggaccggctgatggagaactacgccggcagtatgtcgggccgctcagcattggcccgcgcaggcatgccgggggactcggagatcgaagccttcatccgggagtaccagcgagaggcagcacacctgggcaccgataaggtgcaggagctgacggggcaactgcggggagtcttcggggacttcaccggcaacgtgccgagggagcatcagctcggcccggttgctcagcgggccagcggcctgaccagcgccaccatgctgggattctcaggcgtgtatcagctcgccgagctggccacgatggcgcaccgtcaaggcgtcttcaacgtcatgaaggccatgctgaact

SEQ ID NO: 11 - DNA, 42717 bp, unidentified
  source 1..42717: mol_type = genomic DNA
ataccgagggtttgcgatacgcctgtgcccgcctgattccggcgccgtcgcgtgccggtgccagtggcatcggccatcgctcctaggtcaacctgcgccacgttctcggcggtgaggtcaacctgctggtttcgtgcgagctggtccgcctgctgttgcattaggcggttctgctcttccatcttgcgggcatcggattgtgcgccgctcaggtcggtgcccagcaggccatcagcgagtttgccgatgatggtcttgcccagcaccttctttactttcttgcccataaggcttggctctccggtagtggatcgtgtaccggctatcgctttcacgatggctccagcacacgagggggatttgaccccagccggcctgacggtggagttcgcggatgaactcccggaccacgcctgtattgcggtagcgcggtaggacgtactgccactgtgctgtgacgcacgggccgacgtggggatcgtcctcgaacacaatgcaggcaccgccggccaactggccatcgcggaataccaacagctcggttcgatcgttgccctcgatactgtccagcatcgcattcagggcgtcgtctttcgagcggaagagggtgaattcttccaactcctgtattgccagccagcacagcccctggagttccgagggagtgccggcctttgcgtggactcgccagatggacttgttcatcacttcaactccactgcgatggcatcgcgtcggcgcaggcgtactgctcgcaccacgtctcgcctaccggcctggaactggatgtcttccatcgtggttccaggaccgatctgatgttcggggaaggtctgctctaaccactcgatctgctgagaggtgaacgtgacaggacgggccgtacccttgcctgttctcgatccttccactgtgggtgacataaccataggtcggtgggtcttcatagtagccatctatcatatctcctatgctggttagtctattctatctagaatccttcgtagtcatctagtctcatcttctactctacctctactcttcttctaccctctggtcttccctgacctctttctccctgctcccctctacgagggccttggacggatgcacttgctcctatgtgggtgacataatcccctcagcagaagaacgcccaggagtcccgtacagcctccagattcaacgatcctctccggggcggggtagcctctatcccgagctgttttgccagttctacgagcacacaggggccgctgtacatggcgatgaactgctccctgatgtggacgtgcatccgatccacgtctgccgcataggtgcccatgctgtcgtggatggcctggatcgggataccctctgccgcacaggccagggccgtcaggcccaggtggctgctgtccagcccgtggacgaagttcggagcgatgccgttggcgttgcgtaccgggtccagctcgtccttggcctcgtacagggtgacgtactcgacagcctctgcccgcagcctcacccgcacctcctcggtcttcgggtacgactggaacacctgcatgccgagtggcgtgatccagtgcaaatccttggatgcatcaggaagggccttagcgagccgctggagccattccatggcgaagactgccgatggtactgtctcgcgtattgcgtccagtatgagcgttgccatgtagcttcccaggcggtatgacgggataccctcgggaatctccaggccggactcgtccaggtagtccaggcagtggtctaccacgcccttgaacgtggtgccgtataccagcgtcatgcagggcttcttcgtcaggcttcgggatagaccagccttatcccacaatacagcgtagccccgagcctcgccttcagcactttctctgtctcgtgccagagactctgcaacgagaccgagaactcgggagtagatgtcagctttggcaagtccaggtggcagcaggttgacgtaggctccgccgatctcgtctcggagaatggctgagtagtgctggaggccggagcaggttgcatccatgtggacgatgaacccacttcggtaagcctccggctggcctgatgcgtaggccgcccgcagctccagcagacctgcgatggcgcacaggggcgactcgtcttccgggaagagactcggatagttctccggaccttcgttgagtgctcgctggaagtcgtcccatcgctcatcgacccaggctgcccggtcgtcgaagtacaccttgtcacatccgagggagttggcgacgtggactttgagccagtacaggccgcgcttaccgagggcacgcttttcgtggaatcgcagacacgccttggcgatgtcggacccctggggattcggtgtgccccaatagtacatgcggccacgggagtcaacgtgcatcgggaagtacactgccttgccatgatgctctcgaacaactcggtagagtgcagcaaattcgcgaagcttggcggtatgctctcgctccccggtgtaccaccggtggacggagcgtttccaacggttgaaggcctccagctcttgctcactggcattctccttggcccactcgtcgccgagcgggaactcaggtttgtccgggtaggtgcgctgggggatgcccagcacgccgccaccggaggtgaagacgcgctcgatgatctcgtacacgtcgtggttgatctcgtaggccaccgattgcagcgcgttgaccgcctcgtacaccttgggcatcttgtcccggcccaggtggcgtagctgcatctggcgcgcccgcttggtctggtgcttggtacggcgcactagcacatggtgcttctgcgccttagcgctgtagtaaccgccatcgcaccagtcgttccacggtcgcggcggtgccagcatcacgctacggcctgggcctccccaggtcatcgccgccgaagggtcttgcaggaactccttggcttccggcgacggctccaggtggacgctcgtaccgccccgacctgtgaagcggttcggctcgaacaggccgcactgtatcagcggatcaccaatgaacttgccgaggcgcaggtagtcgccatccggcaggtcgatacgtgcctcttccggcagtaccgcgtccagaagagcgtccatcgtcttctggatgtgccggacgctgcgagtcctgctggtcttgaggtagtccagcgtccggtcgtaatagggttggttgaccttgaaggccaaccgcacttcgatctcgcgacagagcatcttacccatgtgggtgtaatacttcgtcgctgtgatcgttggatagttgatgagcatcgacagcccggcccgcagtgccatgactgcgaggtcctgggcgtcgatgatccgcagcaggtgccgcagctttgctgccggccccgccgccttcgcttcctggtgggcgaagatcgcttcggtcacgatggggagcatccgcatcaacatgatgcgcgccctcgggatgcggtcgatggacccttgggcaatcgccttttccaaggcaatgcgggcgtcattctgcgccgccccgaccagggcctcttcgtgggcgatctgctgctgtatcaggtccattccgtctcctatcgtctttcgattacgcgcccgatatcctcgggaccccactcggcctcggccaggctaaccgccccatccagcgtcatcgctcggtagtcacgccattccccgcagctcagaatctcagcgcggaaccagcgcagttccaccagcttcacttcccgctccaggcgctccgccatctcccggagaatgtccgggagtatgacatcgctccagtcctgatggctgaccatcgccggcgtgatgtacgctgtgacgtagttgaccccgatgccccgctcgttgaaggcccagatgacccgaacaccttcatcggtctcgtgctgtcgggtacaccaacagattttactcattacctttctcccggtccatcagggcccgctcggcggcggccattgcgttgaatgcctcatgcaccaggtgcatcaggttggactcgtcatccagcggtccgtcgatcagccgcttggactcgtgccggtgttgggcggacttgaactcgcccaccgtcatcttcttccagtcgtgcggcagataccccttgacctcggcagcccattgcatcattcgagcaagctcccgcttcagcagcgggaacccctcgactaccaggtgcatgggaagcttaccgaccttgcgttcttccagactcgcacctttgcggtacggttcagtcgtgatcgtcgactcgtaagagtccgggaatgctaggctcatgctacctccttagttgctcagcagggctttgcgctgttccgaggtgttgcgggtgtaccgcccccggctccagccaccacagccgccgcagtgatagtgctcgtacttgccggtctgcgtatgcacccagccctcttgcttgacatccgtgtcgccgcacttcgggcagcggatggtcggctcggcgtcattgaagtacacggccacgttgggatggccgacgaaccacgggcgcatcagggtgtacagctcctccatcgatcgtacgtcgtcgatgttgtacaggcgcatctcctcccaggcttccgggttgtcctggaggcaggctgcccacaggtcgaatccggggaacttgccgtggaggcgcttcttgatggtgcatgccttgtgggtcatgtactccagcttgcggctggtgaacgcgaattgctgcttggcgatgatcaaggtgtcgatcaccttgaacggtctcggcggcggcatcttgttcaggaagaaccgggcgttgatcttgggcacgtcgaagcgcttgccgttctggacgatgatgatgtcggcctcgtccagcagcttatgcagggcgaccagcaggtgcatgtcgtccagggggtcaccctggcagtccatgtagatcacctcgtcgctgtgcatccacttcgcacagaacgacaggatggtccagtcccgcttgatctggttgaggcccacgttctgcttccagagcgaccagacccagccctcgataggcgaggtctcgatgtccaggctcagcaccttcggaccctggcctaccacgttgcccacggcgccagggaacttgcgcactacctcggcagccttgcggcccagccagtgcatcgcgcccttcttggcgtacatgccgcgcgtcctgctgtcgtggaagcccagcttgatgcaccagttgcggaagcactggcggctcacctcgccgaagcgcgaatgctcggtcaggtgctcggcacccttcttgaggcccagctcgacatagacgtttcgcaggtactcattggtgaattgcttgcggagtttgctcatacgttcctcgcgttgtgctttgcgacggccatcgccgccttgcgtttggcggctgcctgccggcgcttggccagcttcgcttcgtgtttctcctcgtcggtcttgtgcagggggtagatcagcggatgcttcggcccctccagatacgtcaggagggcacgaaggtaggggatgatgtcggaatacttcatcgacttgcatccccaggaacctgccgcattcgttatcttgccttctgcggtgttacaggaccggtgcaggacgccccgcaccagccccgtttcgtggtcgtggtccatcaccgcttcgcccttcacgctgatatcgatgggcttgccgcagagcgggcacagcttgttctgctcggcccatagcttcagggtgaaggtgcgctgttgactgcgcggtatctggtagaccttcggctcactcgtcataatcgctctccctccgcttctggagcagcgcctcgtggtaggcgtccagctcgatgatccactggcggaaggccggacgaaggtcgcggcttaacagatactgcgctgcgttgtcggtaggcgttcggcgcatccacagcacctcggcctctgccagcgggttttgcttgatcttggcgtacgcctccaggatcatgtcgatggcctcgtcctcatccgtgatcggatggaggatgtcgaaggccgtcttcataccgcagagcttaccgttgaatcgatcgatccctcggatgttgtcagcggtgtcgccgccgagccactgcgccaagaagaacttccgtccatggcccttgagcttgaactggccggaaggcgtgtacgcttccttgaggtagccgaatccgccctcgatcctgctcacacacgccgtatcgatctcccaatacgggtagatcgtcatccgcaggtctttgtcgtcggaccggatgatggccttgtcctgcatggcgtaggcgtccatcatcatgccgtcgtccgcctcgaagaacgtgtgcaggatgacatcgatcccctccggcgccccgcctcgctcatgcacgtccgccacggcccgccgcagtggctccagcagcgcgggctttgccttgcccttgcgctggccctggtacggtttcatggtcggatacgtgtcgcggtacgccttcgccccacctgctgccgtgaggtgaacccgtgtccctgtgcagtgcgctaggaactgctgctccaaaatgagcttccagaatcttcggagtgcagtgtccagggtcttagcagtggccgcagccacataggcgggtccgtcggcgtcacacaccaacgtcccgcctgccatgctgcggtcgaactgcgcggatagtcctgccaggaactcttccgatggcaggcgcattagacctgcggtactgccggcactaccgggaccgccgggacttcgaccgctgccggagccgccgtctgagccacctggggcacgtcaggcagcacgttctgtgcctcggcagtacctaccacaggggcggccacattcgccacctggggcacgctgggggccgtctgagccactgcctggggaacagccgggacagccggtgctgccgctacgccggcgtcggcggccacgttgggcactgccggcaggttgctgcctgcggcctgggtcgtcggcttgatgatcagatcatcgccgccgcccaacatgatgtgcagggccgagccggggaagttggtggccgagcgaatggtctcttgcaggaagttcttggacttgccgttgtccgaggtgccttcgatgaacagggcgtcccaggtctccttggtcggcgcgtcgaagaagaaatactgcaacaggtccatcggcagttccggcacgttatacgggctgccatcgaccgggttatagggcttcatgatgccgccccaatcgatgtcgttgcgttccttaccggcgttgttgcccttggtgatcttggtgcgcttgatcgggatgatgaacgcctggccgagcatctgagcgaagtgggtatgctgcccgctccagttcatcttgtcgaaggccagcttggtcttggacttttcgttgttgccgagggtcatctcgaaggtacggaacaggccgggcttgatcgagccgtcggcctcgtaggtgtggaacaggtcgtccgggcggctctgcgggttaccggcctgcgggttcacgtcgccccacaatgcgaagcccaggcggatttgaggcgccggattcttgagcttgccctggaattccttggcgtggtcacccagctcgatgtagatgcagaagcggcccatggcggtgcccgccgggaagatgcgaccgccgccaccgccggtggaggtttcggacatgtcgatggttgcggtctcggcagccttgttggccagggcgagggcggcttgcagagcgttgagttgttgagtcatgcgtggtctctctcgtgtcgaatgaagatttaaggccggagtaggctagggtcggcctagtcccggatcacgtccatgttgaacatgttgggtcccatctcggccaccgccgggaagggaacgtccgcgatgtcgtagcccaatcgctcgctcatgtagcgggcagcgtcggccatgatgtcgcgcacgccacggttgacctcggcggcggtgtccttgtggcagtcggtgtacacggcatcgtgtacgttgttgatcaggaactcggtgaccataaatcctgggcgatgcagcatccaacggaagatgcgccctacgctcacggtcatcatgaacccagcctcgccctggttccagtagttggcgatctgcgtgtccttgaagtccatgaccgtcttgcgctgttccttgtcccagcgctcctgttggcggaagctgtagcaggtgccaccaggcgcttgccagaatccccggcggtactggcgccagttgccatccggccccatctcgctgaaggcgcctgccggcatctggtcctcggccttgtacattacgaggctggtggcctctgcactgtcgcggacgatctgccggaatgcgatggactctgggaacagggccgcctcgttgtccaggaattcctgggcctcttccacggtacagccggtgttgaatgcgataccagccgcactcgcgccgtactgcgccgagaatgccttgggcttgatgttctttcgagcctgcatcatgcgaccgtgccacgggtggttggggtccttcttgatggccacgagctggtcgtagtcgaacccgttccagttgttgtgcttccctgccaggcggtacaagtgcatgtcagtgccggccatcagtttcgccaggaggttccgatccttcgacagggccgccaacatcaccacctccagggcggtatagtcggtctcgccgatcatcccgtccgcgccgaagcgagacacgaacatctccttcacgcggctgccggcttccgggtcgtcctcgtccttcgacgggagctgctggaggttcgggcggctggacgacagacgcgttgtcgccgtcgccgtcgtattcagcgaatggtggatgatgccgtcgtcgtccacgtactggagcatccccttcgtgtccttaatcgtcccatccttgttgtaggtgtgggtgatgtagaacgaggagttgtccttgtgcagctcggccaggcgcatcaacagcttggccgcctcgaagccctgtttctccagagccttgagggcgtcgccgctggtgctgaacacgggcgacccatccgccagggtgagggcgcactggaactccgggcgtttgcccaggaatttctcacgcactacttccggaaggttggtcaggttgatcaggccggggaaccggaatcgctggtcatcatcccacttggtcgccgggatgtccgtatcctcccggaacaccttgacgctgcccttgttcttgccagcggagaacgtgatgaccgggccgtgcttggtcgccagctcggtgatggtgggccagtgccactcaccctggtcggtcacttcatggatcgggacccgaactgaggtactctcgattggagtcccccgcttggccgtaccgaagcgcacgaagtcggctttctccatccggccatcttcgtatggcacccggcccttgtaccgcacctcgccaccgtagagccatgcgctcatatggtagaggctggtatacttgaactcgaagtattccgggaagtcgggcatcagcttcttcagctcggcctcgatcccggccacctcttccagttgcttggcgtggttcaccttggcgacttcgaggtccaccttcaggccggcacactccatcgccgagaaaccgatcagggcctcgcagcgctccaggtagccagcccacatgccacgggcctgaagcttcatcagctggccgtagaacacgagggcggtattctcgatgtcgccgcacgggccggacaggtactcgctcagcaggtcctggtccatctccgaggtgagcacaccctggtcccacagcatcttgatgccgtccaccttgtgggtgccgccgtacttcggagccagctcgtcgagtgccgggtacagccacgtctgatgactcagcagatactcggcttgctgggtacaccagacccggccaccgcgtcgcaagaaggccaggtactcgtcccggtagcgggtgaagaaccagttcgattcgaacatggcattgtgagctacgatcacgtccacgccgtcgaggttgaaccagcggttgttcgggtcttcggcttcggcccggctgcggaagcgatgttccaccttctggccgaccttgccgtcaacatcgtcccgccagccggccatgacgatgtagttgcgggggtcaaagggcgacgccttgcgccccttgtgctcgtagctctcggtttcgaggtcgaggattcggatagtcgtcatttgctgtaccagttgctttgactgtactgctgcgccttgaccagtagaccttccagcacacggcggggaatctcctgcatcaggtagcggaccattccttcacgtccccatatggtcagttggtacagggagaccgcgtggcagaatcccatacggcccagcttcgcatggtcgtagtcaattcgaatcgacagctcttccgcttgcgggtccatatgggccttggtgcggaggccggggaacagcaggtccaggggttcgtggatatccgccagcaagcagcggatcatgcgttcttcctcggtgggcattctcatactttgactcctacctgtcgcagattgcgacgcagacgtcgcatgacccggtgcaacttacggcgaccggcgccgagggattggatgtcccgcgcatgatgccgaacttcggacccaacgtggtcccaagtccctgccatgacgcagatgcggaatgttccgtcctggctgatgaacacggaacccatgacgtacttcggatacagcagcgaatcccggttggtggcgtggtataccatatcttccgggtagttgcggttatgggactttcgaatcttcataccttcactccagggttactggccaggtcgcggaagcgactgaagctgggatggcggagggtgttggctgagcgttccatcgcggagacctcggcgatgcgtccatagttcggcatggcctcgtcgatgcagccgttgaggtgggcgcaggtcaggagctggatgtgctcctcactcaggccggtggcgccaacggtgccggaaccatcttccagctccacacggtagcccacgacgcggcccacgttcttgccagtcttgcccatcacgtacccgacgatacgcccgtccacggtgatctccggcttgcgcttgtagcagccagcaaccttgccgttgcggtaggtcaggctcgggtctttctccatcgacccctcgaagcccatggcgcggtggtagccgtaccagcgtagtaccgcctccatagaacggcaggattgtgcggctacctggaagaagtacggggtgtcgccccgccggcaatcttccatgaggctgcggaccatggcgcggcgctcatcgtatatgaggtgggacttgcgcgatttgcggagcacgccgatatgggtggcgtcgaataccgcgaagtgcaggcacttcagctcggcctcggtcagcggggtcttgcgggccatgcgcccggtcgcctcactgaagggcatgccttccaggtacatctcacagtccaacaccagaccggagtccaggccgggctgggacagtttcgcgatgatgcgatcctccaggccgtccagggcagggaagcggcggccgctgcgggataccacgccgtgcgcacccacgatggcacggcacccgtcgatcttaggctcgacgatcacgtacccgtgcttcttgatgatggcctcgacggccttgtcgttctgatctacgccgcgccagatgcctttctcgatatccaataccacgtcgcgcttgctcatcacacgttctcccatccgtagtacgcggccttggcccgcatcttttcgcatcgctccggcagtcgcgagccggaaccaacttccttgttcacgccccaggtaacgtccttgtgcaggtacacacccagtcgcgggccgccctcggggtccggccagttgtacgcgatgcccacttggttgatggtgaagtcgaacgactccatcacccgaccgaggctgtcggcatcgtagtagttgaagtccacgtccatgccttccaggccacggcagcccaccagggatatcacgcccttgaagataccgccctcacctgcgtcggcgtactcggtactccagccaccgtcccggacgaagcgcgggtccagggtaggaagcacgctgttgatgagcacttcagcctgatactgcgtcatgccgtacagggcgatgtccacgtcctttggagtggcgccatgcatgaggtcgcgagggaacccaccggccagggcgacgccctcgttgggccgtgcatcagagtacaggcgcagcaacagggccttgaccccggtcggcagtgcaatggaacccagtggaatttctttggtgccttcgagcacccggctatgcttagcttgcatggtctacactctcaaagaaacgacaccgtgcggcgtcgaagttaatcatagcctccacgttcgaaggcttcccgtccatctggaacttgttcttcggcagggacaggccgcgcatgacctgttgatccgcaccgttgagacggcccaggtggatttgcacgtccacagcaccctgtaccgccgtcttcgaatccttgaggcaggactgcggtgggaacaactggtcgtgaccgtcgttgctgatctgccacgtcatgaagctgatgaagtcgtgacgcaccgccatctcgcggacctcggccaccttgtactccatctcgtcggtgcggttctggtccttgcgctggccacctttgacgtgggccatcatgtcccaaaacaccaccgccggcttcatcgcgtcaatgacctgctcggcctgggccagggacccaccgtggaagtccttgatgcggatcagctcagagtcgccgccgattttctcggcgtacatcctgcgaacctcctccgggtccagggcaagaatctcgcccacggtcatgcccagggctgccgagtacaggcgcggcttgatccgccggcccttgccctcgttgttcagccacaggatgggccgcccagggtcgaagtaccgcttgagctgcggcgcgatatggacagcgatccaggccatgaacgaggtcttgcccgcatcaggcggcgctgccaccagcaccgaggccccggcgtggaggcccttcatgtacgccggaagcaccagccccggcagcttgatgccgtggtcaccctgctcctccgccaggatatcaaacacgtcgtccgtcacatagtcggtcggcgtactgaccccctcgcggcgcagggcctcgtcgctcagccggcgcagctcatacgccaggtcgatgtcttcgccctggttgtactgcgccaggagggcatccaccctgcctgaaaaatccagttcgttgagctgggacacaacgccctgtagcgagtccgggtctaccggcttgtccagttggttgacgaggttcaggaccaccgccagttgctccggctggtagccacctcgcagctttatcagttcgcgtagcgcctgcgggtctaccttctgatgcgctgggtagaccttccagtattgctcgatccagtcgatgacaaagcacgtctccggccccatcatcccttcaggcaccacactccgcaacgtgcggaagcggtccttgtcactcagtgcgtgtagcgtcaatacgtccaattactaggcaccttatctgctcgcgggtcaggtccttgggatcgaacccgtccggcgtgggtattacttggccttcgataagcagggaccggagccggcgcatcacgcctgcactaccacggacacctgccgggtcgccatccaagaagatgaaggcgcgcttgcaggtctgctgcaacatgatcgccgccagcctgtcgcgcagccttgtaccgttcagaccgacagcaaagacttcgggacaggcccaccgcaccttcagcgccgacaagtagtcttccgtcagcacccatggcctgcccattgataattcctggggccatccatggtaatccggggcaggatacccgtagcccacccacttgggattttggtcggcagtagcgcgcccaatccagcccgcgttggtagggaagataagccgatgctgcctttcgctgtacagcagcggcagccctggcgtcatcacgttgtagtcgatacccttggacagcagcaaaccataaagcgattgatagcagtcggcttgcgtccagtccgaggcatcctcgggccagggcatgaagcgttcttgatccgcgcattgtaccctccgcacatgcgttttctcgaccacaccaccctcctgacaggagtagcagtaagccacccagcggtcaggcaggttcttgcaggtcatgttggtcccgccccggctcatgctcttgcatcccaggacgtgtcggaaccggcctacctgcccaaccgccagggattgcgcttgctttagccaggagtcgcggcgcagtgccattggtaccattcctcccacaaaggccgcagcccacctcgggcctcgaacatgtcctggaggtgccaggtcatgcgggcgccgtaggcgggccgccgttgttctgtgtgagcagcacgcccagggccaccagactgaaggcgactccgatgaccagcggtttgttctcgataagccatgtcatcacctcatacgtcatggccgggtgccctcatgtgcaacacgtccggctctcctgctgtccagttcgcctcgcggtgggtggtgctccagcccaagtcggcgtagaacggctccaggaactcgaagcaggtcagatactcggcacccgccagctcggcggcccgcaccagctcagcgccgataccctgcctgctgtgtcggtcatcaacgcacagggccttcagttcaccgcccactacgaggcaggaacctaccatcagacctgacaggtcgaaggcaccgagggccagcacgcctcccttcttgcgccagatgtcgctatcttgccagccactccggcggaggtggagcacacactcggcgatactcgcactcagctccccggctggactcaggctttcccggagcgggtggtacttccgctgccagaggaaccactgccaccagttctcggcgttgctcggggcttggatgctgaatacgtggatcgtcctgatttgaatcaggccgggatgcaggctcagcggatacaggctcgtcttgctcatcttcgatctccctcaacttgcgctggccgaagtcaatcaggtcctgcgccatgtaatgcacaaggctgccggcacacgccgccaccttgtcccaggttgcccgcttaccgtcgatgcacgggaagacagcctcgtcctccagctcgacgccgaagcggtatccgttgtaatgcgtgaaatggtattgcatgttcgtgatcctccagactcacacgagagggcgctctaggaacgccctcggatttgaccccggagtaggccctggtcgcttagacgagcaggtacgtcagcacgctacccacgacgccgccggcgatggtggctgcgaaggttgctgcctgccaggtgtccttagccgccgccttcgcccgctcacgggcctcggcctcagccttcgccacggaagcgcggaaggtataccgcacgccggtcagcttgctgatgagctgacagacggccttggtcggggccaccgtcagcaatcgctgagtctccgcgccgtcccaatacaggccggcccgttgacctacctccaccagccgggtcaaaccctgcttgaggccgaacagttcagcgcccatctcgttattccggtccgcaagcttccgtacccggctgcgcagcggtccgtccatttctattccggcatcgcgcagggcacggtttaccgccagcttggttacgtgcagatcgtgtagacgtacctcgaagtccttggcggacagcgggccggccttcttcgataccagcgggaataccttgagcagcagtttttcgtactcatcggcgcgcttcgcgtcggcctggcacaagctggccgctacccgcgcctctagatcggcatagccacaggtgctgacgcgctccacgttatccaggcgcacctccaccttaccaccgtcacaggtgacgccgctcacacgggcggtgtaagtcccgcccgaagcctgtttcttgggcgtataggcgtgggcgaatgcccggctcttggccacccggcgcatctccggggataccttggcacacggcacgccgaacatgctggccgccagcttggtgaagtgatcgttgcattccattgtcagactcctgccagtttcagggttacggccagacctgcggtcagcaggcatacccaggccatgatggttgccttgcgagcgcggcgctcttgtgcctcgtgggcatcgtgcgctgcgttcaagtcgttctggagcagacggatcgtcgcctgatggctgcgaatctcgtcgatctcccagcggcgcgcccgctcggcggcctggaggcggcggctcagggtgtcgatatcctgggcgcgctcctcgcatacagccagggcggattccaggcgatcttccagggcctggatggcgggtgccttctgtacgctcacgctgcgtaccgggccgctgatgtgctcggggttgtgcttgctcacgttgactcctcctatggtatggctagctcgcaataggcccggcagggccaggcctattacgtgcgggccttactcgccttgggcgatggcttcgtccagggtctcggcggacgctgccggggcctgcactgcgcggatggcaccggccttcacgtccagcagcttggccggggcgctgtcgctgaagcgcaccagtacctgatagacgccggcgactacgctgatgacttcgccgctcagcacttcggctttctcgcccttgccgtggtcgaaggtgatcacgtcgccggcaacgaggctggacaggcgctcggcggtttgcagggcgacgaccgcttcgttgtagacctcggtcagcttggtcagggcgttgtggtggaagacgacgttgttgcggaagtcttcgacggtggccggcttcttgatgagcttggcgcccaggacggttgcgacggtggtttcggtggtggtgttggtcatgatgtagctcctagaggttggttggttcgcggcaaggaatggccacggtggaaggctggcgcaccagccttcgccttggtcactcggcggtgagtgtcacctgggtccccttgtcggcgagggccatgcgccacccgtcgttgcgcagcacggtgggacgcggaccggtcaccttggcagggccgtcgtcatggataaccacgggcagcactgcgggacggcccgtgctgtcccaagctgctacgccgatcaccagtgtgccgcgcttagcctcgggctgcactacccgatacatctcaccggaacgcaattccgtgaggtcgaagagacggcgttgctcgcggtcggtgttgtgggtatgggtgcggatcatgttacctccggtaggttatttgatgttcaggtgacgcttcagcccggtcagcaggccccggcctactgcacgtagtgccaggaatgtgcccacgatgattatgagtggccagaagcacccgatcacgcatgcgtcctggaactgcacttccgtcgggttctcgaacggcggcgacactgcgatgcagtagcaggcgcctgctagtatgccgaggcaacagtacaagccgagtacaagcagcgcggcgatcattggccggcctccccttgaacaagtttgatgtactcacccgcacccaggcggcggcaccgccagtctgtgttgagaatggccgtacccaccgcgtactgcgcggggttcatgctgtgcagtacgatgactgcctgagcgagggcgggcgtctgcttggtcgccagcacaacggcgccctctgccacgctaggcgtcaccaccttgtagagttcacctggtgacaggcgtcctacggacaagactggcggcgccgggtcttcaggcttgacatatatggtcttgacggtcattactcgccctccttcacgaggtcagtgcgatgcacctcttgtacttcacaggccgggtagatagcgaccgcgccgccgaggaaccagagttcgacgaaggcgtggccggcgacgatgctgtcggctaccacctggcgagtagttccgtccttgagacggacgacgtaggtaggattcatatgcgcttgctccagttcacgatgaggaaccggctcccaagcaaggccgatcggcgatgcttgcgaagccagcgtttggccgccttgcgtgagtagaatcgcaatggacgcacaggtcgcttgcgactccacacgaaggcacagcctcctgatgggctgacggctatgatgagccacttcatttacgggtcggtagctgtctgatgaaccgcacgttacgggcctcggcctcgataaggcgcaaggtacgctcgcagcgtacgtggtagatcgtcatacagcgggacggtcgggttatggcttcaatgatgcccttggtgcctgccgcgtcggcacccaggtagcggtcgctgtagttcaccagccccacgcggtggccgatacggtagggatcacgcgaggacatggtacgaggttcctgcaatgtcgaagatcgggcgcccgttcgcgcagcccttgcggtattcagcgttgatccagccatacgcctggcaggtgacgtgcccggacagcgggctaccctgtaccagcagcacgtcgaatccttcagagtccaggtcccggctcaggcgatacgcttcgtcatagcggttcacagttacgccggcgcccactaccacgaacccgcctggggtcaggacgtgcgcggtattcaggtcacccatacggaagccatgggcgcacagcgccttgtcggctgcgttgaatgcgttcgacgggtccttggggattgcgatcaacagagtattcaaagcttgcatggtttagttctcgcttgtgatgagtccagcaatggccccggagtaggcgagggtcgcccgccagggccatgacttgagtcaccgcttcaggaggtggatgaagagtaccgtcaggccgctgaaccacaacatgcgcagttcatcctcgccgaggttgaggccgagttcgaggaagggaagggcgatccagaagtccatggtcactcccccttcgcctggacggcctgctcgccgtacgggaactgagccgggcggctgtactgtgccagggcgatttggcgttgcagacgttgcttgaagctcatcgtgtttctccagttgtcattgattccagcggaacgcccgcttagcaggcgttcgacttgagtcaatgggcagcagcgcgcttgctctgctcagcgataggtgcagccttggcggccagcgcttccaggtcacccagcagttccatgccgacgatcaccttgcccttggtctgagcctggagcacctgctttttgatcgtggccagggcagcagccaggttgaactcctggtccagcgctttctcaggcttgaagctgtaccacgggctgttggtggcgccgacgagatcggtcttgccgaacttgttgtacaggaagggtaggtccttgttcgatttcttgtcagtgttaacctgtaccttgccgtgcagcaccaaccactcgaccagcgcattgcggcggctgcccttcggcatggcttcatacagcgccttgactacggtcacgtcgccgcactggtcgatgtggtggatgatcgacaggccggtcagttggatggcttcgtccagttccttgccacggacacggatggcgtcgatagcgcggttgatctcttcggtgccacggaatgcgattacggttttggagattgcgttggtcatggtatgtacctcagatggatttgttcaggtaagcagcggcggccaggtagccagcactgcggggagtggtcagggtatcgacgcggggctgcttagcttgcgcctgctcagccttgcggaagatcgggcagtcggcgcctttcggcatcctgtgcgctagatcaatccggcgtgccttgtcgcggcgagccttggcggccttgcgttgacgcggcgtcagttcattcacacgtggcattacaaacccttcccttgcgacttcttagcgttccacccctttaggatgttccgcgccttgccttcgctacccttcacgaaagccttctgttcagggttgtggtagcgtcctggcgctggctccgggtcggtagcgtagcgcacgtcacgcatcttgcgaagctctttgcgcccttcgacgttatcctgtgcgatgagcttagtacgtttggcttcccagtcccgccagtacgctacctgagcagcaaagggtgacttgggagccttagccttgaagtgtgccatcggcaatcctcactaggtctgtctcttgaatcccctcggtggaagggcctcaagggacaaaccttggcattggcatagtccctgtagtatcagcggttctggcttgtcctgcgcatactcttcgggatcgtcttcactcatcccccgtaccctttgcgctatctgcctggccttgttcaatcggcccgccgatactacccagcatactgtcagtcgcgattaaccgggtattctagtcccgatcccactgacactctattcgttcccaccggacctaccataggccctttgcttaaccgtggacggggaggcttcccgctcagactcttttgggtgagtcttcagcacccgacaggtattccctggaaccctgcctaaccagttgcagcttcggtcaacctaccgcaccagtccatgtaccgctggtgaagcttcgaacctctaccgccagatggctcagccatcctttcgtcttgccgcgcatgttagagacttgcgcttgtcttgtcaatcctctgtcggggattagttcgtccagttctccggcataggcccttttgctgaggggccatcaggtggtgcgaactgtaccgcgtgtcctgcaccgtgtcaatccctgcgatgatgcctgccggccttacacatcgttggtcatgccctaagagtttgccgtgtcccttgcgcctatggcttgtgccgcgcttggaaggttgcaatctcccgtcgttctggctgcgcatcctaccgatgtcctggcagggtgtcaacccctgtctccaggctgcctgtagaggcgttgttgcgtgaagacagggcgaactctacagacctgccgcccacgtgtcaatacccgcgccagggcgctccctggagccttcccacgcgtatagagacccacgcgtgcgaggcttagtctggctagccaggattatcgttcccaggtaacgcaaatccaccacccagggagcagccacccagccagggccaccaccctgaaacccgcgtggcactaaggctgcggttatgtcacacacaatggacaaataggcgtccatcagcgccagcggcgcgaccgaggcaggccgagggagtggcgagggtaagacagcaggaccagcggtagcgccagggagacagacccagggagcaggactagacaagccaggtagaggcgagtagagtacgcggcctagagggaacaacccaggtaggaccagggaagctccagggcagaggcagccaggcagagggcaagggcacagcccaagcacaagaggcaaggccagccactcccgcaaccaccaccagaccagagggcagaggccccaggaggaacgagatgctgagcagacaggacagagccgagcgagcctggcaccagcacgacgcagcatggcagcggaagctagccaggtgggcagcagaggatgagcagcacagcccgtacccagcggccagggccagggccaaggatgaccggaggctagcgctggtggcgcaccgcagggcgctgagtatgagccgatggaccgccaccccgccaggggcttgacactcccggcaggatgcgtagaatgggcggcgaagggcagggaagcccaccgccacccggcgaagccggaagctcccagggatgacccaggcaccacccaggcaatgcgaggggatggcccaccagacggagggcctacgggggaagggtgggctgatcagagtcgggagggttctcacacgacgatatcaaaattggacccggagtaactactcccagcccaggccagccaatccagccagccttccagccgacctcaataaaattccagtagttccagtggagcacccgactatgcaggtgctcggcttgagctactcgatcacttgtagaccagggccttggcggtctcgacagcagccatcagctcgtcgagatgcgcgaccagttcagcgcgcagcttggtctcgttgtagccagaacccagggccgcttcttccagcggacggatcaggttctcgatggtgccggcgaaggcgcggaggtctttctgagttgcagcggcgaaggttgccatggttcagttccttgtgttatggatggagtcaggttggacggggctgtagctcagcccgccggtgcggtgtatacgaccttggtgatagcaccgttggctacggtcaccttcacggaaccaccgccgtccacgggcagggtgtcaccgttcttcaccttgtaggcggtgagcgggtccggtggagtagcgccaccctcgccgcccagggcggtggctgctgcgatcacagcggtggccttggccttgacatcggcctcgtccatgtcgtgcagggcgatgcggttgtcggtgccgggctggcatacctggtagaaggtcaggccggtgttacggccagcgaggtattggtcacgggtgttcgccatggtcagtctccttgattcagggcgttgcataggtccagggcgtcctgataggccgctacagcgcggatcaggccagcctgggtggtagggtcaatcagtgggtgttcgcacagcacagcgggcgccggggcggttgcacaggctgtcaacgacagcagcaggcacaggccggtcagcccacgggcggttctggtccagggcacggtccacctcctggcgctgggtgttggtcttggcggcaacctcctggacgtggcgctgtaaggtggcatagcgcacctccagggcctccgcacgggccgactgccgcttgatctcctcctgggcgatacccaaggcccggtagctctgaacgaagccgtatgaggctcccagggctaccacagcaaggacgagtattgcgacgatggttcgaggcattgcttgatctccgcgttgcggcgattcacgaggcccttggatacgaccttctggccgtcgatcgtgaccttgttccacatggccagggcttggcagccctcagtggcgcggccttggttgaagcgcttgaacgctgtgctggttgtacagactggacccacgttgtagcagaagaacgtcagggcggtttgctcgttgacgttcagcggcaccttgatggcgtccaggacgatgcgctcgaagcgctggtagtccttgagcgtcatctggtagcactgctccggtgtggctttgtcacccatcttgaccccggcagtggtgccagagcagatggtgggtacgccggcgatgtctcggtaggcagtggtctcgctaccttccagggcgacaaggccggcgagggcagccgcaagggctgcgccgcgcaggggcttgttcacttcttgaacctccggcgaagctccgcgatgctatcgagcatcttcgggagcagggtgatgagctgggcgcccacgtagagcgcggtgagtaccgcagcacagaggctggcgatctcatagggcgagtaaacggcgatccccacgccggtgacggcgagggtgcctttgcccgcctcggtggcggtatcgagcatcatagtcttcgtccttttgggcggcccttgcgacgctcccggcccatgccgagagaccgaaggacagacttagtgtaacccatcgggttgttcagccattccttcttggcagcctcttcacgagcgcgggttgcggcttcgtcgtcctttacgagcgtgggtgctagctcgcggacaaggccctcaagggcatcgatccggtcgtccttcggcagtgagcctcggtcggtggtgatgttgtgaatctggtggaacacggagcgctcattgcgcttgtccgctgggtactgctgacaggccacatggtcggaatccatcgccgatacgtggaagatcagacggtgccgctgcatgatgggccgcagggtgtcgatgatgcgacgctctttctgtccggacttctggcggtcttctacgccgatcccctcatagcggggcttgttggtgtccgggtcgatggatcgcatgtggttgcggaagagctggccaactgcaccagcgccgaggtttttctcgacatagatcaccttgacgccataacgcgcagccagggcaatacatttctccaggttctcctcggcaaagccacccttccagccgccgatgctcacgacgtggatgtacgggccaagagtcccgcccacggcatacgacagctcgtcgccaccgtcgccggcagggtccacgaacatcgtcatttgctggagtggtgcccagccgccagccatcagcgccggcaggtacagctcaggtttgatgaccgggaatcggtgggcgtcgaacttgagcttgaagcgctcatcggcagcccaggccacttgctctggcacgctctcatgcgtggcgtcgatgaacagcaggtcgcgcagcttgagctgcatacgctgctcgtcggcgaggctggtgtccagcatgtactgaagctggaagccctcggggccttggtcaagctccttgtcgagcaggtcctcttcgttgtagcgctgcggatcggcagcccagccacgggtcccatccaggcccttgccggtgcgcgggttgtggcctttctcctccaggcgggcaatgcgcgccaggatggaaggtgcgagccagtcaccgtagcgttcctgctcatccagggtcgggaagcggcccggccagatgcgcatcaggaagccccgcgccggcaggccgttgtagatcgactcacgggactgcggcgtgcccaggtagagaatcttaccgtgggtacagatagaggtgaactcctgcgactgtcgcgtcagcttggcccgctcggtggcggtgaggccgttcttcgtggtctcgatgtcgtcagggatcaggatgtcagcccggtagccctggagggcagcggtgatcccgatgcagttgatggaggccgatttctcgacgcccttcaatgcccagttcacgtcgaagctggtggccgaggtacggtcacccatgcgggcctcggggcgcaggtacgccagaaggtcccagtgcatgatcagcttcgtgatcaactggccgttctcctcggccttgtcaccggagccggataccagcatggcgcgggtagccgggttctgagtgatgcaccagaccacgtagatacaggcgatggtggacttggcctcgccacgctgtgcagcgaccatcgccttgttgggcgagtcctgcatgaagtcggcgatgtcgagctgcatccacgtcatcttgaagccgaggaacagcatggcgtccaggcagaagtcccggaagcgcgggtacatgtcccgcacctcgtgggctatctggaatcgttcttgcggcgtcatgctgcctcctagtgggtgtacagtcgttccatctcatcgtcggtctcaccggcgatgaagccctccagggcgatacggcggttctccgcctgcgcctgccgcatttcctcacggagccggtcgatgttgatggtgtcggacggatcgcaggtgatctcgttgtccttgaggaacttggtggcggcagcgatatccgatgcggggatcgggatgtcgttgtccatgtaccacttgaagttgcgttcgatggcggtgcagaccagctcgtgaagcaggcccagccgctcagcactcgcggtctgctttttgctcattacatgtgccctctgaattggacttggaagcgtaggttggttcccatgccgcacttgaccagaggccggaacaccttgccggtgtccacctccaggtgctcctgggtgtagttctcgttctgcgtgcgaacgtacatgttaccgcctcgggtgtagggtacgatgacctgtgcccacgcagttgcgccggggcgcttgtcgtcgagggctaccttggcatagtccacttggcccagctcaactacgatacgacggccctgctgcacgttgaagtacgatagggcgccggtcttgtctgcgcggacgaacacaaagacgtagttcatattgctgtcgaagtccaaggatatcgtcgagatacccgcgtcgatgccatcgccaatgcgcacttcgttggtgccgtcctcccagccgaggtaggtgccgtcattccgcagcatggtgcgccatacccggacgaatagcccctcggaggggtcctggatggcgacccctccgtcgcagaagtcgagcacgtcgctgatgtcacgacgtgccctggcacctacaaacttcgacttggccttgggatcgaggtcttcgttgaagtcgtagatcagtgccatgggttatgccctcgccaccgagaactccattgtaatggagaactcctgagtgttgttcttgactacgggagggtcgatggtgagtgcgtagttccgcccattgtaaatctttaggtccttacagccggtgataccccccggcatgttgccgttatctacggtggcccgtagcataagctgacccttgtaggtgccgcgagtatatcgcgggtacagcttcacccactgaccgtcttggacatcggcaccggacgcattcttgccgtcgatccgtggcctctcgttgtagaagatgtagcgctcaccgtagaggttacgccggttcgcgaagggcagcggggtgaggcggatggtacgctcaaccccggagatcacgaacttggcctcggccatcgccacagccttgctgcgcagctcatactgtacgtcgagaatctcgtcagcctgaactaccagggtggtgggttggccggcggcgtctttgatccgggtgtaggatagtggagtacctgccggaatcttcgcgccggtgttactctcaaaccccaccgcggattgagctacgatgcccacggtggccagtacctgaccggccagggtgcctattgggaagcgccaccgcttgtgccagtaaatccactccccgtccaggcccgaggtcacgtcgccgttaggggcatacgaggtggtgcgccgaacttcttccggcagggagggcgcggcggggttagggtccgcagtgctggtactcacggccagggcctgggagaacaggtcagaggtatccatggcgcaaatccaatcaagacctgcgttagtgatgaggttgtcgaaggtgtgttgcgccaggacttcacccgtggctttcatatgggtcaccgtgtagcgacccttaactcgcgtctcaaacattggtcagttccgcctgtttaattgctgttgaggtggtgaaggcgtaaggctccacgatatactcagagtatacgaccacaaccttcaactccgcgcctaccactgcggtctgcgacgagaatgcgtaaggttctgcggtgtagtccttaaccgtatcgcgcagtaaaactgcatggatggcaggtcccgtcaggaacccatcgccaccgccgtagccgagctgagtcagcgaccgcagcagcacgcttaccacactggaggtcgcgtggtaggtgtcctctccgggctggttcaacacctcgtgcagggtgtcgcgtgttagcgctgccacgatgttcggcctacaagaccatgcgtcatccgtagccaggatgggatatgggtaggtcgccaagatgggcttgggccgccgaatttgagaggccatgatgcccgcgataatgccgcgcattattcgtcctccatggctccgaacacgatccagtggttaggcccgagacgcttgagggtacacacgccattctcgccgtagagctgcatggtggtgttctgcaaccggttgatggtcacgccggggccggccacgatgttgaggtcgcgcacacccgcctgttcgaagtgaacctcgctgaactcgatccagggtgcatccgggtcttccatctgcatggtcagggtcagcggcttatcagcggtgatgcagcggttccagtaaccacgccagctcgggtcgatgtccgagtcttccgtaacggtgcgaatctcggcgaagcccagggcgcggcgcagcgcttcgttagcggcgtcgagtgcctcctgtgcaaggcggcgggcctcctcggcgatacggatcgcgtcgagaacaccatccagtgcgaggttcgcggtgttgatgccctcctgcacggcgtacagaagctgcttgttgttcgcgtcgatgtagcgaggcaggaacgggatgccctggctgaactgcgtatccggcacttgggcgggggtgtcgcggaagatgcggacctcttggccctgcttaggcacttccgcaagctgaatgttggtgttgtccacccacgtatagtcggtggtgagtatcttgtcgacctggacgaatacgtcctcacgacgcaggaatgggaagtcgagactgaatacagtctcgaccccatctacaacgtggatggtctcggggttcttgaaccgagccacgctattcccctttgatggattccaacagcaacttggttgccgggaacacgttgacgaaaggcagtgcgcccgccgcgccgttgacgatatcgccagtggctgctgccgggtcgtcgccggttacgaggtctcgaacgcctcggaacacttcgttggagtgttcagccagtccgaagaccggagcagacattcgggagtggccagtgaccacaccccacatatcggcggtgaagcccagaccggcagtgtagccgatgccgtcgatggccatcttgcggatgccttcatcagaggtgtcgaacttgccgttgatcgctgccttggcacccatcatcagcgcggtgagcggatactggaatgcgaggagcgaggccacgccaagcacgccggagttctcataggttccccggaggagcttgttgtgcgcgaaggccacaaagctgcggaactggcccaggatttggccgacaggtgaccgagcaaagcccgagttctgaccgaccctgccgtacagcagcgagtcgtccatgatccgcagtgcggtgttcatgacggtgttcacgtctgcttggctccaggcgccccaattcatcgattgggcgttccttcctctgtatgtgacataaccgcgaacccgcgccaacactggcgtccagtccacgtccttcccgtactgctggagcacgcgaagggctgcttcatccccctgagccgcccgcgccaccttgttcaaggtgaggttggcgttcatacgggattgccagttgtgaatgaacttcatgccgttgagcaccgggacagcctgcttacctgcgtgcaggaagcgatccatgaaggtatcttggctggccaggaaggtgtcgaactgccgcttccagggcttcatccggatatcgttggcgaggttcaggccgaggacggtctgcatctcgtcagcgaggtccgggtcgcgacgcatggcgcccacgaagtctcccaggcgggagttcagcatggccttcatgacgttgaagacgccttgacggtgcgccatcgtggccagctcggcgagctgatacacgcctgagaatcccagcatggtggcgctggtcaggccgctggcccgctgagcaaccgggccgagctgatgctccctcggcacgttgccggtgaagtccccgaagactccccgcagttgccccgtcagctcctgcaccttatcggtgcccaggtgtgctgcctctcgctggtactcccggatgaaggcttcgatctccgagtcccccggcatgcctgcgcgggccaatgctgagcggcccgacatactgccggcgtagttctccatcagccggtccaggtctcggtcgatcaggtcctgcacccgatacacggttccgttgtggttgatctctgcggtcatgtccagcgacagccggcccttgccgtacttgacggtgccctggtcggactgcttctgctcgatcttggccatgatgctgtcgaacttggcctgggacacgttggcctcctccagcgcctgccggatgaatgccgtgtccgccacgcccatcgcgcccatgaactcggagcggattccggtggcccgatcccgcgcccgctgcacaatggcctgtgcgatggtatcggcatcggcgcgctccagcccagggatgccacggaacacggcctcgctgatggcgcggcgggccaggccaggggcggcctcgtccatctgcgccatcttcgaccagttccatgaacggtggaagtaccccggtcggggagcgaagtcctcgaagccacgcacaccggcttccctggcgcgctggcccatcagaccgtgaatctcgtctgagcggtcggccagggccttgatggtcggcggcaggttcgggtccacacggacgctgccgtaggccgtccactcgcggtcccggcgcagcagctcgcgggtgacctgctcgttgagctggtcccggactgccatggcgcggcgggagttcagcgcacgtgccgtcaggcccacaccctgctcagccattgccttggccatcatctcgtcgtaggacttcacgtaaccctcgaactcgttccgatagcggcggagatagctcgctgcgttgtcgttcgtgctgaacccatcccgacgtaccgggtcgtcgataagacggctcaggagtcgccgtgcgccctccccaggctgtgccaggaggtctgcctcgctgaagaacctgttcacgaagccggcaccctcacgggcacgttcacgggtggtccgcacgatggtctccaggctggcctcctcggttaccggagcgcccttgttggcccacttggcctgcgccttagtgtagccgggcatggcctccataatcgtctcagaggcggccaggacgcggctcagggccgtgtcagcatcggaccgcagacccagtagggtgcggatgccctccacgaagcgggaccacaggcccggcccgccgtcactgtagcggaggcggttcagggtcctttggaagcgggtatccgtcaggccccaggctaccagttccttgacgttggccagggtgttggagttaccggctagcagcgtctcttcgaactcggacagttgccgaccggcggcgcggtcctgcttcagggcgttgagcacgttaccccggacgttctccagggtctgcatggcctgagccaccttcggactcatcgcgccaggattccgcaaggcggcgttcatcacgcccacggtggcagcgtgaaccgcctcgtggagcacggtcaccgggttggtgccaactcggccaggtgcggtgctgccgcgtacctggaccaaggtgtcgaggccctgggtggagtgaatccccgccgtacccggtttgaggaaggcagagctggcagtgtcaccgccctgcaccacacggaacgcggtacgctgccccaggccctccagggtcctgatagtatcagccaccttggcggcgatgccctggagcggcttgggcacctctgcgtgggtcttgaggtggtccaggacctcagacagcttccggcccgacaggctatgcagctcgtcgccgaaggcagtgtcacgtcgcggaatagccggtatctcagcctgctccacgcgggcactgacacgggatagcacagtgccctcgtccagcaggtctaccacgtcacctgccttgaagccgcgtgctgcggcctcctcggcggtcatggctacttctggcagcccgacagtaggcgccgatacttcgggcacatgcggttgcgttggggcctctgcggcaatgcgtcccgcaccagaccccagcagagcacccacgccagcgccaagagcaccagccatgatgtaggttccggcatccacgtcggcccctgcggcatccagcccagcaacatacccgacttgcccagcgccgccagcagcagccatgccagcgcgaccgagccgcagagcacggccagcgccgaaagtaaccgcatcaactgccagagcggcagggtccagcatgccagccgcgaagttccagtacgggttgtcccgcacgatttgctcgtcctgctcataccgttgaatcctcgacaggaggtaggccgcgtcctcggcattgccggcacgggccatgatctggagatagttgtcagtcggctggatacctgccgcctggagcgcctggaccccataggtcccagcgtcgaagttagggtccacctcgccggtactgttcgccgcaaggtctgcgtcgagctggagcgcatcgccccagcgtccgacgagggtggactggttccagagtgcggaagcacggtcaagggccggcagttcctggtccgctacgatgcgttccagttcccgcgcattggctcgttggcccgctgccacgttccgttctccgatctcgccacccgtcagggcgtcgaaccccacggtaggcaccgcgtcaagttggccctgtacttgggcctcgtcgagctgtgcttggtcaaggggatacttgggcgtcatgcggcccttgaattgctttgccatgtcttactccgctgttgcggcgctgtaccaatcgacaccgatttgactcggtgtatcgaagtggggcgccatgcgcttgatgaatgcctcggcccggttgggcgtctgcgtgtaccacttgctgtttcgcacaccagcctcgaaggcttccttgttgcgatccttgatcgcctggaaggtgttacggaactgccgggcacgtccttcgcccatctggaaggccataccggccaatcccaggatagaggcattgttcgtaacgcccagctcgtcggccaacctcacaccctggtcgagtgcgcggtcggtgtcctcggcgaaccactgcgcggcttgctcgggcgtgactgtagtgcctgccccagcattgccactgcccaggtaatgccccaggcccacactataaccatcggcatccttatacgcctcccctcggtaagcctcgaactgagccagttccttccgccagttgaacacgtcctgcttcagcatgccggcactgttgcccccgttcatgcgaatgtccgtgccactgaccttgacgttggccccgtactcggcgccccgcatagcgttcagcttgtcggagttgcgcttgagcacctcgttgcccaccgcttgtgggtccacacgggtgcggtccagggcgaccccgttctcgtcgtactcgacggccaggaggctgccactggtgcggtcgtactcgaaggcgactaccgacttgtagccgaggagtccttcgacatgcggcttgtgctgctcggccaggacggttcctatggtctcggtgtcgttggtcccgaatagctgctcggcggtggtgccgcgaggcaggatcagcggcgcgctatcgcggcggctgaataggtccccttccttcaggttccgaccttcgcctacctggatggtgcggttacgcacgttggcggcggcgatctccagcagggcctcgcggcccgtgtcgctggtgagcagacccgcatgcttgcggtcgctggccagccagttcgcctcgtcgatggtcgcccggcgatacatgctcaggacggcctcgttgttgctcaggtcgctctcgccggtcagcatgttccaggctcgaccgaagatgttgttcacgaacttgtcgttgacctgcttaccgaggttgtccttgaatgccttggtgttctggcctttctcgaactcgtccatctgcttcacgacttcggcgttggcgctaaactcgcgcagagcttgagctggtgcgatgcccatcttcatctgcttgagtgcccaggccacggcgccctgctcggcttccgggatgccggatagcatcacgttgccggcggatgggttgatctcctgggccgaggccacctgttcgaagatgctgttcagcgtgttgaccagctccgggtttgcctcgccttccttggcggcctggatcatgcgcaccgcgctgcctacggactcgccgtaggtcttggggaaggtccccaggcgcaggccgagctgtgtgccctgcacgagacggtcagtcaggcttgagccgttggcggcctgcatcttgtcccactgctccagcgcctcggtgacgttggtacccagcgtgtggagggcgttgatgtctccggcttccaaggccgccatgatgccctgcatgcgctgagcgttgcccaggccggtcatggccttggtcatgaacgagatggcctgagcgtcgctccagcggccctcctcgaccatgcctcgtgagtacgcctcaacctcggcaaggtctgtgatggcgccgttggccacccgctgctggaagtccgcgtcggcccgcagggtagccatcgattccttggcgcgggtctgagccttcgacttttcatagaggccgttgagcgcacgccgatcatcgaaggacatgctgtccaggaacccggcatcgcgcaggccctcatagatgccccgctggttcatgtccaggctggccgccaggaactgcatgcctaccttgtcgcgcacctccagcgggatatcctcggaggtcatgatgttggtatagaacaggccggcctcttccaggctgagctgccgggacagttcgtcgccggtggcctgagcctgcacagccttggccaggatgctgttaccctgggtgcggaagccacgggcggcctggtcgatggaccagtccatgtacgccttagcctgcatgccgaagagctgttcctcggccttctgctgctgcgccagcgcctgtaaggcatcgttggggttcatgccctcggtcgaatccaggacgtgcgtagcctcctgggacaggtacttgcggaactcctcgggagtcatctcccggcccttgttggcgatgaatcgctgcatcttgaggctgaagtcggcctgagcgatgcggtagtcctgcttgcgccagccgcccttcacgaatggtttggccagtacgttgctgtctactgcctcctcagcctcgccggccatacgggcacgctcaccgcgcagaacttcctgctgcacgttgtgctcgaaccatttgccagcgatctgctgaccggcacccaggatgccgtcgagaatctgcgagcctacgctcgggccgctgtagttgatctcggagtcgcgcactccgcgccgagcactctggcccggctggagttgcgtctgtccgacgttgatcccaagctcttgggaagcacgttgcgattccgccatcagttgcctcctttaggcgtggcgccgaacttgaagtattgacttgcgtacagggaacccgccgacatcaggccggccaccagcggggaccgttgccccgccgtggtactcttctgccccagcaggccggccttcgcctgagcctggatggagtgcgcctgctcggcgaggttccacatctggttgtccaggttgtcgtcaatctggatcagggcctccccgacctcgcgctcgatgtccagggccaccgcatccacggatgcacccttgacgccgaacgcgccggcctgagcctcggcactgccgccggcgagcatcccctggcgcttggcctccacctgcgaggccacggcctgcttgcggtagctagcggccatgacgcccaggttggcgatgtcgcgggcagcggcgcccaggttgtcgaggtccgccttcagtcgagccttgttctcagccttgatcttcttgcgctcttccttgttggccataccctgctgaagggctgacatgccgccagcggccaatagtggtagccagaaagccatcacaccctccggtagatttggttggacttgaagttgtactcgacagcccggacgttcatgtcgtacggactatggcagctcagctcgaacttggacgtggccatatcgacccgtgccggcagcggcaccacagcgctatccaccagaggctccccggcattgagttgccggctgaacaaccgaaggggcgtcgtgtcgtaccacggctggttgggtcgagccgtgtcgctgatgcgccacaggaactcgccagtccatccgaagttcacgctgtaccggtggagcactgcgcgggtcgcggtcatgggcagcccgttgtggtcccgtagcaccggcggagtgaactccaccttggaccagaactcacagccgaccacgtacacggcaccgactacggcctcgggcacgtcgaggaacaccttcgtattcgtctcgcgcttcacgccgaggtgggtacgttccatgtaggcaccggccacgggctggagctggtatacggcagaggcatccttgatcaggtcccaatgctgcttggtcagctccagctcaccatcgacggtcgcctcgatacgccgccagtaatcgtacttcggatattgcagaccctcgcgggctggcaggctgttcaggtgcatccggcccagggcgatctcctggcccttctggatcaggaccatcaggttgtcgccggtgaagtacgcgccgatgatctgatgccgcagcgtccatcggtggaaggcgttctggactttctcgttgccctgccagaggtactggtggcagatcatctcgtccgccgtgctggtgccgaacaccaggtagccgctggaggccgccgcctggatgtactcagccggccccggcatgtagctcgggatgtggctggtaacgtcctcggcgacgtagtggctgtccgtggacggcgacggggccatctcatgcaggcccatgaaacccagggcacgctccgcagcgaagtacacactgcggccagtcacggcaggtgccgccctggtatcgaggtcgtactgcgtggtgatgctgataaccgccgtacggggagttacaatgccgccaccggggaccacggcctggtacttcttggcgaagacgatcaagtccttgttgaaggtgaccgcgtgctcgtacggttcagtcaggctcccctgggccgcgatctcgataggatcatcgtcgttcagcgcggctgccgacttcttgaaccagcggtgcggattgttactggccgacatgcagacgtactcctgcgacaggagaacgaggcgaccctggaaggtcgtcatgccggtgatgcctcgggtgacgaagttgaacgtggggttcgtatcctcgtcgccggagccacgtcgatcatactccaactcgttcaagctgtaggtgtcggtagcctcatcccagcgcagggccagtggcatcttcttcaggacccaatcggtgccgtaggcggcccgctctgcccagcggcggttagcggaatcccactcgaagtataccggggccttggtggagccggtggccatgacagcgccgtccatgaactgcacccccacaccaggggcgccaactcccggcagcaaggccggcaggtccgccgtagcattgaggctcataccacctgacgcgatgccgtagttgttgcccatatccgtggacacctcgaccacgatgtcgccgtcgccccggaaggcgatgtagccgtcctgcacgccccgctggttgagatagccggctaccgtagccgcagccgggtcagggtcaaccttcgggtacttcttcgtggagttgggcagggcgtactccggggcgccgaagaacttgccgtagagttgccaagcgatgtagcccacgctcgtttggaacggtgcctcagcgaggttggggttcgtgctggcgttgtccggtgtcacgtaggtggccgtgtgactgtaggtggtgcccgtggcgttgtccttgaccttgatggtcagggagaatgccttcgaatactggcctgccttgacgtacagccagccggccttgttggggtctacgcccttgatgtcggtgcggtcggcctcgggcttcacgctcaggttggcgatgaacaggtcatcggccaccgtggcggcccgtagctgcctgtaatcgttggccttgaggtagtcatgcaccaggggctgacccatcagcaggcgaccgtcccgctcgtcgaacaggtacagctcaccacggtgctgcgccaccagcatcgcaatgctgcggccaccgaggttcgtgtggtagaggaacggcctcggccagggctggtcggtatgcaggtgggccatcagctcgataccgctgcgccgccgaagtcctgacacgggatcggataccatgttgatctgctcgctgagctggcccggcaggcgctcgaagggcacctgctggctcacacccatcagcagattgggatacgcggattgcttgtagctcatgctcaggtcctcaagctgcgccgccaccggctgaagctacgcttggcctgggtgttcagcggacgtgatcgggtgtgcatgcgggacagttcgttctgatacgcctgcaattcctgggcgatgacctgggcggtctcgtccggtccaatctcgtgggtgtataccgcgagcgcagcctggtgcgcaatgacgcgctgtgcgatctccgggatacggtcccactcccgagacagcaccaatcggccctcgaccgacttaccgatgcggtcgtcgccggtgttggcatctcgcactcccaggccgtcccactggaggtccggggaatccgggtagaatgccaaggtgcccttgggcaggttgatgcggcccgtgggatcaggtgtcagcttgtgcttccaccaggtgttgaaccaccagccttgggtcagcaactggatgcgttgatcttccagctccgggagggcgatggccatggttggatacgtctcatccatgctcgggatcggcagctcgccgatcttgcgcaggatgacattcactgcgtcgagtagtagcatagggtttctcctaaagcgcaaaaacccacgcagggaatctgcgcgggtcgttaggctttgaagaaaccccacaccgaagtgcggggtttcgtggcatcacgcggtgatgtcgaaggcgccgatacccttcagttcgatggcaccagcggtgtccggacgacgggcaccgatgttgtacatctggaaggtatccaggacccacgagaatttctcgttgtcttcccacagcttggcctggaccggcgccacttgggcggtgatcagggtcttgctcgggaggaacagggcgatctggcgctcggactcctcggcgctcacgttgaagtgacggcccagcgggtgggctgcgattgccttggtggcgaagcgcggagtctccagcaccttgacgccgttgaggatggccacgcgggacttcacgtagtcgttggtcgcgccggttgcctggtactcgacgttcatcagcttgtcgtgctccagcagcaggctgaacacacgcggcgacatcggggtcaggccctcggagtagaccgcatcgcccaggtcgcggtcgatgaaggtctcgactacgcggcggtgcatgcggacgatcttgtcggcagcctgcttggcggtcaggccggtcaggtccagtttctccagcacgcccggcgagaacgcatcttccaggtccaccggcgcgtccatcgcggcagccttgatcacctggatcaggcaggcttggtcgaacttgcgagccagttcctggccgtccagctcggcgacttccttgcgcatgtcgaaggattgggtccactcgtcctggtggtcgaactggtggcggaggtacagcagggtgtcgacggtcaggttccacttgtcgttcacgactcggctgcgctccagctcttcaccggcgcggcggcccttggcctcgacgttacccaggcgatccaggcggaccacgttcgagccacgcaggtcgcggatgttcatcagcggtgcgaacttggaggtgtaggcgaagtgcttatcgacgatgccgaggtgctcttccaggtggatgtcaacgtccgcgttcttgccagcgtagttcggacgggtcaggtcgttcaaaaagctcatacgatgctctctcttttggatgtgggtttaaggccggagtagggcagggtcgttagataccctgcgccatgcctgccttacgacgctcgcgcagcgcagccatctcggcttcggatgcgttcagcggcagcttagatacttccaagcggtactgctcagcgctcagagctgccagtgcaggtgccgcagcacccaggggttggccggtagcctgtaccacggcacccgagccttgtgcgaaggccacaatttgcttcgctgcgtactgcatggcctgggcatcgcccgagtccatcagccgaccgatggcggccttggtggccgggtcagcgtgttggttgaagacgccggcagcctgcttcaggatggcctcaccgccgacggcggcataggtctggctcaggacggctttggtctgcgcatcaacataggtcaggacgcccttggccacgttgatgacgtgctgcgcctgggccgggccgagaacttccttcagatagtgctcgtcgatgaaccgaggatcgcggttctcggcggccttgccgaaggctcggacggtatccagtttgtcagagaacgcctccagatagctgatggagggcgccaactgcgggtcgccttcgaggttccctgccaaggtgcccacgatctccccgttgggagtgaaggccggcggcggcgggacttccaggttctcgggaagaactgcacccgcagccggcggagctaccggggccggctgagcgggtgcttgcggaacaacgggttgacccacggcaggtgccgctaccggctggtagtgcggcgtcatggcgctggtcggaacgggttgcggctgctgagtcgggatggccagttgctgcggcgcacctacctggccgggctggaccggagcctgcggctggatcaccgggttcggcatcacctgcacatgactcggtgtcggcgcggcggcgggcggtacgttggcaaccaggttagcgaggcccggcggcagttgctgttcgttcggttgggacatctatcagactcctgcgagtgcgttggtcatgtcggaagcgccttccagcaaggtctcttgcgcggcctgggcctgcgcggcctgctgacgctgctgctctgcctcggcctgtagctcgtcggcgctcttgtagaactgcgacgtgtctacgctgaaggctgcccaaatcgtgtccatcatcttcggtagcgagatgcggggatcgagctgagcaatcggggccaggccagcgatgacctgggaagcgttgagcatgctctgcacagcggcggagcgggacagggccgggaggcccgtctcgatagccggtttgtgctgcttggtgatcaagccttggagtagcgcatcatccacctcggagaggcagacgtaggccaggggcgactgaaggttctcggccaggagcgagtaagtaccgcccagtgtgttctctgcctcttccgcagtgatgcgtacttcctcggcagtgacgcgctcggcgtcgcgctggttggcaccatacatgaacgcctggttcaagcgaacgactacggcttgcaagctctgctggatagcagccatcttgttgtagtcgccacgctcgtaagcacggacggcttccgcgccacctggcacgtagtcacccatctcggcgtcttggtagtcatcgactaccgcacccttggcctcgtccacgaggttcaggacctccagcgactccagctcgtacaggccgagtttctcgctcagcagggacagcttggcgaagtcgccgatgtagtcctcgacgtggccgcgaccgtagtgctcgccaggggcgaggttccaggtcggcacgatgtacgggcacaggtggataggccagcggccctccttgcccacacgcacgccgtcgatctcgtggtacagctcggcgtattccatcgccgtgcccctcttgcgctgtacgtgggtgtacaggtccacgctacctgaaccggacaggttgcgtcctgcgcgcatcaggtcctgcttgtactcttcatccaggtccttggacttgtagcgctgctttaggacgatatccatccagcggccagtcgcatcccggcgcaccgcataggagcggagcgaccatgcgaccaccgtagcggcggcgctgtctcggtacagcagagcattgccagtcacgatcagtagcttgatcacctgcgtcaggaccgccagggaggcgttctggaacaggcgctgtgttgctttgcgatccacccgagccaaggcagcggtcacttcggtaatgtctgtgtcccggctgtcggcctcgcggcggatcgcatcagtgagttcggatcggaagaacggaatccccgtggggaacagcgatctcgccagcttggcggcgaggttgttcaccaggagggcaccggcggactggaagtcatgctctacgactccccggctgccggacatgggatcgaccatcaggtagggaagcgtggtcttggcgaactcgatggctcgactctccacgctcccatcccgaagtttctcccacagcatagctgcggtggttttcatggcgtacctcgtcagtagttg

SEQ ID NO: 12 - DNA, 42557 bp, unidentified
  source 1..42557: mol_type = genomic DNA
ggtgttggcatctcgcactcccaggccgtcccactggaggtccggggaatccgggtagaatgccaaggtgcccttgggcaggttgatgcggcccgtgggatcaggtgtcagcttgtgcttccaccaggtgttgaaccaccagccttgggtcagcaactggatgcgttgatcttccagctccgggagggcgatggccatggttggatacgtctcatccatgctcgggatcggcagctcgccgatcttgcgcaggatgacattcactgcgtcgagtagtagcatagggtttctcctaaagcgcaaaaacccacgcagggaatctgcgcgggtcgttaggctttgaagaaaccccacaccgaagtgcggggtttcgtggcatcacgcggtgatgtcgaaggcgccgatacccttcagttcgatggcaccagcggtgtccggacgacgggcaccgatgttgtacatctggaaggtatccaggacccacgagaatttctcgttgtcttcccacagcttggcctggaccggcgccacttgggcggtgatcagggtcttgctcgggaggaacagggcgatctggcgctcggactcctcggcgctcacgttgaagtgacggcccagcgggtgggctgcgattgccttggtggcgaagcgcggagtctccagcaccttgacgccgttgaggatggccacgcgggacttcacgtagtcgttggtcgcgccggttgcctggtactcgacgttcatcagcttgtcgtgctccagcagcaggctgaacacacgcggcgacatcggggtcaggccctcggagtagaccgcatcgcccaggtcgcggtcgatgaaggtctcgactacgcggcggtgcatgcggacgatcttgtcggcagcctgcttggcggtcaggccggtcaggtccagtttctccagcacgcccggcgagaacgcatcttccaggtccaccggcgcgtccatcgcggcagccttgatcacctggatcaggcaggcttggtcgaacttgcgagccagttcctggccgtccagctcggcgacttccttgcgcatgtcgaaggattgggtccactcgtcctggtggtcgaactggtggcggaggtacagcagggtgtcgacggtcaggttccacttgtcgttcacgactcggctgcgctccagctcttcaccggcgcggcggcccttggcctcgacgttacccaggcgatccaggcggaccacgttcgagccacgcaggtcgcggatgttcatcagcggtgcgaacttggaggtgtaggcgaagtgcttatcgacgatgccgaggtgctcttccaggtggatgtcaacgtccgcgttcttgccagcgtagttcggacgggtcaggtcgttcaaaaagctcatacgatgctctctcttttggatgtgggtttaaggccggagtagggcagggtcgttagataccctgcgccatgcctgccttacgacgctcgcgcagcgcagccatctcggcttcggatgcgttcagcggcagcttagatacttccaagcggtactgctcagcgctcagagctgccagtgcaggtgccgcagcacccaggggttggccggtagcctgtaccacggcacccgagccttgtgcgaaggccacaatttgcttcgctgcgtactgcatggcctgggcatcgcccgagtccatcagccgaccgatggcggccttggtggccgggtcagcgtgttggttgaagacgccggcagcctgcttcaggatggcctcaccgccgacggcggcataggtctggctcaggacggctttggtctgcgcatcaacataggtcaggacgcccttggccacgttgatgacgtgctgcgcctgggccgggccgagaacttccttcagatagtgctcgtcgatgaaccgaggatcgcggttctcggcggccttgccgaaggctcggacggtatccagtttgtcagagaacgcctccagatagctgatggagggcgccaactgcgggtcgccttcgaggttccctgccaaggtgcccacgatctccccgttgggagtgaaggccggcggcggcgggacttccaggttctcgggaagaactgcacccgcagccggcggagctaccggggccggctgagcgggtgcttgcggaacaacgggttgacccacggcaggtgccgctaccggctggtagtgcggcgtcatggcgctggtcggaacgggttgcggctgctgagtcgggatggccagttgctgcggcgcacctacctggccgggctggaccggagcctgcggctggatcaccgggttcggcatcacctgcacatgactcggtgtcggcgcggcggcgggcggtacgttggcaaccaggttagcgaggcccggcggcagttgctgttcgttcggttgggacatctatcagactcctgcgagtgcgttggtcatgtcggaagcgccttccagcaaggtctcttgcgcggcctgggcctgcgcggcctgctgacgctgctgctctgcctcggcctgtagctcgtcggcgctcttgtagaactgcgacgtgtctacgctgaaggctgcccaaatcgtgtccatcatcttcggtagcgagatgcggggatcgagctgagcaatcggggccaggccagcgatgacctgggaagcgttgagcatgctctgcacagcggcggagcgggacagggccgggaggcccgtctcgatagccggtttgtgctgcttggtgatcaagccttggagtagcgcatcatccacctcggagaggcagacgtaggccaggggcgactgaaggttctcggccaggagcgagtaagtaccgcccagtgtgttctctgcctcttccgcagtgatgcgtacttcctcggcagtgacgcgctcggcgtcgcgctggttggcaccatacatgaacgcctggttcaagcgaacgactacggcttgcaagctctgctggatagcagccatcttgttgtagtcgccacgctcgtaagcacggacggcttccgcgccacctggcacgtagtcacccatctcggcgtcttggtagtcatcgactaccgcacccttggcctcgtccacgaggttcaggacctccagcgactccagctcgtacaggccgagtttctcgctcagcagggacagcttggcgaagtcgccgatgtagtcctcgacgtggccgcgaccgtagtgctcgccaggggcgaggttccaggtcggcacgatgtacgggcacaggtggataggccagcggccctccttgcccacacgcacgccgtcgatctcgtggtacagctcggcgtattccatcgccgtgcccctcttgcgctgtacgtgggtgtacaggtccacgctacctgaaccggacaggttgcgtcctgcgcgcatcaggtcctgcttgtactcttcatccaggtccttggacttgtagcgctgctttaggacgatatccatccagcggccagtcgcatcccggcgcaccgcataggagcggagcgaccatgcgaccaccgtagcggcggcgctgtctcggtacagcagagcattgccagtcacgatcagtagcttgatcacctgcgtcaggaccgccagggaggcgttctggaacaggcgctgtgttgctttgcgatccacccgagccaaggcagcggtcacttcggtaatgtctgtgtcccggctgtcggcctcgcggcggatcgcatcagtgagttcggatcggaagaacggaatccccgtggggaacagcgatctcgccagcttggcggcgaggttgttcaccaggagggcaccggcggactggaagtcatgctctacgactccccggctgccggacatgggatcgaccatcaggtagggaagcgtggtcttggcgaactcgatggctcgactctccacgctcccatcccgaagtttctcccacagcatagctgcggtggttttcatggcgtacctcgtcagtagttgataccgagggtttgcgatacgcctgtgcccgcctgattccggcgccgtcgcgtgccggtgccagtggcatcggccatcgctcctaggtcaacctgcgccacgttctcggcggtgaggtcaacctgctggtttcgtgcgagctggtccgcctgctgttgcattaggcggttctgctcttccatcttgcgggcatcggattgtgcgccgctcaggtcggtgcccagcaggccatcagcgagtttgccgatgatggtcttgcccagcaccttctttactttcttgcccataaggcttggctctccggtagtggatcgtgtaccggctatcgctttcacgatggctccagcacacgagggggatttgaccccagccggcctgacggtggagttcgcggatgaactcccggaccacgcctgtattgcggtagcgcggtaggacgtactgccactgtgctgtgacgcacgggccgacgtggggatcgtcctcgaacacaatgcaggcaccgccggccaactggccatcgcggaataccaacagctcggttcgatcgttgccctcgatactgtccagcatcgcattcagggcgtcgtctttcgagcggaagagggtgaattcttccaactcctgtattgccagccagcacagcccctggagttccgagggagtgccggcctttgcgtggactcgccagatggacttgttcatcacttcaactccactgcgatggcatcgcgtcggcgcaggcgtactgctcgcaccacgtctcgcctaccggcctggaactggatgtcttccatcgtggttccaggaccgatctgatgttcggggaaggtctgctctaaccactcgatctgctgagaggtgaacgtgacaggacgggccgtacccttgcctgttctcgatccttccactgtgggtgacataaccataggtcggtgggtcttcatagtagccatctatcatatctcctatgctggttagtctattctatctagaatccttcgtagtcatctagtctcatcttctactctacctctactcttcttctaccctctggtcttccctgacctctttctccctgctcccctctacgagggccttggacggatgcacttgctcctatgtgggtgacataatcccctcagcagaagaacgcccaggagtcccgtacagcctccagattcaacgatcctctccggggcggggtagcctctatcccgagctgttttgccagttctacgagcacacaggggccgctgtacatggcgatgaactgctccctgatgtggacgtgcatccgatccacgtctgccgcataggtgcccatgctgtcgtggatggcctggatcgggataccctctgccgcacaggccagggccgtcaggcccaggtggctgctgtccagcccgtggacgaagttcggagcgatgccgttggcgttgcgtaccgggtccagctcgtccttggcctcgtacagggtgacgtactcgacagcctctgcccgcagcctcacccgcacctcctcggtcttcgggtacgactggaacacctgcatgccgagtggcgtgatccagtgcaaatccttggatgcatcaggaagggccttagcgagccgctggagccattccatggcgaagactgccgatggtactgtctcgcgtattgcgtccagtatgagcgttgccatgtagcttcccaggcggtatgacgggataccctcgggaatctccaggccggactcgtccaggtagtccaggcagtggtctaccacgcccttgaacgtggtgccgtataccagcgtcatgcagggcttcttcgtcaggcttcgggatagaccagccttatcccacaatacagcgtagccccgagcctcgccttcagcactttctctgtctcgtgccagagactctgcaacgagaccgagaactcgggagtagatgtcagctttggcaagtccaggtggcagcaggttgacgtaggctccgccgatctcgtctcggagaatggctgagtagtgctggaggccggagcaggttgcatccatgtggacgatgaacccacttcggtaagcctccggctggcctgatgcgtaggccgcccgcagctccagcagacctgcgatggcgcacaggggcgactcgtcttccgggaagagactcggatagttctccggaccttcgttgagtgctcgctggaagtcgtcccatcgctcatcgacccaggctgcccggtcgtcgaagtacaccttgtcacatccgagggagttggcgacgtggactttgagccagtacaggccgcgcttaccgagggcacgcttttcgtggaatcgcagacacgccttggcgatgtcggacccctggggattcggtgtgccccaatagtacatgcggccacgggagtcaacgtgcatcgggaagtacactgccttgccatgatgctctcgaacaactcggtagagtgcagcaaattcgcgaagcttggcggtatgctctcgctccccggtgtaccaccggtggacggagcgtttccaacggttgaaggcctccagctcttgctcactggcattctccttggcccactcgtcgccgagcgggaactcaggtttgtccgggtaggtgcgctgggggatgcccagcacgccgccaccggaggtgaagacgcgctcgatgatctcgtacacgtcgtggttgatctcgtaggccaccgattgcagcgcgttgaccgcctcgtacaccttgggcatcttgtcccggcccaggtggcgtagctgcatctggcgcgcccgcttggtctggtgcttggtacggcgcactagcacatggtgcttctgcgccttagcgctgtagtaaccgccatcgcaccagtcgttccacggtcgcggcggtgccagcatcacgctacggcctgggcctccccaggtcatcgccgccgaagggtcttgcaggaactccttggcttccggcgacggctccaggtggacgctcgtaccgccccgacctgtgaagcggttcggctcgaacaggccgcactgtatcagcggatcaccaatgaacttgccgaggcgcaggtagtcgccatccggcaggtcgatacgtgcctcttccggcagtaccgcgtccagaagagcgtccatcgtcttctggatgtgccggacgctgcgagtcctgctggtcttgaggtagtccagcgtccggtcgtaatagggttggttgaccttgaaggccaaccgcacttcgatctcgcgacagagcatcttacccatgtgggtgtaatacttcgtcgctgtgatcgttggatagttgatgagcatcgacagcccggcccgcagtgccatgactgcgaggtcctgggcgtcgatgatccgcagcaggtgccgcagctttgctgccggccccgccgccttcgcttcctggtgggcgaagatcgcttcggtcacgatggggagcatccgcatcaacatgatgcgcgccctcgggatgcggtcgatggacccttgggcaatcgccttttccaaggcaatgcgggcgtcattctgcgccgccccgaccagggcctcttcgtgggcgatctgctgctgtatcaggtccattccgtctcctatcgtctttcgattacgcgcccgatatcctcgggaccccactcggcctcggccaggctaaccgccccatccagcgtcatcgctcggtagtcacgccattccccgcagctcagaatctcagcgcggaaccagcgcagttccaccagcttcacttcccgctccaggcgctccgccatctcccggagaatgtccgggagtatgacatcgctccagtcctgatggctgaccatcgccggcgtgatgtacgctgtgacgtagttgaccccgatgccccgctcgttgaaggcccagatgacccgaacaccttcatcggtctcgtgctgtcgggtacaccaacagattttactcattacctttctcccggtccatcagggcccgctcggcggcggccattgcgttgaatgcctcatgcaccaggtgcatcaggttggactcgtcatccagcggtccgtcgatcagccgcttggactcgtgccggtgttgggcggacttgaactcgcccaccgtcatcttcttccagtcgtgcggcagataccccttgacctcggcagcccattgcatcattcgagcaagctcccgcttcagcagcgggaacccctcgactaccaggtgcatgggaagcttaccgaccttgcgttcttccagactcgcacctttgcggtacggttcagtcgtgatcgtcgactcgtaagagtccgggaatgctaggctcatgctacctccttagttgctcagcagggctttgcgctgttccgaggtgttgcgggtgtaccgcccccggctccagccaccacagccgccgcagtgatagtgctcgtacttgccggtctgcgtatgcacccagccctcttgcttgacatccgtgtcgccgcacttcgggcagcggatggtcggctcggcgtcattgaagtacacggccacgttgggatggccgacgaaccacgggcgcatcagggtgtacagctcctccatcgatcgtacgtcgtcgatgttgtacaggcgcatctcctcccaggcttccgggttgtcctggaggcaggctgcccacaggtcgaatccggggaacttgccgtggaggcgcttcttgatggtgcatgccttgtgggtcatgtactccagcttgcggctggtgaacgcgaattgctgcttggcgatgatcaaggtgtcgatcaccttgaacggtctcggcggcggcatcttgttcaggaagaaccgggcgttgatcttgggcacgtcgaagcgcttgccgttctggacgatgatgatgtcggcctcgtccagcagcttatgcagggcgaccagcaggtgcatgtcgtccagggggtcaccctggcagtccatgtagatcacctcgtcgctgtgcatccacttcgcacagaacgacaggatggtccagtcccgcttgatctggttgaggcccacgttctgcttccagagcgaccagacccagccctcgataggcgaggtctcgatgtccaggctcagcaccttcggaccctggcctaccacgttgcccacggcgccagggaacttgcgcactacctcggcagccttgcggcccagccagtgcatcgcgcccttcttggcgtacatgccgcgcgtcctgctgtcgtggaagcccagcttgatgcaccagttgcggaagcactggcggctcacctcgccgaagcgcgaatgctcggtcaggtgctcggcacccttcttgaggcccagctcgacatagacgtttcgcaggtactcattggtgaattgcttgcggagtttgctcatacgttcctcgcgttgtgctttgcgacggccatcgccgccttgcgtttggcggctgcctgccggcgcttggccagcttcgcttcgtgtttctcctcgtcggtcttgtgcagggggtagatcagcggatgcttcggcccctccagatacgtcaggagggcacgaaggtaggggatgatgtcggaatacttcatcgacttgcatccccaggaacctgccgcattcgttatcttgccttctgcggtgttacaggaccggtgcaggacgccccgcaccagccccgtttcgtggtcgtggtccatcaccgcttcgcccttcacgctgatatcgatgggcttgccgcagagcgggcacagcttgttctgctcggcccatagcttcagggtgaaggtgcgctgttgactgcgcggtatctggtagaccttcggctcactcgtcataatcgctctccctccgcttctggagcagcgcctcgtggtaggcgtccagctcgatgatccactggcggaaggccggacgaaggtcgcggcttaacagatactgcgctgcgttgtcggtaggcgttcggcgcatccacagcacctcggcctctgccagcgggttttgcttgatcttggcgtacgcctccaggatcatgtcgatggcctcgtcctcatccgtgatcggatggaggatgtcgaaggccgtcttcataccgcagagcttaccgttgaatcgatcgatccctcggatgttgtcagcggtgtcgccgccgagccactgcgccaagaagaacttccgtccatggcccttgagcttgaactggccggaaggcgtgtacgcttccttgaggtagccgaatccgccctcgatcctgctcacacacgccgtatcgatctcccaatacgggtagatcgtcatccgcaggtctttgtcgtcggaccggatgatggccttgtcctgcatggcgtaggcgtccatcatcatgccgtcgtccgcctcgaagaacgtgtgcaggatgacatcgatcccctccggcgccccgcctcgctcatgcacgtccgccacggcccgccgcagtggctccagcagcgcgggctttgccttgcccttgcgctggccctggtacggtttcatggtcggatacgtgtcgcggtacgccttcgccccacctgctgccgtgaggtgaacccgtgtccctgtgcagtgcgctaggaactgctgctccaaaatgagcttccagaatcttcggagtgcagtgtccagggtcttagcagtggccgcagccacataggcgggtccgtcggcgtcacacaccaacgtcccgcctgccatgctgcggtcgaactgcgcggatagtcctgccaggaactcttccgatggcaggcgcattagacctgcggtactgccggcactaccgggaccgccgggacttcgaccgctgccggagccgccgtctgagccacctggggcacgtcaggcagcacgttctgtgcctcggcagtacctaccacaggggcggccacattcgccacctggggcacgctgggggccgtctgagccactgcctggggaacagccgggacagccggtgctgccgctacgccggcgtcggcggccacgttgggcactgccggcaggttgctgcctgcggcctgggtcgtcggcttgatgatcagatcatcgccgccgcccaacatgatgtgcagggccgagccggggaagttggtggccgagcgaatggtctcttgcaggaagttcttggacttgccgttgtccgaggtgccttcgatgaacagggcgtcccaggtctccttggtcggcgcgtcgaagaagaaatactgcaacaggtccatcggcagttccggcacgttatacgggctgccatcgaccgggttatagggcttcatgatgccgccccaatcgatgtcgttgcgttccttaccggcgttgttgcccttggtgatcttggtgcgcttgatcgggatgatgaacgcctggccgagcatctgagcgaagtgggtatgctgcccgctccagttcatcttgtcgaaggccagcttggtcttggacttttcgttgttgccgagggtcatctcgaaggtacggaacaggccgggcttgatcgagccgtcggcctcgtaggtgtggaacaggtcgtccgggcggctctgcgggttaccggcctgcgggttcacgtcgccccacaatgcgaagcccaggcggatttgaggcgccggattcttgagcttgccctggaattccttggcgtggtcacccagctcgatgtagatgcagaagcggcccatggcggtgcccgccgggaagatgcgaccgccgccaccgccggtggaggtttcggacatgtcgatggttgcggtctcggcagccttgttggccagggcgagggcggcttgcagagcgttgagttgttgagtcatgcgtggtctctctcgtgtcgaatgaagatttaaggccggagtaggctagggtcggcctagtcccggatcacgtccatgttgaacatgttgggtcccatctcggccaccgccgggaagggaacgtccgcgatgtcgtagcccaatcgctcgctcatgtagcgggcagcgtcggccatgatgtcgcgcacgccacggttgacctcggcggcggtgtccttgtggcagtcggtgtacacggcatcgtgtacgttgttgatcaggaactcggtgaccataaatcctgggcgatgcagcatccaacggaagatgcgccctacgctcacggtcatcatgaacccagcctcgccctggttccagtagttggcgatctgcgtgtccttgaagtccatgaccgtcttgcgctgttccttgtcccagcgctcctgttggcggaagctgtagcaggtgccaccaggcgcttgccagaatccccggcggtactggcgccagttgccatccggccccatctcgctgaaggcgcctgccggcatctggtcctcggccttgtacattacgaggctggtggcctctgcactgtcgcggacgatctgccggaatgcgatggactctgggaacagggccgcctcgttgtccaggaattcctgggcctcttccacggtacagccggtgttgaatgcgataccagccgcactcgcgccgtactgcgccgagaatgccttgggcttgatgttctttcgagcctgcatcatgcgaccgtgccacgggtggttggggtccttcttgatggccacgagctggtcgtagtcgaacccgttccagttgttgtgcttccctgccaggcggtacaagtgcatgtcagtgccggccatcagtttcgccaggaggttccgatccttcgacagggccgccaacatcaccacctccagggcggtatagtcggtctcgccgatcatcccgtccgcgccgaagcgagacacgaacatctccttcacgcggctgccggcttccgggtcgtcctcgtccttcgacgggagctgctggaggttcgggcggctggacgacagacgcgttgtcgccgtcgccgtcgtattcagcgaatggtggatgatgccgtcgtcgtccacgtactggagcatccccttcgtgtccttaatcgtcccatccttgttgtaggtgtgggtgatgtagaacgaggagttgtccttgtgcagctcggccaggcgcatcaacagcttggccgcctcgaagccctgtttctccagagccttgagggcgtcgccgctggtgctgaacacgggcgacccatccgccagggtgagggcgcactggaactccgggcgtttgcccaggaatttctcacgcactacttccggaaggttggtcaggttgatcaggccggggaaccggaatcgctggtcatcatcccacttggtcgccgggatgtccgtatcctcccggaacaccttgacgctgcccttgttcttgccagcggagaacgtgatgaccgggccgtgcttggtcgccagctcggtgatggtgggccagtgccactcaccctggtcggtcacttcatggatcgggacccgaactgaggtactctcgattggagtcccccgcttggccgtaccgaagcgcacgaagtcggctttctccatccggccatcttcgtatggcacccggcccttgtaccgcacctcgccaccgtagagccatgcgctcatatggtagaggctggtatacttgaactcgaagtattccgggaagtcgggcatcagcttcttcagctcggcctcgatcccggccacctcttccagttgcttggcgtggttcaccttggcgacttcgaggtccaccttcaggccggcacactccatcgccgagaaaccgatcagggcctcgcagcgctccaggtagccagcccacatgccacgggcctgaagcttcatcagctggccgtagaacacgagggcggtattctcgatgtcgccgcacgggccggacaggtactcgctcagcaggtcctggtccatctccgaggtgagcacaccctggtcccacagcatcttgatgccgtccaccttgtgggtgccgccgtacttcggagccagctcgtcgagtgccgggtacagccacgtctgatgactcagcagatactcggcttgctgggtacaccagacccggccaccgcgtcgcaagaaggccaggtactcgtcccggtagcgggtgaagaaccagttcgattcgaacatggcattgtgagctacgatcacgtccacgccgtcgaggttgaaccagcggttgttcgggtcttcggcttcggcccggctgcggaagcgatgttccaccttctggccgaccttgccgtcaacatcgtcccgccagccggccatgacgatgtagttgcgggggtcaaagggcgacgccttgcgccccttgtgctcgtagctctcggtttcgaggtcgaggattcggatagtcgtcatttgctgtaccagttgctttgactgtactgctgcgccttgaccagtagaccttccagcacacggcggggaatctcctgcatcaggtagcggaccattccttcacgtccccatatggtcagttggtacagggagaccgcgtggcagaatcccatacggcccagcttcgcatggtcgtagtcaattcgaatcgacagctcttccgcttgcgggtccatatgggccttggtgcggaggccggggaacagcaggtccaggggttcgtggatatccgccagcaagcagcggatcatgcgttcttcctcggtgggcattctcatactttgactcctacctgtcgcagattgcgacgcagacgtcgcatgacccggtgcaacttacggcgaccggcgccgagggattggatgtcccgcgcatgatgccgaacttcggacccaacgtggtcccaagtccctgccatgacgcagatgcggaatgttccgtcctggctgatgaacacggaacccatgacgtacttcggatacagcagcgaatcccggttggtggcgtggtataccatatcttccgggtagttgcggttatgggactttcgaatcttcataccttcactccagggttactggccaggtcgcggaagcgactgaagctgggatggcggagggtgttggctgagcgttccatcgcggagacctcggcgatgcgtccatagttcggcatggcctcgtcgatgcagccgttgaggtgggcgcaggtcaggagctggatgtgctcctcactcaggccggtggcgccaacggtgccggaaccatcttccagctccacacggtagcccacgacgcggcccacgttcttgccagtcttgcccatcacgtacccgacgatacgcccgtccacggtgatctccggcttgcgcttgtagcagccagcaaccttgccgttgcggtaggtcaggctcgggtctttctccatcgacccctcgaagcccatggcgcggtggtagccgtaccagcgtagtaccgcctccatagaacggcaggattgtgcggctacctggaagaagtacggggtgtcgccccgccggcaatcttccatgaggctgcggaccatggcgcggcgctcatcgtatatgaggtgggacttgcgcgatttgcggagcacgccgatatgggtggcgtcgaataccgcgaagtgcaggcacttcagctcggcctcggtcagcggggtcttgcgggccatgcgcccggtcgcctcactgaagggcatgccttccaggtacatctcacagtccaacaccagaccggagtccaggccgggctgggacagtttcgcgatgatgcgatcctccaggccgtccagggcagggaagcggcggccgctgcgggataccacgccgtgcgcacccacgatggcacggcacccgtcgatcttaggctcgacgatcacgtacccgtgcttcttgatgatggcctcgacggccttgtcgttctgatctacgccgcgccagatgcctttctcgatatccaataccacgtcgcgcttgctcatcacacgttctcccatccgtagtacgcggccttggcccgcatcttttcgcatcgctccggcagtcgcgagccggaaccaacttccttgttcacgccccaggtaacgtccttgtgcaggtacacacccagtcgcgggccgccctcggggtccggccagttgtacgcgatgcccacttggttgatggtgaagtcgaacgactccatcacccgaccgaggctgtcggcatcgtagtagttgaagtccacgtccatgccttccaggccacggcagcccaccagggatatcacgcccttgaagataccgccctcacctgcgtcggcgtactcggtactccagccaccgtcccggacgaagcgcgggtccagggtaggaagcacgctgttgatgagcacttcagcctgatactgcgtcatgccgtacagggcgatgtccacgtcctttggagtggcgccatgcatgaggtcgcgagggaacccaccggccagggcgacgccctcgttgggccgtgcatcagagtacaggcgcagcaacagggccttgaccccggtcggcagtgcaatggaacccagtggaatttctttggtgccttcgagcacccggctatgcttagcttgcatggtctacactctcaaagaaacgacaccgtgcggcgtcgaagttaatcatagcctccacgttcgaaggcttcccgtccatctggaacttgttcttcggcagggacaggccgcgcatgacctgttgatccgcaccgttgagacggcccaggtggatttgcacgtccacagcaccctgtaccgccgtcttcgaatccttgaggcaggactgcggtgggaacaactggtcgtgaccgtcgttgctgatctgccacgtcatgaagctgatgaagtcgtgacgcaccgccatctcgcggacctcggccaccttgtactccatctcgtcggtgcggttctggtccttgcgctggccacctttgacgtgggccatcatgtcccaaaacaccaccgccggcttcatcgcgtcaatgacctgctcggcctgggccagggacccaccgtggaagtccttgatgcggatcagctcagagtcgccgccgattttctcggcgtacatcctgcgaacctcctccgggtccagggcaagaatctcgcccacggtcatgcccagggctgccgagtacaggcgcggcttgatccgccggcccttgccctcgttgttcagccacaggatgggccgcccagggtcgaagtaccgcttgagctgcggcgcgatatggacagcgatccaggccatgaacgaggtcttgcccgcatcaggcggcgctgccaccagcaccgaggccccggcgtggaggcccttcatgtacgccggaagcaccagccccggcagcttgatgccgtggtcaccctgctcctccgccaggatatcaaacacgtcgtccgtcacatagtcggtcggcgtactgaccccctcgcggcgcagggcctcgtcgctcagccggcgcagctcatacgccaggtcgatgtcttcgccctggttgtactgcgccaggagggcatccaccctgcctgaaaaatccagttcgttgagctgggacacaacgccctgtagcgagtccgggtctaccggcttgtccagttggttgacgaggttcaggaccaccgccagttgctccggctggtagccacctcgcagctttatcagttcgcgtagcgcctgcgggtctaccttctgatgcgctgggtagaccttccagtattgctcgatccagtcgatgacaaagcacgtctccggccccatcatcccttcaggcaccacactccgcaacgtgcggaagcggtccttgtcactcagtgcgtgtagcgtcaatacgtccaattactaggctccttatctgctcgcgggtcaggtccttgggatcgaacccgtccggcgtgggtattacttggccttcgataagcagggaccggagccggcgcatcacgcctgcactaccacggacacctgccgggtcgccatccaagaagatgaaggcgcgcttgcaggtctgctgcaacatgatcgccgccagcctgtcgcgcagccttgtaccgttcagaccgacagcaaagacttcgggacaggcccaccgcaccttcagcgccgacaagtagtcttccgtcagcacccatggcctgcccattgataattcctggggccatccatggtaatccggggcaggatacccgtagcccacccacttgggattttggtcggcagtagcgcgcccaatccagcccgcgttggtagggaagataagccgatgctgcctttcgctgtacagcagcggcagccctggcgtcatcacgttgtagtcgatacccttggacagcagcaaaccataaagcgattgatagcagtcggcttgcgtccagtccgaggcatcctcgggccagggcatgaagcgttcttgatccgcgcattgtaccctccgcacatgcgttttctcgaccacaccaccctcctgacaggagtagcagtaagccacccagcggtcaggcaggttcttgcaggtcatgttggtcccgccccggctcatgctcttgcatcccaggacgtgtcggaaccggcctacctgcccaaccgccagggattgcgcttgctttagccaggagtcgcggcgcagtgccattggtaccattcctcccacaaaggccgcagcccacctcgggcctcgaacatgtcctggaggtgccaggtcatgcgggcgccgtaggcgggccgccgttgttctgtgtgagcagcacgcccagggccaccagactgaaggcgactccgatgaccagcggtttgttctcgataagccatgtcatcacctcatacgtcatggccgggtgccctcatgtgcaacacgtccggctctcctgctgtccagttcgcctcgcggtgggtggtgctccagcccaagtcggcgtagaacggctccaggaactcgaagcaggtcagatactcggcacccgccagctcggcggcccgcaccagctcagcgccgataccctgcctgctgtgtcggtcatcaacgcacagggccttcagttcaccgcccactacgaggcaggaacctaccatcagacctgacaggtcgaaggcaccgagggccagcacgcctcccttcttgcgccagatgtcgctatcttgccagccactccggcggaggtggagcacacactcggcgatactcgcactcagctccccggctggactcaggctttcccggagcgggtggtacttccgctgccagaggaaccactgccaccagttctcggcgttgctcggggcttggatgctgaatacgtggatcgtcctgatttgaatcaggccgggatgcaggctcagcggatacaggctcgtcttgctcatcttcgatctccctcaacttgcgctggccgaagtcaatcaggtcctgcgccatgtaatgcacaaggctgccggcacacgccgccaccttgtcccaggttgcccgcttaccgtcgatgcacgggaagacagcctcgtcctccagctcgacgccgaagcggtatccgttgtaatgcgtgaaatggtattgcatgttcgtgatcctccagactcacacgagagggcgctctaggaacgccctcggatttgaccccggagtaggccctggtcgcttagacgagcaggtacgtcagcacgctacccacgacgccgccggcgatggtggctgcgaaggttgctgcctgccaggtgtccttagccgccgccttcgcccgctcacgggcctcggcctcagccttcgccacggaagcgcggaaggtataccgcacgccggtcagcttgctgatgagctgacagacggccttggtcggggccaccgtcagcaatcgctgagtctccgcgccgtcccaatacaggccggcccgttgacctacctccaccagccgggtcaaaccctgcttgaggccgaacagttcagcgcccatctcgttattccggtccgcaagcttccgtacccggctgcgcagcggtccgtccatttctattccggcatcgcgcagggcacggtttaccgccagcttggttacgtgcagatcgtgtagacgtacctcgaagtccttggcggacagcgggccggccttcttcgataccagcgggaataccttgagcagcagtttttcgtactcatcggcgcgcttcgcgtcggcctggcacaagctggccgctacccgcgcctctagatcggcatagccacaggtgctgacgcgctccacgttatccaggcgcacctccaccttaccaccgtcacaggtgacgccgctcacacgggcggtgtaagtcccgcccgaagcctgtttcttgggcgtataggcgtgggcgaatgcccggctcttggccacccggcgcatctccggggataccttggcacacggcacgccgaacatgctggccgccagcttggtgaagtgatcgttgcattccattgtcagactcctgccagtttcagggttacggccagacctgcggtcagcaggcatacccaggccatgatggttgccttgcgagcgcggcgctcttgtgcctcgtgggcatcgtgcgctgcgttcaagtcgttctggagcagacggatcgtcgcctgatggctgcgaatctcgtcgatctcccagcggcgcgcccgctcggcggcctggaggcggcggctcagggtgtcgatatcctgggcgcgctcctcgcatacagccagggcggattccaggcgatcttccagggcctggatggcgggtgccttctgtacgctcacgctgcgtaccgggccgctgatgtgctcggggttgtgcttgctcacgttgactcctcctatggtatggctagctcgcaataggcccggcagggccaggcctattacgtgcgggccttactcgccttgggcgatggcttcgtccagggtctcggcggacgctgccggggcctgcactgcgcggatggcaccggccttcacgtccagcagcttggccggggcgctgtcgctgaagcgcaccagtacctgatagacgccggcgactacgctgatgacttcgccgctcagcacttcggctttctcgcccttgccgtggtcgaaggtgatcacgtcgccggcaacgaggctggacaggcgctcggcggtttgcagggcgacgaccgcttcgttgtagacctcggtcagcttggtcagggcgttgtggtggaagacgacgttgttgcggaagtcttcgacggtggccggcttcttgatgagcttggcgcccaggacggttgcgacggtggtttcggtggtggtgttggtcatgatgtagctcctagaggttggttggttcgcggcaaggaatggccacggtggaaggctggcgcaccagccttcgccttggtcactcggcggtgagtgtcacctgggtccccttgtcggcgagggccatgcgccacccgtcgttgcgcagcacggtgggacgcggaccggtcaccttggcagggccgtcgtcatggataaccacgggcagcactgcgggacggcccgtgctgtcccaagctgctacgccgatcaccagtgtgccgcgcttagcctcgggctgcactacccgatacatctcaccggaacgcaattccgtgaggtcgaagagacggcgttgctcgcggtcggtgttgtgggtatgggtgcggatcatgttacctccggtaggttatttgatgttcaggtgacgcttcagcccggtcagcaggccccggcctactgcacgtagtgccaggaatgtgcccacgatgattatgagtggccagaagcacccgatcacgcatgcgtcctggaactgcacttccgtcgggttctcgaacggcggcgacactgcgatgcagtagcaggcgcctgctagtatgccgaggcaacagtacaagccgagtacaagcagcgcggcgatcattggccggcctccccttgaacaagtttgatgtactcacccgcacccaggcggcggcaccgccagtctgtgttgagaatggccgtacccaccgcgtactgcgcggggttcatgctgtgcagtacgatgactgcctgagcgagggcgggcgtctgcttggtcgccagcacaacggcgccctctgccacgctaggcgtcaccaccttgtagagttcacctggtgacaggcgtcctacggacaagactggcggcgccgggtcttcaggcttgacatatatggtcttgacggtcattactcgccctccttcacgaggtcagtgcgatgcacctcttgtacttcacaggccgggtagatagcgaccgcgccgccgaggaaccagagttcgacgaaggcgtggccggcgacgatgctgtcggctaccacctggcgagtagttccgtccttgagacggacgacgtaggtaggattcatatgcgcttgctccagttcacgatgaggaaccggctcccaagcaaggccgatcggcgatgcttgcgaagccagcgtttggccgccttgcgtgagtagaatcgcaatggacgcacaggtcgcttgcgactccacacgaaggcacagcctcctgatgggctgacggctatgatgagccacttcatttacgggtcggtagctgtctgatgaaccgcacgttacgggcctcggcctcgataaggcgcaaggtacgctcgcagcgtacgtggtagatcgtcatacagcgggacggtcgggttatggcttcaatgatgcccttggtgcctgccgcgtcggcacccaggtagcggtcgctgtagttcaccagccccacgcggtggccgatacggtagggatcacgcgaggacatggtacgaggttcctgcaatgtcgaagatcgggcgcccgttcgcgcagcccttgcggtattcagcgttgatccagccatacgcctggcaggtgacgtgcccggacagcgggctaccctgtaccagcagcacgtcgaatccttcagagtccaggtcccggctcaggcgatacgcttcgtcatagcggttcacagttacgccggcgcccactaccacgaacccgcctggggtcaggacgtgcgcggtattcaggtcacccatacggaagccatgggcgcacagcgccttgtcggctgcgttgaatgcgttcgacgggtccttggggattgcgatcaacagagtattcaaagcttgcatggtttagttctcgcttgtgatgagtccagcaatggccccggagtaggcgagggtcgcccgccagggccatgacttgagtcaccgcttcaggaggtggatgaagagtaccgtcaggccgctgaaccacaacatgcgcagttcatcctcgccgaggttgaggccgagttcgaggaagggaagggcgatccagaagtccatggtcactcccccttcgcctggacggcctgctcgccgtacgggaactgagccgggcggctgtactgtgccagggcgatttggcgttgcagacgttgcttgaagctcatcgtgtttctccagttgtcattgattccagcggaacgcccgcttagcaggcgttcgacttgagtcaatgggcagcagcgcgcttgctctgctcagcgataggtgcagccttggcggccagcgcttccaggtcacccagcagttccatgccgacgatcaccttgcccttggtctgagcctggagcacctgctttttgatcgtggccagggcagcagccaggttgaactcctggtccagcgctttctcaggcttgaagctgtaccacgggctgttggtggcgccgacgagatcggtcttgccgaacttgttgtacaggaagggtaggtccttgttcgatttcttgtcagtgttaacctgtaccttgccgtgcagcaccaaccactcgaccagcgcattgcggcggctgcccttcggcatggcttcatacagcgccttgactacggtcacgtcgccgcactggtcgatgtggtggatgatcgacaggccggtcagttggatggcttcgtccagttccttgccacggacacggatggcgtcgatagcgcggttgatctcttcggtgccacggaatgcgattacggttttggagattgcgttggtcatggtatgtacctcagatggatttgttcaggtaagcagcggcggccaggtagccagcactgcggggagtggtcagggtatcgacgcggggctgcttagcttgcgcctgctcagccttgcggaagatcgggcagtcggcgcctttcggcatcctgtgcgctagatcaatccggcgtgccttgtcgcggcgagccttggcggccttgcgttgacgcggcgtcagttcattcacacgtggcattacaaacccttcccttgcgacttcttagcgttccacccctttaggatgttccgcgccttgccttcgctacccttcacgaaagccttctgttcagggttgtggtagcgtcctggcgctggctccgggtcggtagcgtagcgcacgtcacgcatcttgcgaagctctttgcgcccttcgacgttatcctgtgcgatgagcttagtacgtttggcttcccagtcccgccagtacgctacctgagcagcaaagggtgacttgggagccttagccttgaagtgtgccatcggcaatcctcactaggtctgtctcttgaatcccctcggtggaagggcctcaagggacaaaccttggcattggcatagtccctgtagtatcagcggttctggcttgtcctgcgcatactcttcgggatcgtcttcactcatcccccgtaccctttgcgctatctgcctggccttgttcaatcggcccgccgatactacccagcatactgtcagtcgcgattaaccgggtattctagtcccgatcccactgacactctattcgttcccaccggacctaccataggccctttgcttaaccgtggacggggaggcttcccgctcagactcttttgggtgagtcttcagcacccgacaggtattccctggaaccctgcctaaccagttgcagcttcggtcaacctaccgcaccagtccatgtaccgctggtgaagcttcgaacctctaccgccagatggctcagccatcctttcgtcttgccgcgcatgttagagacttgcgcttgtcttgtcaatcctctgtcggggattagttcgtccagttctccggcataggcccttttgctgaggggccatcaggtggtgcgaactgtaccgcgtgtcctgcaccgtgtcaatccctgcgatgatgcctgccggccttacacatcgttggtcatgccctaagagtttgccgtgtcccttgcgcctatggcttgtgccgcgcttggaaggttgcaatctcccgtcgttctggctgcgcatcctaccgatgtcctggcagggtgtcaacccctgtctccaggctgcctgtagaggcgttgttgcgtgaagacagggcgaactctacagacctgccgcccacgtgtcaatacccgcgccagggcgctccctggagccttcccacgcgtatagagacccacgcgtgcgaggcttagtctggctagccaggattatcgttcccaggtaacgcaaatccaccacccagggagcagccacccagccagggccaccaccctgaaacccgcgtggcactaaggctgcggttatgtcacacacaatggacaaataggcgtccatcagcgccagcggcgcgaccgaggcaggccgagggagtggcgagggtaagacagcaggaccagcggtagcgccagggagacagacccagggagcaggactagacaagccaggtagaggcgagtagagtacgcggcctagagggaacaacccaggtaggaccagggaagctccagggcagaggcagccaggcagagggcaagggcacagcccaagcacaagaggcaaggccagccactcccgcaaccaccaccagaccagagggcagaggccccaggaggaacgagatgctgagcagacaggacagagccgagcgagcctggcaccagcacgacgcagcatggcagcggaagctagccaggtgggcagcagaggatgagcagcacagcccgtacccagcggccagggccagggccaaggatgaccggaggctagcgctggtggcgcaccgcagggcgctgagtatgagccgatggaccgccaccccgccaggggcttgacactcccggcaggatgcgtagaatgggcggcgaagggcagggaagcccaccgccacccggcgaagccggaagctcccagggatgacccaggcaccacccaggcaatgcgaggggatggcccaccagacggagggcctacgggggaagggtgggctgatcagagtcgggagggttctcacacgacgatatcaaaattggacccggagtaactactcccagcccaggccagccaatccagccagccttccagccgacctcaataaaattccagtagttccagtggagcacccgactatgcaggtgctcggcttgagctactcgatcacttgtagaccagggccttggcggtctcgacagcagccatcagctcgtcgagatgcgcgaccagttcagcgcgcagcttggtctcgttgtagccagaacccagggccgcttcttccagcggacggatcaggttctcgatggtgccggcgaaggcgcggaggtctttctgagttgcagcggcgaaggttgccatggttcagttccttgtgttatggatggagtcaggttggacggggctgtagctcagcccgccggtgcggtgtatacgaccttggtgatagcaccgttggctacggtcaccttcacggaaccaccgccgtccacgggcagggtgtcaccgttcttcaccttgtaggcggtgagcgggtccggtggagtagcgccaccctcgccgcccagggcggtggctgctgcgatcacagcggtggccttggccttgacatcggcctcgtccatgtcgtgcagggcgatgcggttgtcggtgccgggctggcatacctggtagaaggtcaggccggtgttacggccagcgaggtattggtcacgggtgttcgccatggtcagtctccttgattcagggcgttgcataggtccagggcgtcctgataggccgctacagcgcggatcaggccagcctgggtggtagggtcaatcagtgggtgttcgcacagcacagcgggcgccggggcggttgcacaggctgtcaacgacagcagcaggcacaggccggtcagcccacgggcggttctggtccagggcacggtccacctcctggcgctgggtgttggtcttggcggcaacctcctggacgtggcgctgtaaggtggcatagcgcacctccagggcctccgcacgggccgactgccgcttgatctcctcctgggcgatacccaaggcccggtagctctgaacgaagccgtatgaggctcccagggctaccacagcaaggacgagtattgcgacgatggttcgaggcattgcttgatctccgcgttgcggcgattcacgaggcccttggatacgaccttctggccgtcgatcgtgaccttgttccacatggccagggcttggcagccctcagtggcgcggccttggttgaagcgcttgaacgctgtgctggttgtacagactggacccacgttgtagcagaagaacgtcagggcggtttgctcgttgacgttcagcggcaccttgatggcgtccaggacgatgcgctcgaagcgctggtagtccttgagcgtcatctggtagcactgctccggtgtggctttgtcacccatcttgaccccggcagtggtgccagagcagatggtgggtacgccggcgatgtctcggtaggcagtggtctcgctaccttccagggcgacaaggccggcgagggcagccgcaagggctgcgccgcgcaggggcttgttcacttcttgaacctccggcgaagctccgcgatgctatcgagcatcttcgggagcagggtgatgagctgggcgcccacgtagagcgcggtgagtaccgcagcacagaggctggcgatctcatagggcgagtaaacggcgatccccacgccggtgacggcgagggtgcctttgcccgcctcggtggcggtatcgagcatcatagtcttcgtccttttgggcggcccttgcgacgctcccggcccatgccgagagaccgaaggacagacttagtgtaacccatcgggttgttcagccattccttcttggcagcctcttcacgagcgcgggttgcggcttcgtcgtcctttacgagcgtgggtgctagctcgcggacaaggccctcaagggcatcgatccggtcgtccttcggcagtgagcctcggtcggtggtgatgttgtgaatctggtggaacacggagcgctcattgcgcttgtccgctgggtactgctgacaggccacatggtcggaatccatcgccgatacgtggaagatcagacggtgccgctgcatgatgggccgcagggtgtcgatgatgcgacgctctttctgtccggacttctggcggtcttctacgccgatcccctcatagcggggcttgttggtgtccgggtcgatggatcgcatgtggttgcggaagagctggccaactgcaccagcgccgaggtttttctcgacatagatcaccttgacgccataacgcgcagccagggcaatacatttctccaggttctcctcggcaaagccacccttccagccgccgatgctcacgacgtggatgtacgggccaagagtcccgcccacggcatacgacagctcgtcgccaccgtcgccggcagggtccacgaacatcgtcatttgctggagtggtgcccagccgccagccatcagcgccggcaggtacagctcaggtttgatgaccgggaatcggtgggcgtcgaacttgagcttgaagcgctcatcggcagcccaggccacttgctctggcacgctctcatgcgtggcgtcgatgaacagcaggtcgcgcagcttgagctgcatacgctgctcgtcggcgaggctggtgtccagcatgtactgaagctggaagccctcggggccttggtcaagctccttgtcgagcaggtcctcttcgttgtagcgctgcggatcggcagcccagccacgggtcccatccaggcccttgccggtgcgcgggttgtggcctttctcctccaggcgggcaatgcgcgccaggatggaaggtgcgagccagtcaccgtagcgttcctgctcatccagggtcgggaagcggcccggccagatgcgcatcaggaagccccgcgccggcaggccgttgtagatcgactcacgggactgcggcgtgcccaggtagagaatcttaccgtgggtacagatagaggtgaactcctgcgactgtcgcgtcagcttggcccgctcggtggcggtgaggccgttcttcgtggtctcgatgtcgtcagggatcaggatgtcagcccggtagccctggagggcagcggtgatcccgatgcagttgatggaggccgatttctcgacgcccttcaatgcccagttcacgtcgaagctggtggccgaggtacggtcacccatgcgggcctcggggcgcaggtacgccagaaggtcccagtgcatgatcagcttcgtgatcaactggccgttctcctcggccttgtcaccggagccggataccagcatggcgcgggtagccgggttctgagtgatgcaccagaccacgtagatacaggcgatggtggacttggcctcgccacgctgtgcagcgaccatcgccttgttgggcgagtcctgcatgaagtcggcgatgtcgagctgcatccacgtcatcttgaagccgaggaacagcatggcgtccaggcagaagtcccggaagcgcgggtacatgtcccgcacctcgtgggctatctggaatcgttcttgcggcgtcatgctgcctcctagtgggtgtacagtcgttccatctcatcgtcggtctcaccggcgatgaagccctccagggcgatacggcggttctccgcctgcgcctgccgcatttcctcacggagccggtcgatgttgatggtgtcggacggatcgcaggtgatctcgttgtccttgaggaacttggtggcggcagcgatatccgatgcggggatcgggatgtcgttgtccatgtaccacttgaagttgcgttcgatggcggtgcagaccagctcgtgaagcaggcccagccgctcagcactcgcggtctgctttttgctcattacatgtgccctctgaattggacttggaagcgtaggttggttcccatgccgcacttgaccagaggccggaacaccttgccggtgtccacctccaggtgctcctgggtgtagttctcgttctgcgtgcgaacgtacatgttaccgcctcgggtgtagggtacgatgacctgtgcccacgcagttgcgccggggcgcttgtcgtcgagggctaccttggcatagtccacttggcccagctcaactacgatacgacggccctgctgcacgttgaagtacgatagggcgccggtcttgtctgcgcggacgaacacaaagacgtagttcatattgctgtcgaagtccaaggatatcgtcgagatacccgcgtcgatgccatcgccaatgcgcacttcgttggtgccgtcctcccagccgaggtaggtgccgtcattccgcagcatggtgcgccatacccggacgaatagcccctcggaggggtcctggatggcgacccctccgtcgcagaagtcgagcacgtcgctgatgtcacgacgtgccctggcacctacaaacttcgacttggccttgggatcgaggtcttcgttgaagtcgtagatcagtgccatgggttatgccctcgccaccgagaactccattgtaatggagaactcctgagtgttgttcttgactacgggagggtcgatggtgagtgcgtagttccgcccattgtaaatctttaggtccttacagccggtgataccccccggcatgttgccgttatctacggtggcccgtagcataagctgacccttgtaggtgccgcgagtatatcgcgggtacagcttcacccactgaccgtcttggacatcggcaccggacgcattcttgccgtcgatccgtggactctcgttgtagaagatgtagcgctcaccgtagaggttacgccggttcgcgaagggcagcggggtgaggcggatggtacgctcaaccccggagatcacgaacttggcctcggccatcgccacagccttgctgcgcagctcatactgtacgtcgagaatctcgtcagcctgaactaccagggtggtgggttggccggcggcgtctttgatccgggtgtaggatagtggagtacctgccggaatcttcgcgccggtgttactctcaaaccccaccgcggattgagctacgatgcccacggtggccagtacctgaccggccagggtgcctattgggaagcgccaccgcttgtgccagtaaatccactccccgtccaggcccgaggtcacgtcgccgttaggggcatacgaggtggtgcgccgaacttcttccggcagggagggcgcggcggggttagggtccgcagtgctggtactcacggccagggcctgggagaacaggtcagaggtatccatggcgcaaatccaatcaagacctgcgttagtgatgaggttgtcgaaggtgtgttgcgccaggacttcacccgtggctttcatatgggtcaccgtgtagcgacccttaactcgcgtctcaaacattggtcagttccgcctgtttaattgctgttgaggtggtgaaggcgtaaggctccacgatatactcagagtatacgaccacaaccttcaactccgcgcctaccactgcggtctgcgacgagaatgcgtaaggttctgcggtgtagtccttaaccgtatcgcgcagtaaaactgcatggatggcaggtcccgtcaggaacccatcgccaccgccgtagccgagctgagtcagcgaccgcagcagcacgcttaccacactggaggtcgcgtggtaggtgtcctctccgggctggttcaacacctcgtgcagggtgtcgcgtgttagcgctgccacgatgttcggcctacaagaccatgcgtcatccgtagccaggatgggatatgggtaggtcgccaagatgggcttgggccgccgaatttgagaggccatgatgcccgcgataatgccgcgcattattcgtcctccatggctccgaacacgatccagtggttaggcccgagacgcttgagggtacacacgccattctcgccgtagagctgcatggtggtgttctgcaaccggttgatggtcacgccggggccggccacgatgttgaggtcgcgcacacccgcctgttcgaagtgaacctcgctgaactcgatccagggtgcatccgggtcttccatctgcatggtcagggtcagcggcttatcagcggtgatgcagcggttccagtaaccacgccagctcgggtcgatgtccgagtcttccgtaacggtgcgaatctcggcgaagcccagggcgcggcgcagcgcttcgttagcggcgtcgagtgcctcctgtgcaaggcggcgggcctcctcggcgatacggatcgcgtcgagaacaccatccagtgcgaggttcgcggtgttgatgccctcctgcacggcgtacagaagctgcttgttgttcgcgtcgatgtagcgaggcaggaacgggatgccctggctgaactgcgtatccggcacttgggcgggggtgtcgcggaagatgcggacctcttggccctgcttaggcacttccgcaagctgaatgttggtgttgtccacccacgtatagtcggtggtgagtatcttgtcgacctggacgaatacgtcctcacgacgcaggaatgggaagtcgagactgaatacagtctcgaccccatctgcaacgtggatggtctcggggttcttgaaccgagccacgctattcccctttgatggattccaacagcaacttggttgccgggaacacgttgacgaaaggcagtgcgcccgccgcgccgttgacgatatcgccagtggctgctgccgggtcgtcgccggttacgaggtctcgaacgcctcggaacacttcgttggagtgttcagccagtccgaagaccggagcagacattcgggagtggccagtgaccacaccccacatatcggcggtgaagcccagaccggcagtgtagccgatgccgtcgatggccatcttgcggatgccttcatcagaggtgtcgaacttgccgttgatcgctgccttggcacccatcatcagcgcggtgagcggatactggaatgcgaggagcgaggccacgccaagcacgccggagttctcataggttccccggaggagcttgttgtgcgcgaaggccacaaagctgcggaactggcccaggatttggccgacaggtgaccgagcaaagcccgagttctgaccgaccctgccgtacagcagcgagtcgtccatgatccgcagtgcggtgttcatgacggtgttcacgtctgcttggctccaggcgccccaattcatcgattgggcgttccttcctctgtatgtgacataaccgcgaacccgcgccaacactggcgtccagtccacgtccttcccgtactgctggagcacgcgaagggctgcttcatccccctgagccgcccgcgccaccttgttcaaggtgaggttggcgttcatacgggattgccagttgtgaatgaacttcatgccgttgagcaccgggacagcctgcttacctgcgtgcaggaagcgatccatgaaggtatcttggctggccaggaaggtgtcgaactgccgcttccagggcttcatccggatatcgttggcgaggttcaggccgaggacggtctgcatctcgtcagcgaggtccgggtcgcgacgcatggcgcccacgaagtctcccaggcgggagttcagcatggccttcatgacgttgaagacgccttgacggtgcgccatcgtggccagctcggcgagctgatacacgcctgagaatcccagcatggtggcgctggtcaggccgctggcccgctgagcaaccgggccgagctgatgctccctcggcacgttgccggtgaagtccccgaagactccccgcagttgccccgtcagctcctgcaccttatcggtgcccaggtgtgctgcctctcgctggtactcccggatgaaggcttcgatctccgagtcccccggcatgcctgcgcgggccaatgctgagcggcccgacatactgccggcgtagttctccatcagccggtccaggtctcggtcgatcaggtcctgcacccgatacacggttccgttgtggttgatctctgcggtcatgtccagcgacagccggcccttgccgtacttgacggtgccctggtcggactgcttctgctcgatcttggccatgatgctgtcgaacttggcctgggacacgttggcctcctccagcgcctgccggatgaatgccgtgtccgccacgcccatcgcgcccatgaactcggagcggattccggtggcccgatcccgcgcccgctgcacaatggcctgtgcgatggtatcggcatcggcgcgctccagcccagggatgccacggaacacggcctcgctgatggcgcggcgggccaggccaggggcggcctcgtccatctgcgccatcttcgaccagttccatgaacggtggaagtaccccggtcggggagcgaagtcctcgaagccacgcacaccggcttccctggcgcgctggcccatcagaccgtgaatctcgtctgagcggtcggccagggccttgatggtcggcggcaggttcgggtccacacggacgctgccgtaggccgtccactcgcggtcccggcgcagcagctcgcgggtgacctgctcgttgagctggtcccggactgccatggcgcggcgggagttcagcgcacgtgccgtcaggcccacaccctgctcagccattgccttggccatcatctcgtcgtaggacttcacgtaaccctcgaactcgttccgatagcggcggagatagctcgctgcgttgtcgttcgtgctgaacccatcccgacgtaccgggtcgtcgataagacggctcaggagtcgccgtgcgccctccccaggctgtgccaggaggtctgcctcgctgaagaacctgttcacgaagccggcaccctcacgggcacgttcacgggtggtccgcacgatggtctccaggctggcctcctcggttaccggagcgcccttgttggcccacttggcctgcgccttagtgtagccgggcatggcctccataatcgtctcagaggcggccaggacgcggctcagggccgtgtcagcatcggaccgcagacccagtagggtgcggatgccctccacgaagcgggaccacaggcccggcccgccgtcactgtagcggaggcggttcagggtcctttggaagcgggtatccgtcaggccccaggctaccagttccttgacgttggccagggtgttggagttaccggctagcagcgtctcttcgaactcggacagttgccgaccggcggcgcggtcctgcttcagggcgttgagcacgttaccccggacgttctccagggtctgcatggcctgagccaccttcggactcatcgcgccaggattccgcaaggcggcgttcatcacgcccacggtggcagcgtgaaccgcctcgtggagcacggtcaccgggttggtgccaactcggccaggtgcggtgctgccgcgtacctggaccaaggtgtcgaggccctgggtggagtgaatccccgccgtacccggtttgaggaaggcagagctggcagtgtcaccgccctgcaccacacggaacgcggtacgctgccccaggccctccagggtcctgatagtatcagccaccttggcggcgatgccctggagcggcttgggcacctctgcgtgggtcttgaggtggtccaggacctcagacagcttccggcccgacaggctatgcagctcgtcgccgaaggcagtgtcacgtcgcggaatagccggtatctcagcctgctccacgcgggcactgacacgggatagcacagtgccctcgtccagcaggtctaccacgtcacctgccttgaagccgcgtgctgcggcctcctcggcggtcatggctacttctggcagcccgacagtaggcgccgatacttcgggcacatgcggttgcgttggggcctctgcggcaatgcgtcccgcaccagaccccagcagagcacccacgccagcgccaagagcaccagccatgatgtaggttccggcatccacgtcggcccctgcggcatccagcccagcaacatacccgacttgcccagcgccgccagcagcagccatgccagcgcgaccgagccgcagagcacggccagcgccgaaagtaaccgcatcaactgccagagcggcagggtccagcatgccagccgcgaagttccagtacgggttgtcccgcacgatttgctcgtcctgctcataccgttgaatcctcgacaggaggtaggccgcgtcctcggcattgccggcacgggccatgatctggagatagttgtcagtcggctggatacctgccgcctggagcgcctggaccccataggtcccagcgtcgaagttagggtccacctcgccggtactgttcgccgcaaggtctgcgtcgagctggagcgcatcgccccagcgtccgacgagggtggactggttccagagtgcggaagcacggtcaagggccggcagttcctggtccgctacgatgcgttccagttcccgcgcattggctcgttggcccgctgccacgttccgttctccgatctcgccacccgtcagggcgtcgaaccccacggtaggcaccgcgtcaagttggccctgtacttgggcctcgtcgagctgtgcttggtcaaggggatacttgggcgtcatgcggcccttgaattgctttgccatgtcttactccgctgttgcggcgctgtaccaatcgacaccgatttgactcggtgtatcgaagtggggcgccatgcgcttgatgaatgcctcggcccggttgggcgtctgcgtgtaccacttgctgtttcgcacaccagcctcgaaggcttccttgttgcgatccttgatcgcctggaaggtgttacggaactgccgggcacgtccttcgcccatctggaaggccataccggccaatcccaggatagaggcattgttcgtaacgcccagctcgtcggccaacctcacaccctggtcgagtgcgcggtcggtgtcctcggcgaaccactgcgcggcttgctcgggcgtgactgtagtgcctgccccagcattgccactgcccaggtaatgccccaggcccacactataaccatcggcatccttatacgcctcccctcggtaagcctcgaactgagccagttccttccgccagttgaacacgtcctgcttcagcatgccggcactgttgcccccgttcatgcgaatgtccgtgccactgaccttgacgttggccccgtactcggcgccccgcatagcgttcagcttgtcggagttgcgcttgagcacctcgttgcccaccgcttgtgggtccacacgggtgcggtccagggcgaccccgttctcgtcgtactcgacggccaggaggctgccactggtgcggtcgtactcgaaggcgactaccgacttgtagccgaggagtccttcgacatgcggcttgtgctgctcggccaggacggttcctatggtctcggtgtcgttggtcccgaatagctgctcggcggtggtgccgcgaggcaggatcagcggcgcgctatcgcggcggctgaataggtccccttccttcaggttccgaccttcgcctacctggatggtgcggttacgcacgttggcggcggcgatctccagcagggcctcgcggcccgtgtcgctggtgagcagacccgcatgcttgcggtcgctggccagccagttcgcctcgtcgatggtcgcccggcgatacatgctcaggacggcctcgttgttgctcaggtcgctctcgccggtcagcatgttccaggctcgaccgaagatgttgttcacgaacttgtcgttgacctgcttaccgaggttgtccttgaatgccttggtgttctggcctttctcgaactcgtccatctgcttcacgacttcggcgttggcgctaaactcgcgcagagcttgagctggtgcgatgcccatcttcatctgcttgagtgcccaggccacggcgccctgctcggcttccgggatgccggatagcatcacgttgccggcggatgggttgatctcctgggccgaggccacctgttcgaagatgctgttcagcgtgttgaccagctccgggtttgcctcgccttccttggcggcctggatcatgcgcaccgcgctgcctacggactcgccgtaggtcttggggaaggtccccaggcgcaggccgagctgtgtgccctgcacgagacggtcagtcaggcttgagccgttggcggcctgcatcttgtcccactgctccagcgcctcggtgacgttggtacccagcgtgtggagggcgttgatgtctccggcttccaaggccgccatgatgccctgcatgcgctgagcgttgcccaggccggtcatggccttggtcatgaacgagatggcctgagcgtcgctccagcggccctcctcgaccatgcctcgtgagtacgcctcaacctcggcaaggtctgtgatggcgccgttggccacccgctgctggaagtccgcgtcggcccgcagggtagccatcgattccttggcgcgggtctgagccttcgacttttcatagaggccgttgagcgcacgccgatcatcgaaggacatgctgtccaggaacccggcatcgcgcaggccctcatagatgccccgctggttcatgtccaggctggccgccaggaactgcatgcctaccttgtcgcgcacctccagcgggatatcctcggaggtcatgatgttggtatagaacaggccggcctcttccaggctgagctgccgggacagttcgtcgccggtggcctgagcctgcacagccttggccaggatgctgttaccctgggtgcggaagccacgggcggcctggtcgatggaccagtccatgtacgccttagcctgcatgccgaagagctgttcctcggccttctgctgctgcgccagcgcctgtaaggcatcgttggggttcatgccctcggtcgaatccaggacgtgcgtagcctcctgggacaggtacttgcggaactcctcgggagtcatctcccggcccttgttggcgatgaatcgctgcatcttgaggctgaagtcggcctgagcgatgcggtagtcctgcttgcgccagccgcccttcacgaatggtttggccagtacgttgctgtctactgcctcctcagcctcgccggccatacgggcacgctcaccgcgcagaacttcctgctgcacgttgtgctcgaaccatttgccagcgatctgctgaccggcacccaggatgccgtcgagaatctgcgagcctacgctcgggccgctgtagttgatctcggagtcgcgcactccgcgccgagcactctggcccggctggagttgcgtctgtccgacgttgatcccaagctcttgggaagcacgttgcgattccgccatcagttgcctcctttaggcgtggcgccgaacttgaagtattgacttgcgtacagggaacccgccgacatcaggccggccaccagcggggaccgttgccccgccgtggtactcttctgccccagcaggccggccttcgcctgagcctggatggagtgcgcctgctcggcgaggttccacatctggttgtccaggttgtcgtcaatctggatcagggcctccccgacctcgcgctcgatgtccagggccaccgcatccacggatgcacccttgacgccgaacgcgccggcctgagcctcggcactgccgccggcgagcatcccctggcgcttggcctccacctgcgaggccacggcctgcttgcggtagctagcggccatgacgcccaggttggcgatgtcgcgggcagcggcgcccaggttgtcgaggtccgccttcagtcgagccttgttctcagccttgatcttcttgcgctcttccttgttggccataccctgctgaagggctgacatgccgccagcggccaatagtggtagccagaaagccatcacaccctccggtagatttggttggacttgaagttgtactcgacagcccggacgttcatgtcgtacggactatggcagctcagctcgaacttggacgtggccatatcgacccgtgccggcagcggcaccacagcgctatccaccagaggctccccggcattgagttgccggctgaacaaccgaaggggcgtcgtgtcgtaccacggctggttgggtcgagccgtgtcgctgatgcgccacaggaactcgccagtccatccgaagttcacgctgtaccggtggagcactgcgcgggtcgcggtcatgggcagcccgttgtggtcccgtagcaccggcggagtgaactccaccttggaccagaactcacagccgaccacgtacacggcaccgactacggcctcgggcacgtcgaggaacaccttcgtattcgtctcgcgcttcacgccgaggtgggtacgttccatgtaggcaccggccacgggctggagctggtatacggcagaggcatccttgatcaggtcccaatgctgcttggtcagctccagctcaccatcgacggtcgcctcgatacgccgccagtaatcgtacttcggatattgcagaccctcgcgggctggcaggctgttcaggtgcatccggcccagggcgatctcctggcccttctggatcaggaccatcaggttgtcgccggtgaagtacgcgccgatgatctgatgccgcagcgtccatcggtggaaggcgttctggactttctcgttgccctgccagaggtactggtggcagatcatctcgtccgccgtgctggtgccgaacaccaggtagccgctggaggccgccgcctggatgtactcagccggccccggcatgtagctcgggatgtggctggtaacgtcctcggcgacgtagtggctgtccgtggacggcgacggggccatctcatgcaggcccatgaaacccagggcacgctccgcagcgaagtacacactgcggccagtcacggcaggtgccgccctggtatcgaggtcgtactgcgtggtgatgctgataaccgccgtacggggagttacaatgccgccaccggggaccacggcctggtacttcttggcgaagacgatcaagtccttgttgaaggtgaccgcgtgctcgtacggttcagtcaggctcccctgggccgcgatctcgataggatcatcgtcgttcagcgcggctgccgacttcttgaaccagcggtgcggattgttactggccgacatgcagacgtactcctgcgacaggagaacgaggcgaccctggaaggtcgtcatgccggtgatgcctcgggtgacgaagttgaacgtggggttcgtatcctcgtcgccggagccacgtcgatcatactccaactcgttcaagctgtaggtgtcggtagcctcatcccagcgcagggccagtggcatcttcttcaggacccaatcggtgccgtaggcggcccgctctgcccagcggcggttagcggaatcccactcgaagtataccggggccttggtggagccggtggccatgacagcgccgtccatgaactgcacccccacaccaggggcgccaactcccggcagcaaggccggcaggtccgccgtagcattgaggctcataccacctgacgcgatgccgtagttgttgcccatatccgtggacacctcgaccacgatgtcgccgtcgccccggaaggcgatgtagccgtcctgcacgccccgctggttgagatagccggctaccgtagccgcagccgggtcagggtcaaccttcgggtacttcttcgtggagttgggcagggcgtactccggggcgccgaagaacttgccgtagagttgccaagcgatgtagcccacgctcgtttggaacggtgcctcagcgaggttggggttcgtgctggcgttgtccggtgtcacgtaggtggccgtgtgactgtaggtggtgcccgtggcgttgtccttgaccttgatggtcagggagaatgccttcgaatactggcctgccttgacgtacagccagccggccttgttggggtctacgcccttgatgtcggtgcggtcggcctcgggcttcacgctcaggttggcgatgaacaggtcatcggccaccgtggcggcccgtagctgcctgtaatcgttggccttgaggtagtcatgcaccaggggctgacccatcagcaggcgaccgtcccgctcgtcgaacaggtacagctcaccacggtgctgcgccaccagcatcgcaatgctgcggccaccgaggttcgtgtggtagaggaacggcctcggccagggctggtcggtatgcaggtgggccatcagctcgataccgctgcgccgccgaagtcctgacacgggatcggataccatgttgatctgctcgctgagctggcccggcaggcgctcgaagggcacctgctggctcacacccatcagcagattgggatacgcggattgcttgtagctcatgctcaggtcctcaagctgcgccgccaccggctgaagctacgcttggcctgggtgttcagcggacgtgatcgggtgtgcatgcgggacagttcgttctgatacgcctgcaattcct

SEQ ID NO: 13 - DNA, 42717 bp, unidentified
  source 1..42717: mol_type = genomic DNA
gtcgggccgctcagcattggcccgcgcaggcatgccgggggactcggagatcgaagccttcatccgggagtaccagcgagaggcagcacacctgggcaccgataaggtgcaggagctgacggggcaactgcggggagtcttcggggacttcaccggcaacgtgccgagggagcatcagctcggcccggttgctcagcgggccagcggcctgaccagcgccaccatgctgggattctcaggcgtgtatcagctcgccgagctggccacgatggcgcaccgtcaaggcgtcttcaacgtcatgaaggccatgctgaactcccgcctgggagacttcgtgggcgccatgcgtcgcgacccggacctcgctgacgagatgcagaccgtcctcggcctgaacctcgccaacgatatccggatgaagccctggaagcggcagttcgacaccttcctggccagccaagataccttcatggatcgcttcctgcacgcaggtaagcaggctgtcccggtgctcaacggcatgaagttcattcacaactggcaatcccgtatgaacgccaacctcaccttgaacaaggtggcgcgggcggctcagggggatgaagcagcccttcgcgtgctccagcagtacgggaaggacgtggactggacgccagtgttggcgcgggttcgcggttatgtcacatacagaggaaggaacgcccaatcgatgaattggggcgcctggagccaagcagacgtgaacaccgtcatgaacaccgcactgcggatcatggacgactcgctgctgtacggcagggtcggtcagaactcgggctttgctcggtcacctgtcggccaaatcctgggccagttccgcagctttgtggccttcgcgcacaacaagctcctccggggaacctatgagaactccggcgtgcttggcgtggcctcgctcctcgcattccagtatccgctcaccgcgctgatgatgggtgccaaggcagcgatcaacggcaagttcgacacctctgatgaaggcatccgcaagatggccatcgacggcatcggctacactgccggtctgggcttcaccgccgatatgtggggtgtggtcactggccactcccgaatgtctgctccggtcttcggactggctgaacactccaacgaagtgttccgaggcgttcgagacctcgtaaccggcgacgacccggcagcagccactggcgatatcgtcaacggcgcggcgggcgcactgcctttcgtcaacgtgttcccggcaaccaagttgctgttggaatccatcaaaggggaatagcgtggctcggttcaagaaccccgagaccatccacgttgcagatggggtcgagactgtattcagtctcgacttcccattcctgcgtcgtgaggacgtattcgtccaggtcgacaagatactcaccaccgactatacgtgggtggacaacaccaacattcagcttgcggaagtgcctaagcagggccaagaggtccgcatcttccgcgacacccccgcccaagtgccggatacgcagttcagccagggcatcccgttcctgcctcgctacatcgacgcgaacaacaagcagcttctgtacgccgtgcaggagggcatcaacaccgcgaacctcgcactggatggtgttctcgacgcgatccgtatcgccgaggaggcccgccgccttgcacaggaggcactcgacgccgctaacgaagcgctgcgccgcgccctgggcttcgccgagattcgcaccgttacggaagactcggacatcgacccgagctggcgtggttactggaaccgctgcatcaccgctgataagccgctgaccctgaccatgcagatggaagacccggatgcaccctggatcgagttcagcgaggttcacttcgaacaggcgggtgtgcgcgacctcaacatcgtggccggccccggcgtgaccatcaaccggttgcagaacaccaccatgcagctctacggcgagaatggcgtgtgtaccctcaagcgtctcgggcctaaccactggatcgtgttcggagccatggaggacgaataatgcgcggcattatcgcgggcatcatggcctctcaaattcggcggcccaagcccatcttggcgacctacccatatcccatcctggctacggatgacgcatggtcttgtaggccgaacatcgtggcagcgctaacacgcgacaccctgcacgaggtgttgaaccagcccggagaggacacctaccacgcgacctccagtgtggtaagcgtgctgctgcggtcgctgactcagctcggctacggcggtggcgatgggttcctgacgggacctgccatccatgcagttttactgcgcgatacggttaaggactacaccgcagaaccttacgcattctcgtcgcagaccgcagtggtaggcgcggagttgaaggttgtggtcgtatactctgagtatatcgtggagccttacgccttcaccacctcaacagcaattaaacaggcggaactgaccaatgtttgagacgcgagttaagggtcgctacacggtgacccatatgaaagccacgggtgaagtcctggcgcaacacaccttcgacaacctcatcactaacgcaggtcttgattggatttgcgccatggatacctctgacctgttctcccaggccctggccgtgagtaccagcactgcggaccctaaccccgccgcgccctccctgccggaagaagttcggcgcaccacctcgtatgcccctaacggcgacgtgacctcgggcctggacggggagtggatttactggcacaagcggtggcgcttcccaataggcaccctggccggtcaggtactggccaccgtgggcatcgtagctcaatccgcggtggggtttgagagtaacaccggcgcgaagattccggcaggtactccactatcctacacccggatcaaagacgccgccggccaacccaccaccctggtagttcaggctgacgagattctcgacgtacagtatgagctgcgcagcaaggctgtggcgatggccgaggccaagttcgtgatctccggggttgagcgtaccatccgcctcaccccgctgcccttcgcgaaccggcgtaacctctacggtgagcgctacatcttctacaacgagaggccacggatcgacggcaagaatgcgtccggtgccgatgtccaagacggtcagtgggtgaagctgtacccgcgatatactcgcggcacctacaagggtcagcttatgctacgggccaccgtagataacggcaacatgccggggggtatcaccggctgtaaggacctaaagatttacaatgggcggaactacgcactcaccatcgaccctcccgtagtcaagaacaacactcaggagttctccattacaatggagttctcggtggcgagggcataacccatggcactgatctacgacttcaacgaagacctcgatcccaaggccaagtcgaagtttgtaggtgccagggcacgtcgtgacatcagcgacgtgctcgacttctgcgacggaggggtcgccatccaggacccctccgaggggctattcgtccgggtatggcgcaccatgctgcggaatgacggcacctacctcggctgggaggacggcaccaacgaagtgcgcattggcgatggcatcgacgcgggtatctcgacgatatccttggacttcgacagcaatatgaactacgtctttgtgttcgtccgcgcagacaagaccggcgccctatcgtacttcaacgtgcagcagggccgtcgtatcgtagttgagctgggccaagtggactatgccaaggtagccctcgacgacaagcgccccggcgcaactgcgtgggcacaggtcatcgtaccctacacccgaggcggtaacatgtacgttcgcacgcagaacgagaactacacccaggagcacctggaggtggacaccggcaaggtgttccggcctctggtcaagtgcggcatgggaaccaacctacgcttccaagtccaattcagagggcacatgtaatgagcaaaaagcagaccgcgagtgctgagcggctgggcctgcttcacgagctggtctgcaccgccatcgaacgcaacttcaagtggtacatggacaacgacatcccgatccccgcatcggatatcgctgccgccaccaagttcctcaaggacaacgagatcacctgcgatccgtccgacaccatcaacatcgaccggctccgtgaggaaatgcggcaggcgcaggcggagaaccgccgtatcgccctggagggcttcatcgccggtgagaccgacgatgagatggaacgactgtacacccactaggaggcagcatgacgccgcaagaacgattccagatagcccacgaggtgcgggacatgtacccgcgcttccgggacttctgcctggacgccatgctgttcctcggcttcaagatgacgtggatgcagctcgacatcgccgacttcatgcaggactcgcccaacaaggcgatggtcgctgcacagcgtggcgaggccaagtccaccatcgcctgtatctacgtggtctggtgcatcactcagaacccggctacccgcgccatgctggtatccggctccggtgacaaggccgaggagaacggccagttgatcacgaagctgatcatgcactgggaccttctggcgtacctgcgccccgaggcccgcatgggtgaccgtacctcggccaccagcttcgacgtgaactgggcattgaagggcgtcgagaaatcggcctccatcaactgcatcgggatcaccgctgccctccagggctaccgggctgacatcctgatccctgacgacatcgagaccacgaagaacggcctcaccgccaccgagcgggccaagctgacgcgacagtcgcaggagttcacctctatctgtacccacggtaagattctctacctgggcacgccgcagtcccgtgagtcgatctacaacggcctgccggcgcggggcttcctgatgcgcatctggccgggccgcttcccgaccctggatgagcaggaacgctacggtgactggctcgcaccttccatcctggcgcgcattgcccgcctggaggagaaaggccacaacccgcgcaccggcaagggcctggatgggacccgtggctgggctgccgatccgcagcgctacaacgaagaggacctgctcgacaaggagcttgaccaaggccccgagggcttccagcttcagtacatgctggacaccagcctcgccgacgagcagcgtatgcagctcaagctgcgcgacctgctgttcatcgacgccacgcatgagagcgtgccagagcaagtggcctgggctgccgatgagcgcttcaagctcaagttcgacgcccaccgattcccggtcatcaaacctgagctgtacctgccggcgctgatggctggcggctgggcaccactccagcaaatgacgatgttcgtggaccctgccggcgacggtggcgacgagctgtcgtatgccgtgggcgggactcttggcccgtacatccacgtcgtgagcatcggcggctggaagggtggctttgccgaggagaacctggagaaatgtattgccctggctgcgcgttatggcgtcaaggtgatctatgtcgagaaaaacctcggcgctggtgcagttggccagctcttccgcaaccacatgcgatccatcgacccggacaccaacaagccccgctatgaggggatcggcgtagaagaccgccagaagtccggacagaaagagcgtcgcatcatcgacaccctgcggcccatcatgcagcggcaccgtctgatcttccacgtatcggcgatggattccgaccatgtggcctgtcagcagtacccagcggacaagcgcaatgagcgctccgtgttccaccagattcacaacatcaccaccgaccgaggctcactgccgaaggacgaccggatcgatgcccttgagggccttgtccgcgagctagcacccacgctcgtaaaggacgacgaagccgcaacccgcgctcgtgaagaggctgccaagaaggaatggctgaacaacccgatgggttacactaagtctgtccttcggtctctcggcatgggccgggagcgtcgcaagggccgcccaaaaggacgaagactatgatgctcgataccgccaccgaggcgggcaaaggcaccctcgccgtcaccggcgtggggatcgccgtttactcgccctatgagatcgccagcctctgtgctgcggtactcaccgcgctctacgtgggcgcccagctcatcaccctgctcccgaagatgctcgatagcatcgcggagcttcgccggaggttcaagaagtgaacaagcccctgcgcggcgcagcccttgcggctgccctcgccggccttgtcgccctggaaggtagcgagaccactgcctaccgagacatcgccggcgtacccaccatctgctctggcaccactgccggggtcaagatgggtgacaaagccacaccggagcagtgctaccagatgacgctcaaggactaccagcgcttcgagcgcatcgtcctggacgccatcaaggtgccgctgaacgtcaacgagcaaaccgccctgacgttcttctgctacaacgtgggtccagtctgtacaaccagcacagcgttcaagcgcttcaaccaaggccgcgccactgagggctgccaagccctggccatgtggaacaaggtcacgatcgacggccagaaggtcgtatccaagggcctcgtgaatcgccgcaacgcggagatcaagcaatgcctcgaaccatcgtcgcaatactcgtccttgctgtggtagccctgggagcctcatacggcttcgttcagagctaccgggccttgggtatcgcccaggaggagatcaagcggcagtcggcccgtgcggaggccctggaggtgcgctatgccaccttacagcgccacgtccaggaggttgccgccaagaccaacacccagcgccaggaggtggaccgtgccctggaccagaaccgcccgtgggctgaccggcctgtgcctgctgctgtcgttgacagcctgtgcaaccgccccggcgcccgctgtgctgtgcgaacacccactgattgaccctaccacccaggctggcctgatccgcgctgtagcggcctatcaggacgccctggacctatgcaacgccctgaatcaaggagactgaccatggcgaacacccgtgaccaatacctcgctggccgtaacaccggcctgaccttctaccaggtatgccagcccggcaccgacaaccgcatcgccctgcacgacatggacgaggccgatgtcaaggccaaggccaccgctgtgatcgcagcagccaccgccctgggcggcgagggtggcgctactccaccggacccgctcaccgcctacaaggtgaagaacggtgacaccctgcccgtggacggcggtggttccgtgaaggtgaccgtagccaacggtgctatcaccaaggtcgtatacaccgcaccggcgggctgagctacagccccgtccaacctgactccatccataacacaaggaactgaaccatggcaaccttcgccgctgcaactcagaaagacctccgcgccttcgccggcaccatcgagaacctgatccgtccgctggaagaagcggccctgggttctggctacaacgagaccaagctgcgcgctgaactggtcgcgcatctcgacgagctgatggctgctgtcgagaccgccaaggccctggtctacaagtgatcgagtagctcaagccgagcacctgcatagtcgggtgctccactggaactactggaattttattgaggtcggctggaaggctggctggattggctggcctgggctgggagtagttactccgggtccaattttgatatcgtcgtgtgagaaccctcccgactctgatcagcccacccttcccccgtaggccctccgtctggtgggccatcccctcgcattgcctgggtggtgcctgggtcatccctgggagcttccggcttcgccgggtggcggtgggcttccctgcccttcgccgcccattctacgcatcctgccgggagtgtcaagcccctggcggggtggcggtccatcggctcatactcagcgccctgcggtgcgccaccagcgctagcctccggtcatccttggccctggccctggccgctgggtacgggctgtgctgctcatcctctgctgcccacctggctagcttccgctgccatgctgcgtcgtgctggtgccaggctcgctcggctctgtcctgtctgctcagcatctcgttcctcctggggcctctgccctctggtctggtggtggttgcgggagtggctggccttgcctcttgtgcttgggctgtgcccttgccctctgcctggctgcctctgccctggagcttccctggtcctacctgggttgttccctctaggccgcgtactctactcgcctctacctggcttgtctagtcctgctccctgggtctgtctccctggcgctaccgctggtcctgctgtcttaccctcgccactccctcggcctgcctcggtcgcgccgctggcgctgatggacgcctatttgtccattgtgtgtgacataaccgcagccttagtgccacgcgggtttcagggtggtggccctggctgggtggctgctccctgggtggtggatttgcgttacctgggaacgataatcctggctagccagactaagcctcgcacgcgtgggtctctatacgcgtgggaaggctccagggagcgccctggcgcgggtattgacacgtgggcggcaggtctgtagagttcgccctgtcttcacgcaacaacgcctctacaggcagcctggagacaggggttgacaccctgccaggacatcggtaggatgcgcagccagaacgacgggagattgcaaccttccaagcgcggcacaagccataggcgcaagggacacggcaaactcttagggcatgaccaacgatgtgtaaggccggcaggcatcatcgcagggattgacacggtgcaggacacgcggtacagttcgcaccacctgatggcccctcagcaaaagggcctatgccggagaactggacgaactaatccccgacagaggattgacaagacaagcgcaagtctctaacatgcgcggcaagacgaaaggatggctgagccatctggcggtagaggttcgaagcttcaccagcggtacatggactggtgcggtaggttgaccgaagctgcaactggttaggcagggttccagggaatacctgtcgggtgctgaagactcacccaaaagagtctgagcgggaagcctccccgtccacggttaagcaaagggcctatggtaggtccggtgggaacgaatagagtgtcagtgggatcgggactagaatacccggttaatcgcgactgacagtatgctgggtagtatcggcgggccgattgaacaaggccaggcagatagcgcaaagggtacgggggatgagtgaagacgatcccgaagagtatgcgcaggacaagccagaaccgctgatactacagggactatgccaatgccaaggtttgtcccttgaggcccttccaccgaggggattcaagagacagacctagtgaggattgccgatggcacacttcaaggctaaggctcccaagtcaccctttgctgctcaggtagcgtactggcgggactgggaagccaaacgtactaagctcatcgcacaggataacgtcgaagggcgcaaagagcttcgcaagatgcgtgacgtgcgctacgctaccgacccggagccagcgccaggacgctaccacaaccctgaacagaaggctttcgtgaagggtagcgaaggcaaggcgcggaacatcctaaaggggtggaacgctaagaagtcgcaagggaagggtttgtaatgccacgtgtgaatgaactgacgccgcgtcaacgcaaggccgccaaggctcgccgcgacaaggcacgccggattgatctagcgcacaggatgccgaaaggcgccgactgcccgatcttccgcaaggctgagcaggcgcaagctaagcagccccgcgtcgataccctgaccactccccgcagtgctggctacctggccgccgctgcttacctgaacaaatccatctgaggtacataccatgaccaacgcaatctccaaaaccgtaatcgcattccgtggcaccgaagagatcaaccgcgctatcgacgccatccgtgtccgtggcaaggaactggacgaagccatccaactgaccggcctgtcgatcatccaccacatcgaccagtgcggcgacgtgaccgtagtcaaggcgctgtatgaagccatgccgaagggcagccgccgcaatgcgctggtcgagtggttggtgctgcacggcaaggtacaggttaacactgacaagaaatcgaacaaggacctacccttcctgtacaacaagttcggcaagaccgatctcgtcggcgccaccaacagcccgtggtacagcttcaagcctgagaaagcgctggaccaggagttcaacctggctgctgccctggccacgatcaaaaagcaggtgctccaggctcagaccaagggcaaggtgatcgtcggcatggaactgctgggtgacctggaagcgctggccgccaaggctgcacctatcgctgagcagagcaagcgcgctgctgcccattgactcaagtcgaacgcctgctaagcgggcgttccgctggaatcaatgacaactggagaaacacgatgagcttcaagcaacgtctgcaacgccaaatcgccctggcacagtacagccgcccggctcagttcccgtacggcgagcaggccgtccaggcgaagggggagtgaccatggacttctggatcgcccttcccttcctcgaactcggcctcaacctcggcgaggatgaactgcgcatgttgtggttcagcggcctgacggtactcttcatccacctcctgaagcggtgactcaagtcatggccctggcgggcgaccctcgcctactccggggccattgctggactcatcacaagcgagaactaaaccatgcaagctttgaatactctgttgatcgcaatccccaaggacccgtcgaacgcattcaacgcagccgacaaggcgctgtgcgcccatggcttccgtatgggtgacctgaataccgcgcacgtcctgaccccaggcgggttcgtggtagtgggcgccggcgtaactgtgaaccgctatgacgaagcgtatcgcctgagccgggacctggactctgaaggattcgacgtgctgctggtacagggtagcccgctgtccgggcacgtcacctgccaggcgtatggctggatcaacgctgaataccgcaagggctgcgcgaacgggcgcccgatcttcgacattgcaggaacctcgtaccatgtcctcgcgtgatccctaccgtatcggccaccgcgtggggctggtgaactacagcgaccgctacctgggtgccgacgcggcaggcaccaagggcatcattgaagccataacccgaccgtcccgctgtatgacgatctaccacgtacgctgcgagcgtaccttgcgccttatcgaggccgaggcccgtaacgtgcggttcatcagacagctaccgacccgtaaatgaagtggctcatcatagccgtcagcccatcaggaggctgtgccttcgtgtggagtcgcaagcgacctgtgcgtccattgcgattctactcacgcaaggcggccaaacgctggcttcgcaagcatcgccgatcggccttgcttgggagccggttcctcatcgtgaactggagcaagcgcatatgaatcctacctacgtcgtccgtctcaaggacggaactactcgccaggtggtagccgacagcatcgtcgccggccacgccttcgtcgaactctggttcctcggcggcgcggtcgctatctacccggcctgtgaagtacaagaggtgcatcgcactgacctcgtgaaggagggcgagtaatgaccgtcaagaccatatatgtcaagcctgaagacccggcgccgccagtcttgtccgtaggacgcctgtcaccaggtgaactctacaaggtggtgacgcctagcgtggcagagggcgccgttgtgctggcgaccaagcagacgcccgccctcgctcaggcagtcatcgtactgcacagcatgaaccccgcgcagtacgcggtgggtacggccattctcaacacagactggcggtgccgccgcctgggtgcgggtgagtacatcaaacttgttcaaggggaggccggccaatgatcgccgcgctgcttgtactcggcttgtactgttgcctcggcatactagcaggcgcctgctactgcatcgcagtgtcgccgccgttcgagaacccgacggaagtgcagttccaggacgcatgcgtgatcgggtgcttctggccactcataatcatcgtgggcacattcctggcactacgtgcagtaggccggggcctgctgaccgggctgaagcgtcacctgaacatcaaataacctaccggaggtaacatgatccgcacccatacccacaacaccgaccgcgagcaacgccgtctcttcgacctcacggaattgcgttccggtgagatgtatcgggtagtgcagcccgaggctaagcgcggcacactggtgatcggcgtagcagcttgggacagcacgggccgtcccgcagtgctgcccgtggttatccatgacgacggccctgccaaggtgaccggtccgcgtcccaccgtgctgcgcaacgacgggtggcgcatggccctcgccgacaaggggacccaggtgacactcaccgccgagtgaccaaggcgaaggctggtgcgccagccttccaccgtggccattccttgccgcgaaccaaccaacctctaggagctacatcatgaccaacaccaccaccgaaaccaccgtcgcaaccgtcctgggcgccaagctcatcaagaagccggccaccgtcgaagacttccgcaacaacgtcgtcttccaccacaacgccctgaccaagctgaccgaggtctacaacgaagcggtcgtcgccctgcaaaccgccgagcgcctgtccagcctcgttgccggcgacgtgatcaccttcgaccacggcaagggcgagaaagccgaagtgctgagcggcgaagtcatcagcgtagtcgccggcgtctatcaggtactggtgcgcttcagcgacagcgccccggccaagctgctggacgtgaaggccggtgccatccgcgcagtgcaggccccggcagcgtccgccgagaccctggacgaagccatcgcccaaggcgagtaaggcccgcacgtaataggcctggccctgccgggcctattgcgagctagccataccataggaggagtcaacgtgagcaagcacaaccccgagcacatcagcggcccggtacgcagcgtgagcgtacagaaggcacccgccatccaggccctggaagatcgcctggaatccgccctggctgtatgcgaggagcgcgcccaggatatcgacaccctgagccgccgcctccaggccgccgagcgggcgcgccgctgggagatcgacgagattcgcagccatcaggcgacgatccgtctgctccagaacgacttgaacgcagcgcacgatgcccacgaggcacaagagcgccgcgctcgcaaggcaaccatcatggcctgggtatgcctgctgaccgcaggtctggccgtaaccctgaaactggcaggagtctgacaatggaatgcaacgatcacttcaccaagctggcggccagcatgttcggcgtgccgtgtgccaaggtatccccggagatgcgccgggtggccaagagccgggcattcgcccacgcctatacgcccaagaaacaggcttcgggcgggacttacaccgcccgtgtgagcggcgtcacctgtgacggtggtaaggtggaggtgcgcctggataacgtggagcgcgtcagcacctgtggctatgccgatctagaggcgcgggtagcggccagcttgtgccaggccgacgcgaagcgcgccgatgagtacgaaaaactgctgctcaaggtattcccgctggtatcgaagaaggccggcccgctgtccgccaaggacttcgaggtacgtctacacgatctgcacgtaaccaagctggcggtaaaccgtgccctgcgcgatgccggaatagaaatggacggaccgctgcgcagccgggtacggaagcttgcggaccggaataacgagatgggcgctgaactgttcggcctcaagcagggtttgacccggctggtggaggtaggtcaacgggccggcctgtattgggacggcgcggagactcagcgattgctgacggtggccccgaccaaggccgtctgtcagctcatcagcaagctgaccggcgtgcggtataccttccgcgcttccgtggcgaaggctgaggccgaggcccgtgagcgggcgaaggcggcggctaaggacacctggcaggcagcaaccttcgcagccaccatcgccggcggcgtcgtgggtagcgtgctgacgtacctgctcgtctaagcgaccagggcctactccggggtcaaatccgagggcgttcctagagcgccctctcgtgtgagtctggaggatcacgaacatgcaataccatttcacgcattacaacggataccgcttcggcgtcgagctggaggacgaggctgtcttcccgtgcatcgacggtaagcgggcaacctgggacaaggtggcggcgtgtgccggcagccttgtgcattacatggcgcaggacctgattgacttcggccagcgcaagttgagggagatcgaagatgagcaagacgagcctgtatccgctgagcctgcatcccggcctgattcaaatcaggacgatccacgtattcagcatccaagccccgagcaacgccgagaactggtggcagtggttcctctggcagcggaagtaccacccgctccgggaaagcctgagtccagccggggagctgagtgcgagtatcgccgagtgtgtgctccacctccgccggagtggctggcaagatagcgacatctggcgcaagaagggaggcgtgctggccctcggtgccttcgacctgtcaggtctgatggtaggttcctgcctcgtagtgggcggtgaactgaaggccctgtgcgttgatgaccgacacagcaggcagggtatcggcgctgagctggtgcgggccgccgagctggcgggtgccgagtatctgacctgcttcgagttcctggagccgttctacgccgacttgggctggagcaccacccaccgcgaggcgaactggacagcaggagagccggacgtgttgcacatgagggcacccggccatgacgtatgaggtgatgacatggcttatcgagaacaaaccgctggtcatcggagtcgccttcagtctggtggccctgggcgtgctgctcacacagaacaacggcggcccgcctacggcgcccgcatgacctggcacctccaggacatgttcgaggcccgaggtgggctgcggcctttgtgggaggaatggtaccaatggcactgcgccgcgactcctggctaaagcaagcgcaatccctggcggttgggcaggtaggccggttccgacacgtcctgggatgcaagagcatgagccggggcgggaccaacatgacctgcaagaacctgcctgaccgctgggtggcttactgctactcctgtcaggagggtggtgtggtcgagaaaacgcatgtgcggagggtacaatgcgcggatcaagaacgcttcatgccctggcccgaggatgcctcggactggacgcaagccgactgctatcaatcgctttatggtttgctgctgtccaagggtatcgactacaacgtgatgacgccagggctgccgctgctgtacagcgaaaggcagcatcggcttatcttccctaccaacgcgggctggattgggcgcgctactgccgaccaaaatcccaagtgggtgggctacgggtatcctgccccggattaccatggatggccccaggaattatcaatgggcaggccatgggtgctgacggaagactacttgtcggcgctgaaggtgcggtgggcctgtcccgaagtctttgctgtcggtctgaacggtacaaggctgcgcgacaggctggcggcgatcatgttgcagcagacctgcaagcgcgccttcatcttcttggatggcgacccggcaggtgtccgtggtagtgcaggcgtgatgcgccggctccggtccctgcttatcgaaggccaagtaatacccacgccggacgggttcgatcccaaggacctgacccgcgagcagataaggagcctagtaattggacgtattgacgctacacgcactgagtgacaaggaccgcttccgcacgttgcggagtgtggtgcctgaagggatgatggggccggagacgtgctttgtcatcgactggatcgagcaatactggaaggtctacccagcgcatcagaaggtagacccgcaggcgctacgcgaactgataaagctgcgaggtggctaccagccggagcaactggcggtggtcctgaacctcgtcaaccaactggacaagccggtagacccggactcgctacagggcgttgtgtcccagctcaacgaactggatttttcaggcagggtggatgccctcctggcgcagtacaaccagggcgaagacatcgacctggcgtatgagctgcgccggctgagcgacgaggccctgcgccgcgagggggtcagtacgccgaccgactatgtgacggacgacgtgtttgatatcctggcggaggagcagggtgaccacggcatcaagctgccggggctggtgcttccggcgtacatgaagggcctccacgccggggcctcggtgctggtggcagcgccgcctgatgcgggcaagacctcgttcatggcctggatcgctgtccatatcgcgccgcagctcaagcggtacttcgaccctgggcggcccatcctgtggctgaacaacgagggcaagggccggcggatcaagccgcgcctgtactcggcagccctgggcatgaccgtgggcgagattcttgccctggacccggaggaggttcgcaggatgtacgccgagaaaatcggcggcgactctgagctgatccgcatcaaggacttccacggtgggtccctggcccaggccgagcaggtcattgacgcgatgaagccggcggtggtgttttgggacatgatggcccacgtcaaaggtggccagcgcaaggaccagaaccgcaccgacgagatggagtacaaggtggccgaggtccgcgagatggcggtgcgtcacgacttcatcagcttcatgacgtggcagatcagcaacgacggtcacgaccagttgttcccaccgcagtcctgcctcaaggattcgaagacggcggtacagggtgctgtggacgtgcaaatccacctgggccgtctcaacggtgcggatcaacaggtcatgcgcggcctgtccctgccgaagaacaagttccagatggacgggaagccttcgaacgtggaggctatgattaacttcgacgccgcacggtgtcgtttctttgagagtgtagaccatgcaagctaagcatagccgggtgctcgaaggcaccaaagaaattccactgggttccattgcactgccgaccggggtcaaggccctgttgctgcgcctgtactctgatgcacggcccaacgagggcgtcgccctggccggtgggttccctcgcgacctcatgcatggcgccactccaaaggacgtggacatcgccctgtacggcatgacgcagtatcaggctgaagtgctcatcaacagcgtgcttcctaccctggacccgcgcttcgtccgggacggtggctggagtaccgagtacgccgacgcaggtgagggcggtatcttcaagggcgtgatatccctggtgggctgccgtggcctggaaggcatggacgtggacttcaactactacgatgccgacagcctcggtcgggtgatggagtcgttcgacttcaccatcaaccaagtgggcatcgcgtacaactggccggaccccgagggcggcccgcgactgggtgtgtacctgcacaaggacgttacctggggcgtgaacaaggaagttggttccggctcgcgactgccggagcgatgcgaaaagatgcgggccaaggccgcgtactacggatgggagaacgtgtgatgagcaagcgcgacgtggtattggatatcgagaaaggcatctggcgcggcgtagatcagaacgacaaggccgtcgaggccatcatcaagaagcacgggtacgtgatcgtcgagcctaagatcgacgggtgccgtgccatcgtgggtgcgcacggcgtggtatcccgcagcggccgccgcttccctgccctggacggcctggaggatcgcatcatcgcgaaactgtcccagcccggcctggactccggtctggtgttggactgtgagatgtacctggaaggcatgcccttcagtgaggcgaccgggcgcatggcccgcaagaccccgctgaccgaggccgagctgaagtgcctgcacttcgcggtattcgacgccacccatatcggcgtgctccgcaaatcgcgcaagtcccacctcatatacgatgagcgccgcgccatggtccgcagcctcatggaagattgccggcggggcgacaccccgtacttcttccaggtagccgcacaatcctgccgttctatggaggcggtactacgctggtacggctaccaccgcgccatgggcttcgaggggtcgatggagaaagacccgagcctgacctaccgcaacggcaaggttgctggctgctacaagcgcaagccggagatcaccgtggacgggcgtatcgtcgggtacgtgatgggcaagactggcaagaacgtgggccgcgtcgtgggctaccgtgtggagctggaagatggttccggcaccgttggcgccaccggcctgagtgaggagcacatccagctcctgacctgcgcccacctcaacggctgcatcgacgaggccatgccgaactatggacgcatcgccgaggtctccgcgatggaacgctcagccaacaccctccgccatcccagcttcagtcgcttccgcgacctggccagtaaccctggagtgaaggtatgaagattcgaaagtcccataaccgcaactacccggaagatatggtataccacgccaccaaccgggattcgctgctgtatccgaagtacgtcatgggttccgtgttcatcagccaggacggaacattccgcatctgcgtcatggcagggacttgggaccacgttgggtccgaagttcggcatcatgcgcgggacatccaatccctcggcgccggtcgccgtaagttgcaccgggtcatgcgacgtctgcgtcgcaatctgcgacaggtaggagtcaaagtatgagaatgcccaccgaggaagaacgcatgatccgctgcttgctggcggatatccacgaacccctggacctgctgttccccggcctccgcaccaaggcccatatggacccgcaagcggaagagctgtcgattcgaattgactacgaccatgcgaagctgggccgtatgggattctgccacgcggtctccctgtaccaactgaccatatggggacgtgaaggaatggtccgctacctgatgcaggagattccccgccgtgtgctggaaggtctactggtcaaggcgcagcagtacagtcaaagcaactggtacagcaaatgacgactatccgaatcctcgacctcgaaaccgagagctacgagcacaaggggcgcaaggcgtcgccctttgacccccgcaactacatcgtcatggccggctggcgggacgatgttgacggcaaggtcggccagaaggtggaacatcgcttccgcagccgggccgaagccgaagacccgaacaaccgctggttcaacctcgacggcgtggacgtgatcgtagctcacaatgccatgttcgaatcgaactggttcttcacccgctaccgggacgagtacctggccttcttgcgacgcggtggccgggtctggtgtacccagcaagccgagtatctgctgagtcatcagacgtggctgtacccggcactcgacgagctggctccgaagtacggcggcacccacaaggtggacggcatcaagatgctgtgggaccagggtgtgctcacctcggagatggaccaggacctgctgagcgagtacctgtccggcccgtgcggcgacatcgagaataccgccctcgtgttctacggccagctgatgaagcttcaggcccgtggcatgtgggctggctacctggagcgctgcgaggccctgatcggtttctcggcgatggagtgtgccggcctgaaggtggacctcgaagtcgccaaggtgaaccacgccaagcaactggaagaggtggccgggatcgaggccgagctgaagaagctgatgcccgacttcccggaatacttcgagttcaagtataccagcctctaccatatgagcgcatggctctacggtggcgaggtgcggtacaagggccgggtgccatacgaagatggccggatggagaaagccgacttcgtgcgcttcggtacggccaagcgggggactccaatcgagagtacctcagttcgggtcccgatccatgaagtgaccgaccagggtgagtggcactggcccaccatcaccgagctggcgaccaagcacggcccggtcatcacgttctccgctggcaagaacaagggcagcgtcaaggtgttccgggaggatacggacatcccggcgaccaagtgggatgatgaccagcgattccggttccccggcctgatcaacctgaccaaccttccggaagtagtgcgtgagaaattcctgggcaaacgcccggagttccagtgcgccctcaccctggcggatgggtcgcccgtgttcagcaccagcggcgacgccctcaaggctctggagaaacagggcttcgaggcggccaagctgttgatgcgcctggccgagctgcacaaggacaactcctcgttctacatcacccacacctacaacaaggatgggacgattaaggacacgaaggggatgctccagtacgtggacgacgacggcatcatccaccattcgctgaatacgacggcgacggcgacaacgcgtctgtcgtccagccgcccgaacctccagcagctcccgtcgaaggacgaggacgacccggaagccggcagccgcgtgaaggagatgttcgtgtctcgcttcggcgcggacgggatgatcggcgagaccgactataccgccctggaggtggtgatgttggcggccctgtcgaaggatcggaacctcctggcgaaactgatggccggcactgacatgcacttgtaccgcctggcagggaagcacaacaactggaacgggttcgactacgaccagctcgtggccatcaagaaggaccccaaccacccgtggcacggtcgcatgatgcaggctcgaaagaacatcaagcccaaggcattctcggcgcagtacggcgcgagtgcggctggtatcgcattcaacaccggctgtaccgtggaagaggcccaggaattcctggacaacgaggcggccctgttcccagagtccatcgcattccggcagatcgtccgcgacagtgcagaggccaccagcctcgtaatgtacaaggccgaggaccagatgccggcaggcgccttcagcgagatggggccggatggcaactggcgccagtaccgccggggattctggcaagcgcctggtggcacctgctacagcttccgccaacaggagcgctgggacaaggaacagcgcaagacggtcatggacttcaaggacacgcagatcgccaactactggaaccagggcgaggctgggttcatgatgaccgtgagcgtagggcgcatcttccgttggatgctgcatcgcccaggatttatggtcaccgagttcctgatcaacaacgtacacgatgccgtgtacaccgactgccacaaggacaccgccgccgaggtcaaccgtggcgtgcgcgacatcatggccgacgctgcccgctacatgagcgagcgattgggctacgacatcgcggacgttcccttcccggcggtggccgagatgggacccaacatgttcaacatggacgtgatccgggactaggccgaccctagcctactccggccttaaatcttcattcgacacgagagagaccacgcatgactcaacaactcaacgctctgcaagccgccctcgccctggccaacaaggctgccgagaccgcaaccatcgacatgtccgaaacctccaccggcggtggcggcggtcgcatcttcccggcgggcaccgccatgggccgcttctgcatctacatcgagctgggtgaccacgccaaggaattccagggcaagctcaagaatccggcgcctcaaatccgcctgggcttcgcattgtggggcgacgtgaacccgcaggccggtaacccgcagagccgcccggacgacctgttccacacctacgaggccgacggctcgatcaagcccggcctgttccgtaccttcgagatgaccctcggcaacaacgaaaagtccaagaccaagctggccttcgacaagatgaactggagcgggcagcatacccacttcgctcagatgctcggccaggcgttcatcatcccgatcaagcgcaccaagatcaccaagggcaacaacgccggtaaggaacgcaacgacatcgattggggcggcatcatgaagccctataacccggtcgatggcagcccgtataacgtgccggaactgccgatggacctgttgcagtatttcttcttcgacgcgccgaccaaggagacctgggacgccctgttcatcgaaggcacctcggacaacggcaagtccaagaacttcctgcaagagaccattcgctcggccaccaacttccccggctcggccctgcacatcatgttgggcggcggcgatgatctgatcatcaagccgacgacccaggccgcaggcagcaacctgccggcagtgcccaacgtggccgccgacgccggcgtagcggcagcaccggctgtcccggctgttccccaggcagtggctcagacggcccccagcgtgccccaggtggcgaatgtggccgcccctgtggtaggtactgccgaggcacagaacgtgctgcctgacgtgccccaggtggctcagacggcggctccggcagcggtcgaagtcccggcggtcccggtagtgccggcagtaccgcaggtctaatgcgcctgccatcggaagagttcctggcaggactatccgcgcagttcgaccgcagcatggcaggcgggacgttggtgtgtgacgccgacggacccgcctatgtggctgcggccactgctaagaccctggacactgcactccgaagattctggaagctcattttggagcagcagttcctagcgcactgcacagggacacgggttcacctcacggcagcaggtggggcgaaggcgtaccgcgacacgtatccgaccatgaaaccgtaccagggccagcgcaagggcaaggcaaagcccgcgctgctggagccactgcggcgggccgtggcggacgtgcatgagcgaggcggggcgccggaggggatcgatgtcatcctgcacacgttcttcgaggcggacgacggcatgatgatggacgcctacgccatgcaggacaaggccatcatccggtccgacgacaaagacctgcggatgacgatctacccgtattgggagatcgatacggcgtgtgtgagcaggatcgagggcggattcggctacctcaaggaagcgtacacgccttccggccagttcaagctcaagggccatggacggaagttcttcttggcgcagtggctcggcggcgacaccgctgacaacatccgagggatcgatcgattcaacggtaagctctgcggtatgaagacggccttcgacatcctccatccgatcacggatgaggacgaggccatcgacatgatcctggaggcgtacgccaagatcaagcaaaacccgctggcagaggccgaggtgctgtggatgcgccgaacgcctaccgacaacgcagcgcagtatctgttaagccgcgaccttcgtccggccttccgccagtggatcatcgagctggacgcctaccacgaggcgctgctccagaagcggagggagagcgattatgacgagtgagccgaaggtctaccagataccgcgcagtcaacagcgcaccttcaccctgaagctatgggccgagcagaacaagctgtgcccgctctgcggcaagcccatcgatatcagcgtgaagggcgaagcggtgatggaccacgaccacgaaacggggctggtgcggggcgtcctgcaccggtcctgtaacaccgcagaaggcaagataacgaatgcggcaggttcctggggatgcaagtcgatgaagtattccgacatcatcccctaccttcgtgccctcctgacgtatctggaggggccgaagcatccgctgatctaccccctgcacaagaccgacgaggagaaacacgaagcgaagctggccaagcgccggcaggcagccgccaaacgcaaggcggcgatggccgtcgcaaagcacaacgcgaggaacgtatgagcaaactccgcaagcaattcaccaatgagtacctgcgaaacgtctatgtcgagctgggcctcaagaagggtgccgagcacctgaccgagcattcgcgcttcggcgaggtgagccgccagtgcttccgcaactggtgcatcaagctgggcttccacgacagcaggacgcgcggcatgtacgccaagaagggcgcgatgcactggctgggccgcaaggctgccgaggtagtgcgcaagttccctggcgccgtgggcaacgtggtaggccagggtccgaaggtgctgagcctggacatcgagacctcgcctatcgagggctgggtctggtcgctctggaagcagaacgtgggcctcaaccagatcaagcgggactggaccatcctgtcgttctgtgcgaagtggatgcacagcgacgaggtgatctacatggactgccagggtgaccccctggacgacatgcacctgctggtcgccctgcataagctgctggacgaggccgacatcatcatcgtccagaacggcaagcgcttcgacgtgcccaagatcaacgcccggttcttcctgaacaagatgccgccgccgagaccgttcaaggtgatcgacaccttgatcatcgccaagcagcaattcgcgttcaccagccgcaagctggagtacatgacccacaaggcatgcaccatcaagaagcgcctccacggcaagttccccggattcgacctgtgggcagcctgcctccaggacaacccggaagcctgggaggagatgcgcctgtacaacatcgacgacgtacgatcgatggaggagctgtacaccctgatgcgcccgtggttcgtcggccatcccaacgtggccgtgtacttcaatgacgccgagccgaccatccgctgcccgaagtgcggcgacacggatgtcaagcaagagggctgggtgcatacgcagaccggcaagtacgagcactatcactgcggcggctgtggtggctggagccgggggcggtacacccgcaacacctcggaacagcgcaaagccctgctgagcaactaaggaggtagcatgagcctagcattcccggactcttacgagtcgacgatcacgactgaaccgtaccgcaaaggtgcgagtctggaagaacgcaaggtcggtaagcttcccatgcacctggtagtcgaggggttcccgctgctgaagcgggagcttgctcgaatgatgcaatgggctgccgaggtcaaggggtatctgccgcacgactggaagaagatgacggtgggcgagttcaagtccgcccaacaccggcacgagtccaagcggctgatcgacggaccgctggatgacgagtccaacctgatgcacctggtgcatgaggcattcaacgcaatggccgccgccgagcgggccctgatggaccgggagaaaggtaatgagtaaaatctgttggtgtacccgacagcacgagaccgatgaaggtgttcgggtcatctgggccttcaacgagcggggcatcggggtcaactacgtcacagcgtacatcacgccggcgatggtcagccatcaggactggagcgatgtcatactcccggacattctccgggagatggcggagcgcctggagcgggaagtgaagctggtggaactgcgctggttccgcgctgagattctgagctgcggggaatggcgtgactaccgagcgatgacgctggatggggcggttagcctggccgaggccgagtggggtcccgaggatatcgggcgcgtaatcgaaagacgataggagacggaatggacctgatacagcagcagatcgcccacgaagaggccctggtcggggcggcgcagaatgacgcccgcattgccttggaaaaggcgattgcccaagggtccatcgaccgcatcccgagggcgcgcatcatgttgatgcggatgctccccatcgtgaccgaagcgatcttcgcccaccaggaagcgaaggcggcggggccggcagcaaagctgcggcacctgctgcggatcatcgacgcccaggacctcgcagtcatggcactgcgggccgggctgtcgatgctcatcaactatccaacgatcacagcgacgaagtattacacccacatgggtaagatgctctgtcgcgagatcgaagtgcggttggccttcaaggtcaaccaaccctattacgaccggacgctggactacctcaagaccagcaggactcgcagcgtccggcacatccagaagacgatggacgctcttctggacgcggtactgccggaagaggcacgtatcgacctgccggatggcgactacctgcgcctcggcaagttcattggtgatccgctgatacagtgcggcctgttcgagccgaaccgcttcacaggtcggggcggtacgagcgtccacctggagccgtcgccggaagccaaggagttcctgcaagacccttcggcggcgatgacctggggaggcccaggccgtagcgtgatgctggcaccgccgcgaccgtggaacgactggtgcgatggcggttactacagcgctaaggcgcagaagcaccatgtgctagtgcgccgtaccaagcaccagaccaagcgggcgcgccagatgcagctacgccacctgggccgggacaagatgcccaaggtgtacgaggcggtcaacgcgctgcaatcggtggcctacgagatcaaccacgacgtgtacgagatcatcgagcgcgtcttcacctccggtggcggcgtgctgggcatcccccagcgcacctacccggacaaacctgagttcccgctcggcgacgagtgggccaaggagaatgccagtgagcaagagctggaggccttcaaccgttggaaacgctccgtccaccggtggtacaccggggagcgagagcataccgccaagcttcgcgaatttgctgcactctaccgagttgttcgagagcatcatggcaaggcagtgtacttcccgatgcacgttgactcccgtggccgcatgtactattggggcacaccgaatccccaggggtccgacatcgccaaggcgtgtctgcgattccacgaaaagcgtgccctcggtaagcgcggcctgtactggctcaaagtccacgtcgccaactccctcggatgtgacaaggtgtacttcgacgaccgggcagcctgggtcgatgagcgatgggacgacttccagcgagcactcaacgaaggtccggagaactatccgagtctcttcccggaagacgagtcgcccctgtgcgccatcgcaggtctgctggagctgcgggcggcctacgcatcaggccagccggaggcttaccgaagtgggttcatcgtccacatggatgcaacctgctccggcctccagcactactcagccattctccgagacgagatcggcggagcctacgtcaacctgctgccacctggacttgccaaagctgacatctactcccgagttctcggtctcgttgcagagtctctggcacgagacagagaaagtgctgaaggcgaggctcggggctacgctgtattgtgggataaggctggtctatcccgaagcctgacgaagaagccctgcatgacgctggtatacggcaccacgttcaagggcgtggtagaccactgcctggactacctggacgagtccggcctggagattcccgagggtatcccgtcataccgcctgggaagctacatggcaacgctcatactggacgcaatacgcgagacagtaccatcggcagtcttcgccatggaatggctccagcggctcgctaaggcccttcctgatgcatccaaggatttgcactggatcacgccactcggcatgcaggtgttccagtcgtacccgaagaccgaggaggtgcgggtgaggctgcgggcagaggctgtcgagtacgtcaccctgtacgaggccaaggacgagctggacccggtacgcaacgccaacggcatcgctccgaacttcgtccacgggctggacagcagccacctgggcctgacggccctggcctgtgcggcagagggtatcccgatccaggccatccacgacagcatgggcacctatgcggcagacgtggatcggatgcacgtccacatcagggagcagttcatcgccatgtacagcggcccctgtgtgctcgtagaactggcaaaacagctcgggatagaggctaccccgccccggagaggatcgttgaatctggaggctgtacgggactcctgggcgttcttctgctgaggggattatgtcacccacataggagcaagtgcatccgtccaaggccctcgtagaggggagcagggagaaagaggtcagggaagaccagagggtagaagaagagtagaggtagagtagaagatgagactagatgactacgaaggattctagatagaatagactaaccagcataggagatatgatagatggctactatgaagacccaccgacctatggttatgtcacccacagtggaaggatcgagaacaggcaagggtacggcccgtcctgtcacgttcacctctcagcagatcgagtggttagagcagaccttccccgaacatcagatcggtcctggaaccacgatggaagacatccagttccaggccggtaggcgagacgtggtgcgagcagtacgcctgcgccgacgcgatgccatcgcagtggagttgaagtgatgaacaagtccatctggcgagtccacgcaaaggccggcactccctcggaactccaggggctgtgctggctggcaatacaggagttggaagaattcaccctcttccgctcgaaagacgacgccctgaatgcgatgctggacagtatcgagggcaacgatcgaaccgagctgttggtattccgcgatggccagttggccggcggtgcctgcattgtgttcgaggacgatccccacgtcggcccgtgcgtcacagcacagtggcagtacgtcctaccgcgctaccgcaatacaggcgtggtccgggagttcatccgcgaactccaccgtcaggccggctggggtcaaatccccctcgtgtgctggagccatcgtgaaagcgatagccggtacacgatccactaccggagagccaagccttatgggcaagaaagtaaagaaggtgctgggcaagaccatcatcggcaaactcgctgatggcctgctgggcaccgacctgagcggcgcacaatccgatgcccgcaagatggaagagcagaaccgcctaatgcaacagcaggcggaccagctcgcacgaaaccagcaggttgacctcaccgccgagaacgtggcgcaggttgacctaggagcgatggccgatgccactggcaccggcacgcgacggcgccggaatcaggcgggcacaggcgtatcgcaaaccctcggtatcaactactgacgaggtacgccatgaaaaccaccgcagctatgctgtgggagaaacttcgggatgggagcgtggagagtcgagccatcgagttcgccaagaccacgcttccctacctgatggtcgatcccatgtccggcagccggggagtcgtagagcatgacttccagtccgccggtgccctcctggtgaacaacctcgccgccaagctggcgagatcgctgttccccacggggattccgttcttccgatccgaactcactgatgcgatccgccgcgaggccgacagccgggacacagacattaccgaagtgaccgctgccttggctcgggtggatcgcaaagcaacacagcgcctgttccagaacgcctccctggcggtcctgacgcaggtgatcaagctactgatcgtgactggcaatgctctgctgtaccgagacagcgccgccgctacggtggtcgcatggtcgctccgctcctatgcggtgcgccgggatgcgactggccgctggatggatatcgtcctaaagcagcgctacaagtccaaggacctggatgaagagtacaagcaggacctgatgcgcgcaggacgcaacctgtccggttcaggtagcgtggacctgtacacccacgtacagcgcaagaggggcacggcgatggaatacgccgagctgtaccacgagatcgacggcgtgcgtgtgggcaaggagggccgctggcctatccacctgtgcccgtacatcgtgccgacctggaacctcgcccctggcgagcactacggtcgcggccacgtcgaggactacatcggcgacttcgccaagctgtccctgctgagcgagaaactcggcctgtacgagctggagtcgctggaggtcctgaacctcgtggacgaggccaagggtgcggtagtcgatgactaccaagacgccgagatgggtgactacgtgccaggtggcgcggaagccgtccgtgcttacgagcgtggcgactacaacaagatggctgctatccagcagagcttgcaagccgtagtcgttcgcttgaaccaggcgttcatgtatggtgccaaccagcgcgacgccgagcgcgtcactgccgaggaagtacgcatcactgcggaagaggcagagaacacactgggcggtacttactcgctcctggccgagaaccttcagtcgcccctggcctacgtctgcctctccgaggtggatgatgcgctactccaaggcttgatcaccaagcagcacaaaccggctatcgagacgggcctcccggccctgtcccgctccgccgctgtgcagagcatgctcaacgcttcccaggtcatcgctggcctggccccgattgctcagctcgatccccgcatctcgctaccgaagatgatggacacgatttgggcagccttcagcgtagacacgtcgcagttctacaagagcgccgacgagctacaggccgaggcagagcagcagcgtcagcaggccgcgcaggcccaggccgcgcaagagaccttgctggaaggcgcttccgacatgaccaacgcactcgcaggagtctgatagatgtcccaaccgaacgaacagcaactgccgccgggcctcgctaacctggttgccaacgtaccgcccgccgccgcgccgacaccgagtcatgtgcaggtgatgccgaacccggtgatccagccgcaggctccggtccagcccggccaggtaggtgcgccgcagcaactggccatcccgactcagcagccgcaacccgttccgaccagcgccatgacgccgcactaccagccggtagcggcacctgccgtgggtcaacccgttgttccgcaagcacccgctcagccggccccggtagctccgccggctgcgggtgcagttcttcccgagaacctggaagtcccgccgccgccggccttcactcccaacggggagatcgtgggcaccttggcagggaacctcgaaggcgacccgcagttggcgccctccatcagctatctggaggcgttctctgacaaactggataccgtccgagccttcggcaaggccgccgagaaccgcgatcctcggttcatcgacgagcactatctgaaggaagttctcggcccggcccaggcgcagcacgtcatcaacgtggccaagggcgtcctgacctatgttgatgcgcagaccaaagccgtcctgagccagacctatgccgccgtcggcggtgaggccatcctgaagcaggctgccggcgtcttcaaccaacacgctgacccggccaccaaggccgccatcggtcggctgatggactcgggcgatgcccaggccatgcagtacgcagcgaagcaaattgtggccttcgcacaaggctcgggtgccgtggtacaggctaccggccaacccctgggtgctgcggcacctgcactggcagctctgagcgctgagcagtaccgcttggaagtatctaagctgccgctgaacgcatccgaagccgagatggctgcgctgcgcgagcgtcgtaaggcaggcatggcgcagggtatctaacgaccctgccctactccggccttaaacccacatccaaaagagagagcatcgtatgagctttttgaacgacctgacccgtccgaactacgctggcaagaacgcggacgttgacatccacctggaagagcacctcggcatcgtcgataagcacttcgcctacacctccaagttcgcaccgctgatgaacatccgcgacctgcgtggctcgaacgtggtccgcctggatcgcctgggtaacgtcgaggccaagggccgccgcgccggtgaagagctggagcgcagccgagtcgtgaacgacaagtggaacctgaccgtcgacaccctgctgtacctccgccaccagttcgaccaccaggacgagtggacccaatccttcgacatgcgcaaggaagtcgccgagctggacggccaggaactggctcgcaagttcgaccaagcctgcctgatccaggtgatcaaggctgccgcgatggacgcgccggtggacctggaagatgcgttctcgccgggcgtgctggagaaactggacctgaccggcctgaccgccaagcaggctgccgacaagatcgtccgcatgcaccgccgcgtagtcgagaccttcatcgaccgcgacctgggcgatgcggtctactccgagggcctgaccccgatgtcgccgcgtgtgttcagcctgctgctggagcacgacaagctgatgaacgtcgagtaccaggcaaccggcgcgaccaacgactacgtgaagtcccgcgtggccatcctcaacggcgtcaaggtgctggagactccgcgcttcgccaccaaggcaatcgcagcccacccgctgggccgtcacttcaacgtgagcgccgaggagtccgagcgccagatcgccctgttcctcccgagcaagaccctgatcaccgcccaagtggcgccggtccaggccaagctgtgggaagacaacgagaaattctcgtgggtcctggataccttccagatgtacaacatcggtgcccgtcgtccggacaccgctggtgccatcgaactgaagggtatcggcgccttcgacatcaccgcgtgatgccacgaaaccccgcacttcggtgtggggtttcttcaaagcctaacgacccgcgcagattccctgcgtgggtttttgcgctttaggagaaaccctatgctactactcgacgcagtgaatgtcatcctgcgcaagatcggcgagctgccgatcccgagcatggatgagacgtatccaaccatggccatcgccctcccggagctggaagatcaacgcatccagttgctgacccaaggctggtggttcaacacctggtggaagcacaagctgacacctgatcccacgggccgcatcaacctgcccaagggcaccttggcattctacccggattccccggacctccagtgggacggcctgggagtgcgagatgccaacaccggcgacgaccgcatcggtaagtcggtcgagggccgattggtgctgtctcgggagtgggaccgtatcccggagatcgcacagcgcgtcattgcgcaccaggctgcgctcgcggtatacacccacgagattggaccggacgagaccgcccaggtcatcgcccaggaattgcaggcgtatcagaacgaactgtcccgcatgcacacccgatcacgtccgctgaacacccaggccaagcgtagcttcagccggtggcggcgcagcttgaggacctgagcatgagctacaagcaatccgcgtatcccaatctgctgatgggtgtgagccagcaggtgcccttcgagcgcctgccgggccagctcagcgagcagatcaacatggtatccgatcccgtgtcaggacttcggcggcgcagcggtatcgagctgatggcccacctgcataccgaccagccctggccgaggccgttcctctaccacacgaacctcggtggccgcagcattgcgatgctggtggcgcagcaccgtggtgagctgtacctgttcgacgagcgggacggtcgcctgctgatgggtcagcccctggtgcatgactacctcaaggccaacgattacaggcagctacgggccgccacggtggccgatgacctgttcatcgccaacctgagcgtgaagcccgaggccgaccgcaccgacatcaagggcgtagaccccaacaaggccggctggctgtacgtcaaggcaggccagtattcgaaggcattctccctgaccatcaaggtcaaggacaacgccacgggcaccacctacagtcacacggccacctacgtgacaccggacaacgccagcacgaaccccaacctcgctgaggcaccgttccaaacgagcgtgggctacatcgcttggcaactctacggcaagttcttcggcgccccggagtacgccctgcccaactccacgaagaagtacccgaaggttgaccctgacccggctgcggctacggtagccggctatctcaaccagcggggcgtgcaggacggctacatcgccttccggggcgacggcgacatcgtggtcgaggtgtccacggatatgggcaacaactacggcatcgcgtcaggtggtatgagcctcaatgctacggcggacctgccggccttgctgccgggagttggcgcccctggtgtgggggtgcagttcatggacggcgctgtcatggccaccggctccaccaaggccccggtatacttcgagtgggattccgctaaccgccgctgggcagagcgggccgcctacggcaccgattgggtcctgaagaagatgccactggccctgcgctgggatgaggctaccgacacctacagcttgaacgagttggagtatgatcgacgtggctccggcgacgaggatacgaaccccacgttcaacttcgtcacccgaggcatcaccggcatgacgaccttccagggtcgcctcgttctcctgtcgcaggagtacgtctgcatgtcggccagtaacaatccgcaccgctggttcaagaagtcggcagccgcgctgaacgacgatgatcctatcgagatcgcggcccaggggagcctgactgaaccgtacgagcacgcggtcaccttcaacaaggacttgatcgtcttcgccaagaagtaccaggccgtggtccccggtggcggcattgtaactccccgtacggcggttatcagcatcaccacgcagtacgacctcgataccagggcggcacctgccgtgactggccgcagtgtgtacttcgctgcggagcgtgccctgggtttcatgggcctgcatgagatggccccgtcgccgtccacggacagccactacgtcgccgaggacgttaccagccacatcccgagctacatgccggggccggctgagtacatccaggcggcggcctccagcggctacctggtgttcggcaccagcacggcggacgagatgatctgccaccagtacctctggcagggcaacgagaaagtccagaacgccttccaccgatggacgctgcggcatcagatcatcggcgcgtacttcaccggcgacaacctgatggtcctgatccagaagggccaggagatcgccctgggccggatgcacctgaacagcctgccagcccgcgagggtctgcaatatccgaagtacgattactggcggcgtatcgaggcgaccgtcgatggtgagctggagctgaccaagcagcattgggacctgatcaaggatgcctctgccgtataccagctccagcccgtggccggtgcctacatggaacgtacccacctcggcgtgaagcgcgagacgaatacgaaggtgttcctcgacgtgcccgaggccgtagtcggtgccgtgtacgtggtcggctgtgagttctggtccaaggtggagttcactccgccggtgctacgggaccacaacgggctgcccatgaccgcgacccgcgcagtgctccaccggtacagcgtgaacttcggatggactggcgagttcctgtggcgcatcagcgacacggctcgacccaaccagccgtggtacgacacgacgccccttcggttgttcagccggcaactcaatgccggggagcctctggtggatagcgctgtggtgccgctgccggcacgggtcgatatggccacgtccaagttcgagctgagctgccatagtccgtacgacatgaacgtccgggctgtcgagtacaacttcaagtccaaccaaatctaccggagggtgtgatggctttctggctaccactattggccgctggcggcatgtcagcccttcagcagggtatggccaacaaggaagagcgcaagaagatcaaggctgagaacaaggctcgactgaaggcggacctcgacaacctgggcgccgctgcccgcgacatcgccaacctgggcgtcatggccgctagctaccgcaagcaggccgtggcctcgcaggtggaggccaagcgccaggggatgctcgccggcggcagtgccgaggctcaggccggcgcgttcggcgtcaagggtgcatccgtggatgcggtggccctggacatcgagcgcgaggtcggggaggccctgatccagattgacgacaacctggacaaccagatgtggaacctcgccgagcaggcgcactccatccaggctcaggcgaaggccggcctgctggggcagaagagtaccacggcggggcaacggtccccgctggtggccggcctgatgtcggcgggttccctgtacgcaagtcaatacttcaagttcggcgccacgcctaaaggaggcaactgatggcggaatcgcaacgtgcttcccaagagcttgggatcaacgtcggacagacgcaactccagccgggccagagtgctcggcgcggagtgcgcgactccgagatcaactacagcggcccgagcgtaggctcgcagattctcgacggcatcctgggtgccggtcagcagatcgctggcaaatggttcgagcacaacgtgcagcaggaagttctgcgcggtgagcgtgcccgtatggccggcgaggctgaggaggcagtagacagcaacgtactggccaaaccattcgtgaagggcggctggcgcaagcaggactaccgcatcgctcaggccgacttcagcctcaagatgcagcgattcatcgccaacaagggccgggagatgactcccgaggagttccgcaagtacctgtcccaggaggctacgcacgtcctggattcgaccgagggcatgaaccccaacgatgccttacaggcgctggcgcagcagcagaaggccgaggaacagctcttcggcatgcaggctaaggcgtacatggactggtccatcgaccaggccgcccgtggcttccgcacccagggtaacagcatcctggccaaggctgtgcaggctcaggccaccggcgacgaactgtcccggcagctcagcctggaagaggccggcctgttctataccaacatcatgacctccgaggatatcccgctggaggtgcgcgacaaggtaggcatgcagttcctggcggccagcctggacatgaaccagcggggcatctatgagggcctgcgcgatgccgggttcctggacagcatgtccttcgatgatcggcgtgcgctcaacggcctctatgaaaagtcgaaggctcagacccgcgccaaggaatcgatggctaccctgcgggccgacgcggacttccagcagcgggtggccaacggcgccatcacagaccttgccgaggttgaggcgtactcacgaggcatggtcgaggagggccgctggagcgacgctcaggccatctcgttcatgaccaaggccatgaccggcctgggcaacgctcagcgcatgcagggcatcatggcggccttggaagccggagacatcaacgccctccacacgctgggtaccaacgtcaccgaggcgctggagcagtgggacaagatgcaggccgccaacggctcaagcctgactgaccgtctcgtgcagggcacacagctcggcctgcgcctggggaccttccccaagacctacggcgagtccgtaggcagcgcggtgcgcatgatccaggccgccaaggaaggcgaggcaaacccggagctggtcaacacgctgaacagcatcttcgaacaggtggcctcggcccaggagatcaacccatccgccggcaacgtgatgctatccggcatcccggaagccgagcagggcgccgtggcctgggcactcaagcagatgaagatgggcatcgcaccagctcaagctctgcgcgagtttagcgccaacgccgaagtcgtgaagcagatggacgagttcgagaaaggccagaacaccaaggcattcaaggacaacctcggtaagcaggtcaacgacaagttcgtgaacaacatcttcggtcgagcctggaacatgctgaccggcgagagcgacctgagcaacaacgaggccgtcctgagcatgtatcgccgggcgaccatcgacgaggcgaactggctggccagcgaccgcaagcatgcgggtctgctcaccagcgacacgggccgcgaggccctgctggagatcgccgccgccaacgtgcgtaaccgcaccatccaggtaggcgaaggtcggaacctgaaggaaggggacctattcagccgccgcgatagcgcgccgctgatcctgcctcgcggcaccaccgccgagcagctattcgggaccaacgacaccgagaccataggaaccgtcctggccgagcagcacaagccgcatgtcgaaggactcctcggctacaagtcggtagtcgccttcgagtacgaccgcaccagtggcagcctcctggccgtcgagtacgacgagaacggggtcgccctggaccgcacccgtgtggacccacaagcggtgggcaacgaggtgctcaagcgcaactccgacaagctgaacgctatgcggggcgccgagtacggggccaacgtcaaggtcagtggcacggacattcgcatgaacgggggcaacagtgccggcatgctgaagcaggacgtgttcaactggcggaaggaactggctcagttcgaggcttaccgaggggaggcgtataaggatgccgatggttatagtgtgggcctggggcattacctgggcagtggcaatgctggggcaggcactacagtcacgcccgagcaagccgcgcagtggttcgccgaggacaccgaccgcgcactcgaccagggtgtgaggttggccgacgagctgggcgttacgaacaatgcctctatcctgggattggccggtatggccttccagatgggcgaaggacgtgcccggcagttccgtaacaccttccaggcgatcaaggatcgcaacaaggaagccttcgaggctggtgtgcgaaacagcaagtggtacacgcagacgcccaaccgggccgaggcattcatcaagcgcatggcgccccacttcgatacaccgagtcaaatcggtgtcgattggtacagcgccgcaacagcggagtaagacatggcaaagcaattcaagggccgcatgacgcccaagtatccccttgaccaagcacagctcgacgaggcccaagtacagggccaacttgacgcggtgcctaccgtggggttcgacgccctgacgggtggcgagatcggagaacggaacgtggcagcgggccaacgagccaatgcgcgggaactggaacgcatcgtagcggaccaggaactgccggcccttgaccgtgcttccgcactctggaaccagtccaccctcgtcggacgctggggcgatgcgctccagctcgacgcagaccttgcggcgaacagtaccggcgaggtggaccctaacttcgacgctgggacctatggggtccaggcgctccaggcggcaggtatccagccgactgacaactatctccagatcatggcccgtgccggcaatgccgaggacgcggcctacctcctgtcgaggattcaacggtatgagcaggacgagcaaatcgtgcgggacaacccgtactggaacttcgcggctggcatgctggaccctgccgctctggcagttgatgcggttactttcggcgctggccgtgctctgcggctcggtcgcgctggcatggctgctgctggcggcgctgggcaagtcgggtatgttgctgggctggatgccgcaggggccgacgtggatgccggaacctacatcatggctggtgctcttggcgctggcgtgggtgctctgctggggtctggtgcgggacgcattgccgcagaggccccaacgcaaccgcatgtgcccgaagtatcggcgcctactgtcgggctgccagaagtagccatgaccgccgaggaggccgcagcacgcggcttcaaggcaggtgacgtggtagacctgctggacgagggcactgtgctatcccgtgtcagtgcccgcgtggagcaggctgagataccggctattccgcgacgtgacactgccttcggcgacgagctgcatagcctgtcgggccggaagctgtctgaggtcctggaccacctcaagacccacgcagaggtgcccaagccgctccagggcatcgccgccaaggtggctgatactatcaggaccctggagggcctggggcagcgtaccgcgttccgtgtggtgcagggcggtgacactgccagctctgccttcctcaaaccgggtacggcggggattcactccacccagggcctcgacaccttggtccaggtacgcggcagcaccgcacctggccgagttggcaccaacccggtgaccgtgctccacgaggcggttcacgctgccaccgtgggcgtgatgaacgccgccttgcggaatcctggcgcgatgagtccgaaggtggctcaggccatgcagaccctggagaacgtccggggtaacgtgctcaacgccctgaagcaggaccgcgccgccggtcggcaactgtccgagttcgaagagacgctgctagccggtaactccaacaccctggccaacgtcaaggaactggtagcctggggcctgacggatacccgcttccaaaggaccctgaaccgcctccgctacagtgacggcgggccgggcctgtggtcccgcttcgtggagggcatccgcaccctactgggtctgcggtccgatgctgacacggccctgagccgcgtcctggccgcctctgagacgattatggaggccatgcccggctacactaaggcgcaggccaagtgggccaacaagggcgctccggtaaccgaggaggccagcctggagaccatcgtgcggaccacccgtgaacgtgcccgtgagggtgccggcttcgtgaacaggttcttcagcgaggcagacctcctggcacagcctggggagggcgcacggcgactcctgagccgtcttatcgacgacccggtacgtcgggatgggttcagcacgaacgacaacgcagcgagctatctccgccgctatcggaacgagttcgagggttacgtgaagtcctacgacgagatgatggccaaggcaatggctgagcagggtgtgggcctgacggcacgtgcgctgaactcccgccgcgccatggcagtccgggaccagctcaacgagcaggtcacccgcgagctgctgcgccgggaccgcgagtggacggcctacggcagcgtccgtgtggacccgaacctgccgccgaccatcaaggccctggccgaccgctcagacgagattcacggtctgatgggccagcgcgccagggaagccggtgtgcgtggcttcgaggacttcgctccccgaccggggtacttccaccgttcatggaactggtcgaagatggcgcagatggacgaggccgcccctggcctggcccgccgcgccatcagcgaggccgtgttccgtggcatccctgggctggagcgcgccgatgccgataccatcgcacaggccattgtgcagcgggcgcgggatcgggccaccggaatccgctccgagttcatgggcgcgatgggcgtggcggacacggcattcatccggcaggcgctggaggaggccaacgtgtcccaggccaagttcgacagcatcatggccaagatcgagcagaagcagtccgaccagggcaccgtcaagtacggcaagggccggctgtcgctggacatgaccgcagagatcaaccacaacggaaccgtgtatcgggtgcaggacctgatcgaccgagacctggaccggctgatggagaactacgccggcagtat

SEQ ID NO: 14 - DNA, 42717 bp, unidentified
  source 1..42717: mol_type = genomic DNA
tggcatgctggaccctgccgctctggcagttgatgcggttactttcggcgctggccgtgctctgcggctcggtcgcgctggcatggctgctgctggcggcgctgggcaagtcgggtatgttgctgggctggatgccgcaggggccgacgtggatgccggaacctacatcatggctggtgctcttggcgctggcgtgggtgctctgctggggtctggtgcgggacgcattgccgcagaggccccaacgcaaccgcatgtgcccgaagtatcggcgcctactgtcgggctgccagaagtagccatgaccgccgaggaggccgcagcacgcggcttcaaggcaggtgacgtggtagacctgctggacgagggcactgtgctatcccgtgtcagtgcccgcgtggagcaggctgagataccggctattccgcgacgtgacactgccttcggcgacgagctgcatagcctgtcgggccggaagctgtctgaggtcctggaccacctcaagacccacgcagaggtgcccaagccgctccagggcatcgccgccaaggtggctgatactatcaggaccctggagggcctggggcagcgtaccgcgttccgtgtggtgcagggcggtgacactgccagctctgccttcctcaaaccgggtacggcggggattcactccacccagggcctcgacaccttggtccaggtacgcggcagcaccgcacctggccgagttggcaccaacccggtgaccgtgctccacgaggcggttcacgctgccaccgtgggcgtgatgaacgccgccttgcggaatcctggcgcgatgagtccgaaggtggctcaggccatgcagaccctggagaacgtccggggtaacgtgctcaacgccctgaagcaggaccgcgccgccggtcggcaactgtccgagttcgaagagacgctgctagccggtaactccaacaccctggccaacgtcaaggaactggtagcctggggcctgacggatacccgcttccaaaggaccctgaaccgcctccgctacagtgacggcgggccgggcctgtggtcccgcttcgtggagggcatccgcaccctactgggtctgcggtccgatgctgacacggccctgagccgcgtcctggccgcctctgagacgattatggaggccatgcccggctacactaaggcgcaggccaagtgggccaacaagggcgctccggtaaccgaggaggccagcctggagaccatcgtgcggaccacccgtgaacgtgcccgtgagggtgccggcttcgtgaacaggttcttcagcgaggcagacctcctggcacagcctggggagggcgcacggcgactcctgagccgtcttatcgacgacccggtacgtcgggatgggttcagcacgaacgacaacgcagcgagctatctccgccgctatcggaacgagttcgagggttacgtgaagtcctacgacgagatgatggccaaggcaatggctgagcagggtgtgggcctgacggcacgtgcgctgaactcccgccgcgccatggcagtccgggaccagctcaacgagcaggtcacccgcgagctgctgcgccgggaccgcgagtggacggcctacggcagcgtccgtgtggacccgaacctgccgccgaccatcaaggccctggccgaccgctcagacgagattcacggtctgatgggccagcgcgccagggaagccggtgtgcgtggcttcgaggacttcgctccccgaccggggtacttccaccgttcatggaactggtcgaagatggcgcagatggacgaggccgcccctggcctggcccgccgcgccatcagcgaggccgtgttccgtggcatccctgggctggagcgcgccgatgccgataccatcgcacaggccattgtgcagcgggcgcgggatcgggccaccggaatccgctccgagttcatgggcgcgatgggcgtggcggacacggcattcatccggcaggcgctggaggaggccaacgtgtcccaggccaagttcgacagcatcatggccaagatcgagcagaagcagtccgaccagggcaccgtcaagtacggcaagggccggctgtcgctggacatgaccgcagagatcaaccacaacggaaccgtgtatcgggtgcaggacctgatcgaccgagacctggaccggctgatggagaactacgccggcagtatgtcgggccgctcagcattggcccgcgcaggcatgccgggggactcggagatcgaagccttcatccgggagtaccagcgagaggcagcacacctgggcaccgataaggtgcaggagctgacggggcaactgcggggagtcttcggggacttcaccggcaacgtgccgagggagcatcagctcggcccggttgctcagcgggccagcggcctgaccagcgccaccatgctgggattctcaggcgtgtatcagctcgccgagctggccacgatggcgcaccgtcaaggcgtcttcaacgtcatgaaggccatgctgaactcccgcctgggagacttcgtgggcgccatgcgtcgcgacccggacctcgctgacgagatgcagaccgtcctcggcctgaacctcgccaacgatatccggatgaagccctggaagcggcagttcgacaccttcctggccagccaagataccttcatggatcgcttcctgcacgcaggtaagcaggctgtcccggtgctcaacggcatgaagttcattcacaactggcaatcccgtatgaacgccaacctcaccttgaacaaggtggcgcgggcggctcagggggatgaagcagcccttcgcgtgctccagcagtacgggaaggacgtggactggacgccagtgttggcgcgggttcgcggttatgtcacatacagaggaaggaacgcccaatcgatgaattggggcgcctggagccaagcagacgtgaacaccgtcatgaacaccgcactgcggatcatggacgactcgctgctgtacggcagggtcggtcagaactcgggctttgctcggtcacctgtcggccaaatcctgggccagttccgcagctttgtggccttcgcgcacaacaagctcctccggggaacctatgagaactccggcgtgcttggcgtggcctcgctcctcgcattccagtatccgctcaccgcgctgatgatgggtgccaaggcagcgatcaacggcaagttcgacacctctgatgaaggcatccgcaagatggccatcgacggcatcggctacactgccggtctgggcttcaccgccgatatgtggggtgtggtcactggccactcccgaatgtctgctccggtcttcggactggctgaacactccaacgaagtgttccgaggcgttcgagacctcgtaaccggcgacgacccggcagcagccactggcgatatcgtcaacggcgcggcgggcgcactgcctttcgtcaacgtgttcccggcaaccaagttgctgttggaatccatcaaaggggaatagcgtggctcggttcaagaaccccgagaccatccacgttgcagatggggtcgagactgtattcagtctcgacttcccattcctgcgtcgtgaggacgtattcgtccaggtcgacaagatactcaccaccgactatacgtgggtggacaacaccaacattcagcttgcggaagtgcctaagcagggccaagaggtccgcatcttccgcgacacccccgcccaagtgccggatacgcagttcagccagggcatcccgttcctgcctcgctacatcgacgcgaacaacaagcagcttctgtacgccgtgcaggagggcatcaacaccgcgaacctcgcactggatggtgttctcgacgcgatccgtatcgccgaggaggcccgccgccttgcacaggaggcactcgacgccgctaacgaagcgctgcgccgcgccctgggcttcgccgagattcgcaccgttacggaagactcggacatcgacccgagctggcgtggttactggaaccgctgcatcaccgctgataagccgctgaccctgaccatgcagatggaagacccggatgcaccctggatcgagttcagcgaggttcacttcgaacaggcgggtgtgcgcgacctcaacatcgtggccggccccggcgtgaccatcaaccggttgcagaacaccaccatgcagctctacggcgagaatggcgtgtgtaccctcaagcgtctcgggcctaaccactggatcgtgttcggagccatggaggacgaataatgcgcggcattatcgcgggcatcatggcctctcaaattcggcggcccaagcccatcttggcgacctacccatatcccatcctggctacggatgacgcatggtcttgtaggccgaacatcgtggcagcgctaacacgcgacaccctgcacgaggtgttgaaccagcccggagaggacacctaccacgcgacctccagtgtggtaagcgtgctgctgcggtcgctgactcagctcggctacggcggtggcgatgggttcctgacgggacctgccatccatgcagttttactgcgcgatacggttaaggactacaccgcagaaccttacgcattctcgtcgcagaccgcagtggtaggcgcggagttgaaggttgtggtcgtatactctgagtatatcgtggagccttacgccttcaccacctcaacagcaattaaacaggcggaactgaccaatgtttgagacgcgagttaagggtcgctacacggtgacccatatgaaagccacgggtgaagtcctggcgcaacacaccttcgacaacctcatcactaacgcaggtcttgattggatttgcgccatggatacctctgacctgttctcccaggccctggccgtgagtaccagcactgcggaccctaaccccgccgcgccctccctgccggaagaagttcggcgcaccacctcgtatgcccctaacggcgacgtgacctcgggcctggacggggagtggatttactggcacaagcggtggcgcttcccaataggcaccctggccggtcaggtactggccaccgtgggcatcgtagctcaatccgcggtggggtttgagagtaacaccggcgcgaagattccggcaggtactccactatcctacacccggatcaaagacgccgccggccaacccaccaccctggtagttcaggctgacgagattctcgacgtacagtatgagctgcgcagcaaggctgtggcgatggccgaggccaagttcgtgatctccggggttgagcgtaccatccgcctcaccccgctgcccttcgcgaaccggcgtaacctctacggtgagcgctacatcttctacaacgagaggccacggatcgacggcaagaatgcgtccggtgccgatgtccaagacggtcagtgggtgaagctgtacccgcgatatactcgcggcacctacaagggtcagcttatgctacgggccaccgtagataacggcaacatgccggggggtatcaccggctgtaaggacctaaagatttacaatgggcggaactacgcactcaccatcgaccctcccgtagtcaagaacaacactcaggagttctccattacaatggagttctcggtggcgagggcataacccatggcactgatctacgacttcaacgaagacctcgatcccaaggccaagtcgaagtttgtaggtgccagggcacgtcgtgacatcagcgacgtgctcgacttctgcgacggaggggtcgccatccaggacccctccgaggggctattcgtccgggtatggcgcaccatgctgcggaatgacggcacctacctcggctgggaggacggcaccaacgaagtgcgcattggcgatggcatcgacgcgggtatctcgacgatatccttggacttcgacagcaatatgaactacgtctttgtgttcgtccgcgcagacaagaccggcgccctatcgtacttcaacgtgcagcagggccgtcgtatcgtagttgagctgggccaagtggactatgccaaggtagccctcgacgacaagcgccccggcgcaactgcgtgggcacaggtcatcgtaccctacacccgaggcggtaacatgtacgttcgcacgcagaacgagaactacacccaggagcacctggaggtggacaccggcaaggtgttccggcctctggtcaagtgcggcatgggaaccaacctacgcttccaagtccaattcagagggcacatgtaatgagcaaaaagcagaccgcgagtgctgagcggctgggcctgcttcacgagctggtctgcaccgccatcgaacgcaacttcaagtggtacatggacaacgacatcccgatccccgcatcggatatcgctgccgccaccaagttcctcaaggacaacgagatcacctgcgatccgtccgacaccatcaacatcgaccggctccgtgaggaaatgcggcaggcgcaggcggagaaccgccgtatcgccctggagggcttcatcgccggtgagaccgacgatgagatggaacgactgtacacccactaggaggcagcatgacgccgcaagaacgattccagatagcccacgaggtgcgggacatgtacccgcgcttccgggacttctgcctggacgccatgctgttcctcggcttcaagatgacgtggatgcagctcgacatcgccgacttcatgcaggactcgcccaacaaggcgatggtcgctgcacagcgtggcgaggccaagtccaccatcgcctgtatctacgtggtctggtgcatcactcagaacccggctacccgcgccatgctggtatccggctccggtgacaaggccgaggagaacggccagttgatcacgaagctgatcatgcactgggaccttctggcgtacctgcgccccgaggcccgcatgggtgaccgtacctcggccaccagcttcgacgtgaactgggcattgaagggcgtcgagaaatcggcctccatcaactgcatcgggatcaccgctgccctccagggctaccgggctgacatcctgatccctgacgacatcgagaccacgaagaacggcctcaccgccaccgagcgggccaagctgacgcgacagtcgcaggagttcacctctatctgtacccacggtaagattctctacctgggcacgccgcagtcccgtgagtcgatctacaacggcctgccggcgcggggcttcctgatgcgcatctggccgggccgcttcccgaccctggatgagcaggaacgctacggtgactggctcgcaccttccatcctggcgcgcattgcccgcctggaggagaaaggccacaacccgcgcaccggcaagggcctggatgggacccgtggctgggctgccgatccgcagcgctacaacgaagaggacctgctcgacaaggagcttgaccaaggccccgagggcttccagcttcagtacatgctggacaccagcctcgccgacgagcagcgtatgcagctcaagctgcgcgacctgctgttcatcgacgccacgcatgagagcgtgccagagcaagtggcctgggctgccgatgagcgcttcaagctcaagttcgacgcccaccgattcccggtcatcaaacctgagctgtacctgccggcgctgatggctggcggctgggcaccactccagcaaatgacgatgttcgtggaccctgccggcgacggtggcgacgagctgtcgtatgccgtgggcgggactcttggcccgtacatccacgtcgtgagcatcggcggctggaagggtggctttgccgaggagaacctggagaaatgtattgccctggctgcgcgttatggcgtcaaggtgatctatgtcgagaaaaacctcggcgctggtgcagttggccagctcttccgcaaccacatgcgatccatcgacccggacaccaacaagccccgctatgaggggatcggcgtagaagaccgccagaagtccggacagaaagagcgtcgcatcatcgacaccctgcggcccatcatgcagcggcaccgtctgatcttccacgtatcggcgatggattccgaccatgtggcctgtcagcagtacccagcggacaagcgcaatgagcgctccgtgttccaccagattcacaacatcaccaccgaccgaggctcactgccgaaggacgaccggatcgatgcccttgagggccttgtccgcgagctagcacccacgctcgtaaaggacgacgaagccgcaacccgcgctcgtgaagaggctgccaagaaggaatggctgaacaacccgatgggttacactaagtctgtccttcggtctctcggcatgggccgggagcgtcgcaagggccgcccaaaaggacgaagactatgatgctcgataccgccaccgaggcgggcaaaggcaccctcgccgtcaccggcgtggggatcgccgtttactcgccctatgagatcgccagcctctgtgctgcggtactcaccgcgctctacgtgggcgcccagctcatcaccctgctcccgaagatgctcgatagcatcgcggagcttcgccggaggttcaagaagtgaacaagcccctgcgcggcgcagcccttgcggctgccctcgccggccttgtcgccctggaaggtagcgagaccactgcctaccgagacatcgccggcgtacccaccatctgctctggcaccactgccggggtcaagatgggtgacaaagccacaccggagcagtgctaccagatgacgctcaaggactaccagcgcttcgagcgcatcgtcctggacgccatcaaggtgccgctgaacgtcaacgagcaaaccgccctgacgttcttctgctacaacgtgggtccagtctgtacaaccagcacagcgttcaagcgcttcaaccaaggccgcgccactgagggctgccaagccctggccatgtggaacaaggtcacgatcgacggccagaaggtcgtatccaagggcctcgtgaatcgccgcaacgcggagatcaagcaatgcctcgaaccatcgtcgcaatactcgtccttgctgtggtagccctgggagcctcatacggcttcgttcagagctaccgggccttgggtatcgcccaggaggagatcaagcggcagtcggcccgtgcggaggccctggaggtgcgctatgccaccttacagcgccacgtccaggaggttgccgccaagaccaacacccagcgccaggaggtggaccgtgccctggaccagaaccgcccgtgggctgaccggcctgtgcctgctgctgtcgttgacagcctgtgcaaccgccccggcgcccgctgtgctgtgcgaacacccactgattgaccctaccacccaggctggcctgatccgcgctgtagcggcctatcaggacgccctggacctatgcaacgccctgaatcaaggagactgaccatggcgaacacccgtgaccaatacctcgctggccgtaacaccggcctgaccttctaccaggtatgccagcccggcaccgacaaccgcatcgccctgcacgacatggacgaggccgatgtcaaggccaaggccaccgctgtgatcgcagcagccaccgccctgggcggcgagggtggcgctactccaccggacccgctcaccgcctacaaggtgaagaacggtgacaccctgcccgtggacggcggtggttccgtgaaggtgaccgtagccaacggtgctatcaccaaggtcgtatacaccgcaccggcgggctgagctacagccccgtccaacctgactccatccataacacaaggaactgaaccatggcaaccttcgccgctgcaactcagaaagacctccgcgccttcgccggcaccatcgagaacctgatccgtccgctggaagaagcggccctgggttctggctacaacgagaccaagctgcgcgctgaactggtcgcgcatctcgacgagctgatggctgctgtcgagaccgccaaggccctggtctacaagtgatcgagtagctcaagccgagcacctgcatagtcgggtgctccactggaactactggaattttattgaggtcggctggaaggctggctggattggctggcctgggctgggagtagttactccgggtccaattttgatatcgtcgtgtgagaaccctcccgactctgatcagcccacccttcccccgtaggccctccgtctggtgggccatcccctcgcattgcctgggtggtgcctgggtcatccctgggagcttccggcttcgccgggtggcggtgggcttccctgcccttcgccgcccattctacgcatcctgccgggagtgtcaagcccctggcggggtggcggtccatcggctcatactcagcgccctgcggtgcgccaccagcgctagcctccggtcatccttggccctggccctggccgctgggtacgggctgtgctgctcatcctctgctgcccacctggctagcttccgctgccatgctgcgtcgtgctggtgccaggctcgctcggctctgtcctgtctgctcagcatctcgttcctcctggggcctctgccctctggtctggtggtggttgcgggagtggctggccttgcctcttgtgcttgggctgtgcccttgccctctgcctggctgcctctgccctggagcttccctggtcctacctgggttgttccctctaggccgcgtactctactcgcctctacctggcttgtctagtcctgctccctgggtctgtctccctggcgctaccgctggtcctgctgtcttaccctcgccactccctcggcctgcctcggtcgcgccgctggcgctgatggacgcctatttgtccattgtgtgtgacataaccgcagccttagtgccacgcgggtttcagggtggtggccctggctgggtggctgctccctgggtggtggatttgcgttacctgggaacgataatcctggctagccagactaagcctcgcacgcgtgggtctctatacgcgtgggaaggctccagggagcgccctggcgcgggtattgacacgtgggcggcaggtctgtagagttcgccctgtcttcacgcaacaacgcctctacaggcagcctggagacaggggttgacaccctgccaggacatcggtaggatgcgcagccagaacgacgggagattgcaaccttccaagcgcggcacaagccataggcgcaagggacacggcaaactcttagggcatgaccaacgatgtgtaaggccggcaggcatcatcgcagggattgacacggtgcaggacacgcggtacagttcgcaccacctgatggcccctcagcaaaagggcctatgccggagaactggacgaactaatccccgacagaggattgacaagacaagcgcaagtctctaacatgcgcggcaagacgaaaggatggctgagccatctggcggtagaggttcgaagcttcaccagcggtacatggactggtgcggtaggttgaccgaagctgcaactggttaggcagggttccagggaatacctgtcgggtgctgaagactcacccaaaagagtctgagcgggaagcctccccgtccacggttaagcaaagggcctatggtaggtccggtgggaacgaatagagtgtcagtgggatcgggactagaatacccggttaatcgcgactgacagtatgctgggtagtatcggcgggccgattgaacaaggccaggcagatagcgcaaagggtacgggggatgagtgaagacgatcccgaagagtatgcgcaggacaagccagaaccgctgatactacagggactatgccaatgccaaggtttgtcccttgaggcccttccaccgaggggattcaagagacagacctagtgaggattgccgatggcacacttcaaggctaaggctcccaagtcaccctttgctgctcaggtagcgtactggcgggactgggaagccaaacgtactaagctcatcgcacaggataacgtcgaagggcgcaaagagcttcgcaagatgcgtgacgtgcgctacgctaccgacccggagccagcgccaggacgctaccacaaccctgaacagaaggctttcgtgaagggtagcgaaggcaaggcgcggaacatcctaaaggggtggaacgctaagaagtcgcaagggaagggtttgtaatgccacgtgtgaatgaactgacgccgcgtcaacgcaaggccgccaaggctcgccgcgacaaggcacgccggattgatctagcgcacaggatgccgaaaggcgccgactgcccgatcttccgcaaggctgagcaggcgcaagctaagcagccccgcgtcgataccctgaccactccccgcagtgctggctacctggccgccgctgcttacctgaacaaatccatctgaggtacataccatgaccaacgcaatctccaaaaccgtaatcgcattccgtggcaccgaagagatcaaccgcgctatcgacgccatccgtgtccgtggcaaggaactggacgaagccatccaactgaccggcctgtcgatcatccaccacatcgaccagtgcggcgacgtgaccgtagtcaaggcgctgtatgaagccatgccgaagggcagccgccgcaatgcgctggtcgagtggttggtgctgcacggcaaggtacaggttaacactgacaagaaatcgaacaaggacctacccttcctgtacaacaagttcggcaagaccgatctcgtcggcgccaccaacagcccgtggtacagcttcaagcctgagaaagcgctggaccaggagttcaacctggctgctgccctggccacgatcaaaaagcaggtgctccaggctcagaccaagggcaaggtgatcgtcggcatggaactgctgggtgacctggaagcgctggccgccaaggctgcacctatcgctgagcagagcaagcgcgctgctgcccattgactcaagtcgaacgcctgctaagcgggcgttccgctggaatcaatgacaactggagaaacacgatgagcttcaagcaacgtctgcaacgccaaatcgccctggcacagtacagccgcccggctcagttcccgtacggcgagcaggccgtccaggcgaagggggagtgaccatggacttctggatcgcccttcccttcctcgaactcggcctcaacctcggcgaggatgaactgcgcatgttgtggttcagcggcctgacggtactcttcatccacctcctgaagcggtgactcaagtcatggccctggcgggcgaccctcgcctactccggggccattgctggactcatcacaagcgagaactaaaccatgcaagctttgaatactctgttgatcgcaatccccaaggacccgtcgaacgcattcaacgcagccgacaaggcgctgtgcgcccatggcttccgtatgggtgacctgaataccgcgcacgtcctgaccccaggcgggttcgtggtagtgggcgccggcgtaactgtgaaccgctatgacgaagcgtatcgcctgagccgggacctggactctgaaggattcgacgtgctgctggtacagggtagcccgctgtccgggcacgtcacctgccaggcgtatggctggatcaacgctgaataccgcaagggctgcgcgaacgggcgcccgatcttcgacattgcaggaacctcgtaccatgtcctcgcgtgatccctaccgtatcggccaccgcgtggggctggtgaactacagcgaccgctacctgggtgccgacgcggcaggcaccaagggcatcattgaagccataacccgaccgtcccgctgtatgacgatctaccacgtacgctgcgagcgtaccttgcgccttatcgaggccgaggcccgtaacgtgcggttcatcagacagctaccgacccgtaaatgaagtggctcatcatagccgtcagcccatcaggaggctgtgccttcgtgtggagtcgcaagcgacctgtgcgtccattgcgattctactcacgcaaggcggccaaacgctggcttcgcaagcatcgccgatcggccttgcttgggagccggttcctcatcgtgaactggagcaagcgcatatgaatcctacctacgtcgtccgtctcaaggacggaactactcgccaggtggtagccgacagcatcgtcgccggccacgccttcgtcgaactctggttcctcggcggcgcggtcgctatctacccggcctgtgaagtacaagaggtgcatcgcactgacctcgtgaaggagggcgagtaatgaccgtcaagaccatatatgtcaagcctgaagacccggcgccgccagtcttgtccgtaggacgcctgtcaccaggtgaactctacaaggtggtgacgcctagcgtggcagagggcgccgttgtgctggcgaccaagcagacgcccgccctcgctcaggcagtcatcgtactgcacagcatgaaccccgcgcagtacgcggtgggtacggccattctcaacacagactggcggtgccgccgcctgggtgcgggtgagtacatcaaacttgttcaaggggaggccggccaatgatcgccgcgctgcttgtactcggcttgtactgttgcctcggcatactagcaggcgcctgctactgcatcgcagtgtcgccgccgttcgagaacccgacggaagtgcagttccaggacgcatgcgtgatcgggtgcttctggccactcataatcatcgtgggcacattcctggcactacgtgcagtaggccggggcctgctgaccgggctgaagcgtcacctgaacatcaaataacctaccggaggtaacatgatccgcacccatacccacaacaccgaccgcgagcaacgccgtctcttcgacctcacggaattgcgttccggtgagatgtatcgggtagtgcagcccgaggctaagcgcggcacactggtgatcggcgtagcagcttgggacagcacgggccgtcccgcagtgctgcccgtggttatccatgacgacggccctgccaaggtgaccggtccgcgtcccaccgtgctgcgcaacgacgggtggcgcatggccctcgccgacaaggggacccaggtgacactcaccgccgagtgaccaaggcgaaggctggtgcgccagccttccaccgtggccattccttgccgcgaaccaaccaacctctaggagctacatcatgaccaacaccaccaccgaaaccaccgtcgcaaccgtcctgggcgccaagctcatcaagaagccggccaccgtcgaagacttccgcaacaacgtcgtcttccaccacaacgccctgaccaagctgaccgaggtctacaacgaagcggtcgtcgccctgcaaaccgccgagcgcctgtccagcctcgttgccggcgacgtgatcaccttcgaccacggcaagggcgagaaagccgaagtgctgagcggcgaagtcatcagcgtagtcgccggcgtctatcaggtactggtgcgcttcagcgacagcgccccggccaagctgctggacgtgaaggccggtgccatccgcgcagtgcaggccccggcagcgtccgccgagaccctggacgaagccatcgcccaaggcgagtaaggcccgcacgtaataggcctggccctgccgggcctattgcgagctagccataccataggaggagtcaacgtgagcaagcacaaccccgagcacatcagcggcccggtacgcagcgtgagcgtacagaaggcacccgccatccaggccctggaagatcgcctggaatccgccctggctgtatgcgaggagcgcgcccaggatatcgacaccctgagccgccgcctccaggccgccgagcgggcgcgccgctgggagatcgacgagattcgcagccatcaggcgacgatccgtctgctccagaacgacttgaacgcagcgcacgatgcccacgaggcacaagagcgccgcgctcgcaaggcaaccatcatggcctgggtatgcctgctgaccgcaggtctggccgtaaccctgaaactggcaggagtctgacaatggaatgcaacgatcacttcaccaagctggcggccagcatgttcggcgtgccgtgtgccaaggtatccccggagatgcgccgggtggccaagagccgggcattcgcccacgcctatacgcccaagaaacaggcttcgggcgggacttacaccgcccgtgtgagcggcgtcacctgtgacggtggtaaggtggaggtgcgcctggataacgtggagcgcgtcagcacctgtggctatgccgatctagaggcgcgggtagcggccagcttgtgccaggccgacgcgaagcgcgccgatgagtacgaaaaactgctgctcaaggtattcccgctggtatcgaagaaggccggcccgctgtccgccaaggacttcgaggtacgtctacacgatctgcacgtaaccaagctggcggtaaaccgtgccctgcgcgatgccggaatagaaatggacggaccgctgcgcagccgggtacggaagcttgcggaccggaataacgagatgggcgctgaactgttcggcctcaagcagggtttgacccggctggtggaggtaggtcaacgggccggcctgtattgggacggcgcggagactcagcgattgctgacggtggccccgaccaaggccgtctgtcagctcatcagcaagctgaccggcgtgcggtataccttccgcgcttccgtggcgaaggctgaggccgaggcccgtgagcgggcgaaggcggcggctaaggacacctggcaggcagcaaccttcgcagccaccatcgccggcggcgtcgtgggtagcgtgctgacgtacctgctcgtctaagcgaccagggcctactccggggtcaaatccgagggcgttcctagagcgccctctcgtgtgagtctggaggatcacgaacatgcaataccatttcacgcattacaacggataccgcttcggcgtcgagctggaggacgaggctgtcttcccgtgcatcgacggtaagcgggcaacctgggacaaggtggcggcgtgtgccggcagccttgtgcattacatggcgcaggacctgattgacttcggccagcgcaagttgagggagatcgaagatgagcaagacgagcctgtatccgctgagcctgcatcccggcctgattcaaatcaggacgatccacgtattcagcatccaagccccgagcaacgccgagaactggtggcagtggttcctctggcagcggaagtaccacccgctccgggaaagcctgagtccagccggggagctgagtgcgagtatcgccgagtgtgtgctccacctccgccggagtggctggcaagatagcgacatctggcgcaagaagggaggcgtgctggccctcggtgccttcgacctgtcaggtctgatggtaggttcctgcctcgtagtgggcggtgaactgaaggccctgtgcgttgatgaccgacacagcaggcagggtatcggcgctgagctggtgcgggccgccgagctggcgggtgccgagtatctgacctgcttcgagttcctggagccgttctacgccgacttgggctggagcaccacccaccgcgaggcgaactggacagcaggagagccggacgtgttgcacatgagggcacccggccatgacgtatgaggtgatgacatggcttatcgagaacaaaccgctggtcatcggagtcgccttcagtctggtggccctgggcgtgctgctcacacagaacaacggcggcccgcctacggcgcccgcatgacctggcacctccaggacatgttcgaggcccgaggtgggctgcggcctttgtgggaggaatggtaccaatggcactgcgccgcgactcctggctaaagcaagcgcaatccctggcggttgggcaggtaggccggttccgacacgtcctgggatgcaagagcatgagccggggcgggaccaacatgacctgcaagaacctgcctgaccgctgggtggcttactgctactcctgtcaggagggtggtgtggtcgagaaaacgcatgtgcggagggtacaatgcgcggatcaagaacgcttcatgccctggcccgaggatgcctcggactggacgcaagccgactgctatcaatcgctttatggtttgctgctgtccaagggtatcgactacaacgtgatgacgccagggctgccgctgctgtacagcgaaaggcagcatcggcttatcttccctaccaacgcgggctggattgggcgcgctactgccgaccaaaatcccaagtgggtgggctacgggtatcctgccccggattaccatggatggccccaggaattatcaatgggcaggccatgggtgctgacggaagactacttgtcggcgctgaaggtgcggtgggcctgtcccgaagtctttgctgtcggtctgaacggtacaaggctgcgcgacaggctggcggcgatcatgttgcagcagacctgcaagcgcgccttcatcttcttggatggcgacccggcaggtgtccgtggtagtgcaggcgtgatgcgccggctccggtccctgcttatcgaaggccaagtaatacccacgccggacgggttcgatcccaaggacctgacccgcgagcagataaggagcctagtaattggacgtattgacgctacacgcactgagtgacaaggaccgcttccgcacgttgcggagtgtggtgcctgaagggatgatggggccggagacgtgctttgtcatcgactggatcgagcaatactggaaggtctacccagcgcatcagaaggtagacccgcaggcgctacgcgaactgataaagctgcgaggtggctaccagccggagcaactggcggtggtcctgaacctcgtcaaccaactggacaagccggtagacccggactcgctacagggcgttgtgtcccagctcaacgaactggatttttcaggcagggtggatgccctcctggcgcagtacaaccagggcgaagacatcgacctggcgtatgagctgcgccggctgagcgacgaggccctgcgccgcgagggggtcagtacgccgaccgactatgtgacggacgacgtgtttgatatcctggcggaggagcagggtgaccacggcatcaagctgccggggctggtgcttccggcgtacatgaagggcctccacgccggggcctcggtgctggtggcagcgccgcctgatgcgggcaagacctcgttcatggcctggatcgctgtccatatcgcgccgcagctcaagcggtacttcgaccctgggcggcccatcctgtggctgaacaacgagggcaagggccggcggatcaagccgcgcctgtactcggcagccctgggcatgaccgtgggcgagattcttgccctggacccggaggaggttcgcaggatgtacgccgagaaaatcggcggcgactctgagctgatccgcatcaaggacttccacggtgggtccctggcccaggccgagcaggtcattgacgcgatgaagccggcggtggtgttttgggacatgatggcccacgtcaaaggtggccagcgcaaggaccagaaccgcaccgacgagatggagtacaaggtggccgaggtccgcgagatggcggtgcgtcacgacttcatcagcttcatgacgtggcagatcagcaacgacggtcacgaccagttgttcccaccgcagtcctgcctcaaggattcgaagacggcggtacagggtgctgtggacgtgcaaatccacctgggccgtctcaacggtgcggatcaacaggtcatgcgcggcctgtccctgccgaagaacaagttccagatggacgggaagccttcgaacgtggaggctatgattaacttcgacgccgcacggtgtcgtttctttgagagtgtagaccatgcaagctaagcatagccgggtgctcgaaggcaccaaagaaattccactgggttccattgcactgccgaccggggtcaaggccctgttgctgcgcctgtactctgatgcacggcccaacgagggcgtcgccctggccggtgggttccctcgcgacctcatgcatggcgccactccaaaggacgtggacatcgccctgtacggcatgacgcagtatcaggctgaagtgctcatcaacagcgtgcttcctaccctggacccgcgcttcgtccgggacggtggctggagtaccgagtacgccgacgcaggtgagggcggtatcttcaagggcgtgatatccctggtgggctgccgtggcctggaaggcatggacgtggacttcaactactacgatgccgacagcctcggtcgggtgatggagtcgttcgacttcaccatcaaccaagtgggcatcgcgtacaactggccggaccccgagggcggcccgcgactgggtgtgtacctgcacaaggacgttacctggggcgtgaacaaggaagttggttccggctcgcgactgccggagcgatgcgaaaagatgcgggccaaggccgcgtactacggatgggagaacgtgtgatgagcaagcgcgacgtggtattggatatcgagaaaggcatctggcgcggcgtagatcagaacgacaaggccgtcgaggccatcatcaagaagcacgggtacgtgatcgtcgagcctaagatcgacgggtgccgtgccatcgtgggtgcgcacggcgtggtatcccgcagcggccgccgcttccctgccctggacggcctggaggatcgcatcatcgcgaaactgtcccagcccggcctggactccggtctggtgttggactgtgagatgtacctggaaggcatgcccttcagtgaggcgaccgggcgcatggcccgcaagaccccgctgaccgaggccgagctgaagtgcctgcacttcgcggtattcgacgccacccatatcggcgtgctccgcaaatcgcgcaagtcccacctcatatacgatgagcgccgcgccatggtccgcagcctcatggaagattgccggcggggcgacaccccgtacttcttccaggtagccgcacaatcctgccgttctatggaggcggtactacgctggtacggctaccaccgcgccatgggcttcgaggggtcgatggagaaagacccgagcctgacctaccgcaacggcaaggttgctggctgctacaagcgcaagccggagatcaccgtggacgggcgtatcgtcgggtacgtgatgggcaagactggcaagaacgtgggccgcgtcgtgggctaccgtgtggagctggaagatggttccggcaccgttggcgccaccggcctgagtgaggagcacatccagctcctgacctgcgcccacctcaacggctgcatcgacgaggccatgccgaactatggacgcatcgccgaggtctccgcgatggaacgctcagccaacaccctccgccatcccagcttcagtcgcttccgcgacctggccagtaaccctggagtgaaggtatgaagattcgaaagtcccataaccgcaactacccggaagatatggtataccacgccaccaaccgggattcgctgctgtatccgaagtacgtcatgggttccgtgttcatcagccaggacggaacattccgcatctgcgtcatggcagggacttgggaccacgttgggtccgaagttcggcatcatgcgcgggacatccaatccctcggcgccggtcgccgtaagttgcaccgggtcatgcgacgtctgcgtcgcaatctgcgacaggtaggagtcaaagtatgagaatgcccaccgaggaagaacgcatgatccgctgcttgctggcggatatccacgaacccctggacctgctgttccccggcctccgcaccaaggcccatatggacccgcaagcggaagagctgtcgattcgaattgactacgaccatgcgaagctgggccgtatgggattctgccacgcggtctccctgtaccaactgaccatatggggacgtgaaggaatggtccgctacctgatgcaggagattccccgccgtgtgctggaaggtctactggtcaaggcgcagcagtacagtcaaagcaactggtacagcaaatgacgactatccgaatcctcgacctcgaaaccgagagctacgagcacaaggggcgcaaggcgtcgccctttgacccccgcaactacatcgtcatggccggctggcgggacgatgttgacggcaaggtcggccagaaggtggaacatcgcttccgcagccgggccgaagccgaagacccgaacaaccgctggttcaacctcgacggcgtggacgtgatcgtagctcacaatgccatgttcgaatcgaactggttcttcacccgctaccgggacgagtacctggccttcttgcgacgcggtggccgggtctggtgtacccagcaagccgagtatctgctgagtcatcagacgtggctgtacccggcactcgacgagctggctccgaagtacggcggcacccacaaggtggacggcatcaagatgctgtgggaccagggtgtgctcacctcggagatggaccaggacctgctgagcgagtacctgtccggcccgtgcggcgacatcgagaataccgccctcgtgttctacggccagctgatgaagcttcaggcccgtggcatgtgggctggctacctggagcgctgcgaggccctgatcggtttctcggcgatggagtgtgccggcctgaaggtggacctcgaagtcgccaaggtgaaccacgccaagcaactggaagaggtggccgggatcgaggccgagctgaagaagctgatgcccgacttcccggaatacttcgagttcaagtataccagcctctaccatatgagcgcatggctctacggtggcgaggtgcggtacaagggccgggtgccatacgaagatggccggatggagaaagccgacttcgtgcgcttcggtacggccaagcgggggactccaatcgagagtacctcagttcgggtcccgatccatgaagtgaccgaccagggtgagtggcactggcccaccatcaccgagctggcgaccaagcacggcccggtcatcacgttctccgctggcaagaacaagggcagcgtcaaggtgttccgggaggatacggacatcccggcgaccaagtgggatgatgaccagcgattccggttccccggcctgatcaacctgaccaaccttccggaagtagtgcgtgagaaattcctgggcaaacgcccggagttccagtgcgccctcaccctggcggatgggtcgcccgtgttcagcaccagcggcgacgccctcaaggctctggagaaacagggcttcgaggcggccaagctgttgatgcgcctggccgagctgcacaaggacaactcctcgttctacatcacccacacctacaacaaggatgggacgattaaggacacgaaggggatgctccagtacgtggacgacgacggcatcatccaccattcgctgaatacgacggcgacggcgacaacgcgtctgtcgtccagccgcccgaacctccagcagctcccgtcgaaggacgaggacgacccggaagccggcagccgcgtgaaggagatgttcgtgtctcgcttcggcgcggacgggatgatcggcgagaccgactataccgccctggaggtggtgatgttggcggccctgtcgaaggatcggaacctcctggcgaaactgatggccggcactgacatgcacttgtaccgcctggcagggaagcacaacaactggaacgggttcgactacgaccagctcgtggccatcaagaaggaccccaaccacccgtggcacggtcgcatgatgcaggctcgaaagaacatcaagcccaaggcattctcggcgcagtacggcgcgagtgcggctggtatcgcattcaacaccggctgtaccgtggaagaggcccaggaattcctggacaacgaggcggccctgttcccagagtccatcgcattccggcagatcgtccgcgacagtgcagaggccaccagcctcgtaatgtacaaggccgaggaccagatgccggcaggcgccttcagcgagatggggccggatggcaactggcgccagtaccgccggggattctggcaagcgcctggtggcacctgctacagcttccgccaacaggagcgctgggacaaggaacagcgcaagacggtcatggacttcaaggacacgcagatcgccaactactggaaccagggcgaggctgggttcatgatgaccgtgagcgtagggcgcatcttccgttggatgctgcatcgcccaggatttatggtcaccgagttcctgatcaacaacgtacacgatgccgtgtacaccgactgccacaaggacaccgccgccgaggtcaaccgtggcgtgcgcgacatcatggccgacgctgcccgctacatgagcgagcgattgggctacgacatcgcggacgttcccttcccggcggtggccgagatgggacccaacatgttcaacatggacgtgatccgggactaggccgaccctagcctactccggccttaaatcttcattcgacacgagagagaccacgcatgactcaacaactcaacgctctgcaagccgccctcgccctggccaacaaggctgccgagaccgcaaccatcgacatgtccgaaacctccaccggcggtggcggcggtcgcatcttcccggcgggcaccgccatgggccgcttctgcatctacatcgagctgggtgaccacgccaaggaattccagggcaagctcaagaatccggcgcctcaaatccgcctgggcttcgcattgtggggcgacgtgaacccgcaggccggtaacccgcagagccgcccggacgacctgttccacacctacgaggccgacggctcgatcaagcccggcctgttccgtaccttcgagatgaccctcggcaacaacgaaaagtccaagaccaagctggccttcgacaagatgaactggagcgggcagcatacccacttcgctcagatgctcggccaggcgttcatcatcccgatcaagcgcaccaagatcaccaagggcaacaacgccggtaaggaacgcaacgacatcgattggggcggcatcatgaagccctataacccggtcgatggcagcccgtataacgtgccggaactgccgatggacctgttgcagtatttcttcttcgacgcgccgaccaaggagacctgggacgccctgttcatcgaaggcacctcggacaacggcaagtccaagaacttcctgcaagagaccattcgctcggccaccaacttccccggctcggccctgcacatcatgttgggcggcggcgatgatctgatcatcaagccgacgacccaggccgcaggcagcaacctgccggcagtgcccaacgtggccgccgacgccggcgtagcggcagcaccggctgtcccggctgttccccaggcagtggctcagacggcccccagcgtgccccaggtggcgaatgtggccgcccctgtggtaggtactgccgaggcacagaacgtgctgcctgacgtgccccaggtggctcagacggcggctccggcagcggtcgaagtcccggcggtcccggtagtgccggcagtaccgcaggtctaatgcgcctgccatcggaagagttcctggcaggactatccgcgcagttcgaccgcagcatggcaggcgggacgttggtgtgtgacgccgacggacccgcctatgtggctgcggccactgctaagaccctggacactgcactccgaagattctggaagctcattttggagcagcagttcctagcgcactgcacagggacacgggttcacctcacggcagcaggtggggcgaaggcgtaccgcgacacgtatccgaccatgaaaccgtaccagggccagcgcaagggcaaggcaaagcccgcgctgctggagccactgcggcgggccgtggcggacgtgcatgagcgaggcggggcgccggaggggatcgatgtcatcctgcacacgttcttcgaggcggacgacggcatgatgatggacgcctacgccatgcaggacaaggccatcatccggtccgacgacaaagacctgcggatgacgatctacccgtattgggagatcgatacggcgtgtgtgagcaggatcgagggcggattcggctacctcaaggaagcgtacacgccttccggccagttcaagctcaagggccatggacggaagttcttcttggcgcagtggctcggcggcgacaccgctgacaacatccgagggatcgatcgattcaacggtaagctctgcggtatgaagacggccttcgacatcctccatccgatcacggatgaggacgaggccatcgacatgatcctggaggcgtacgccaagatcaagcaaaacccgctggcagaggccgaggtgctgtggatgcgccgaacgcctaccgacaacgcagcgcagtatctgttaagccgcgaccttcgtccggccttccgccagtggatcatcgagctggacgcctaccacgaggcgctgctccagaagcggagggagagcgattatgacgagtgagccgaaggtctaccagataccgcgcagtcaacagcgcaccttcaccctgaagctatgggccgagcagaacaagctgtgcccgctctgcggcaagcccatcgatatcagcgtgaagggcgaagcggtgatggaccacgaccacgaaacggggctggtgcggggcgtcctgcaccggtcctgtaacaccgcagaaggcaagataacgaatgcggcaggttcctggggatgcaagtcgatgaagtattccgacatcatcccctaccttcgtgccctcctgacgtatctggaggggccgaagcatccgctgatctaccccctgcacaagaccgacgaggagaaacacgaagcgaagctggccaagcgccggcaggcagccgccaaacgcaaggcggcgatggccgtcgcaaagcacaacgcgaggaacgtatgagcaaactccgcaagcaattcaccaatgagtacctgcgaaacgtctatgtcgagctgggcctcaagaagggtgccgagcacctgaccgagcattcgcgcttcggcgaggtgagccgccagtgcttccgcaactggtgcatcaagctgggcttccacgacagcaggacgcgcggcatgtacgccaagaagggcgcgatgcactggctgggccgcaaggctgccgaggtagtgcgcaagttccctggcgccgtgggcaacgtggtaggccagggtccgaaggtgctgagcctggacatcgagacctcgcctatcgagggctgggtctggtcgctctggaagcagaacgtgggcctcaaccagatcaagcgggactggaccatcctgtcgttctgtgcgaagtggatgcacagcgacgaggtgatctacatggactgccagggtgaccccctggacgacatgcacctgctggtcgccctgcataagctgctggacgaggccgacatcatcatcgtccagaacggcaagcgcttcgacgtgcccaagatcaacgcccggttcttcctgaacaagatgccgccgccgagaccgttcaaggtgatcgacaccttgatcatcgccaagcagcaattcgcgttcaccagccgcaagctggagtacatgacccacaaggcatgcaccatcaagaagcgcctccacggcaagttccccggattcgacctgtgggcagcctgcctccaggacaacccggaagcctgggaggagatgcgcctgtacaacatcgacgacgtacgatcgatggaggagctgtacaccctgatgcgcccgtggttcgtcggccatcccaacgtggccgtgtacttcaatgacgccgagccgaccatccgctgcccgaagtgcggcgacacggatgtcaagcaagagggctgggtgcatacgcagaccggcaagtacgagcactatcactgcggcggctgtggtggctggagccgggggcggtacacccgcaacacctcggaacagcgcaaagccctgctgagcaactaaggaggtagcatgagcctagcattcccggactcttacgagtcgacgatcacgactgaaccgtaccgcaaaggtgcgagtctggaagaacgcaaggtcggtaagcttcccatgcacctggtagtcgaggggttcccgctgctgaagcgggagcttgctcgaatgatgcaatgggctgccgaggtcaaggggtatctgccgcacgactggaagaagatgacggtgggcgagttcaagtccgcccaacaccggcacgagtccaagcggctgatcgacggaccgctggatgacgagtccaacctgatgcacctggtgcatgaggcattcaacgcaatggccgccgccgagcgggccctgatggaccgggagaaaggtaatgagtaaaatctgttggtgtacccgacagcacgagaccgatgaaggtgttcgggtcatctgggccttcaacgagcggggcatcggggtcaactacgtcacagcgtacatcacgccggcgatggtcagccatcaggactggagcgatgtcatactcccggacattctccgggagatggcggagcgcctggagcgggaagtgaagctggtggaactgcgctggttccgcgctgagattctgagctgcggggaatggcgtgactaccgagcgatgacgctggatggggcggttagcctggccgaggccgagtggggtcccgaggatatcgggcgcgtaatcgaaagacgataggagacggaatggacctgatacagcagcagatcgcccacgaagaggccctggtcggggcggcgcagaatgacgcccgcattgccttggaaaaggcgattgcccaagggtccatcgaccgcatcccgagggcgcgcatcatgttgatgcggatgctccccatcgtgaccgaagcgatcttcgcccaccaggaagcgaaggcggcggggccggcagcaaagctgcggcacctgctgcggatcatcgacgcccaggacctcgcagtcatggcactgcgggccgggctgtcgatgctcatcaactatccaacgatcacagcgacgaagtattacacccacatgggtaagatgctctgtcgcgagatcgaagtgcggttggccttcaaggtcaaccaaccctattacgaccggacgctggactacctcaagaccagcaggactcgcagcgtccggcacatccagaagacgatggacgctcttctggacgcggtactgccggaagaggcacgtatcgacctgccggatggcgactacctgcgcctcggcaagttcattggtgatccgctgatacagtgcggcctgttcgagccgaaccgcttcacaggtcggggcggtacgagcgtccacctggagccgtcgccggaagccaaggagttcctgcaagacccttcggcggcgatgacctggggaggcccaggccgtagcgtgatgctggcaccgccgcgaccgtggaacgactggtgcgatggcggttactacagcgctaaggcgcagaagcaccatgtgctagtgcgccgtaccaagcaccagaccaagcgggcgcgccagatgcagctacgccacctgggccgggacaagatgcccaaggtgtacgaggcggtcaacgcgctgcaatcggtggcctacgagatcaaccacgacgtgtacgagatcatcgagcgcgtcttcacctccggtggcggcgtgctgggcatcccccagcgcacctacccggacaaacctgagttcccgctcggcgacgagtgggccaaggagaatgccagtgagcaagagctggaggccttcaaccgttggaaacgctccgtccaccggtggtacaccggggagcgagagcataccgccaagcttcgcgaatttgctgcactctaccgagttgttcgagagcatcatggcaaggcagtgtacttcccgatgcacgttgactcccgtggccgcatgtactattggggcacaccgaatccccaggggtccgacatcgccaaggcgtgtctgcgattccacgaaaagcgtgccctcggtaagcgcggcctgtactggctcaaagtccacgtcgccaactccctcggatgtgacaaggtgtacttcgacgaccgggcagcctgggtcgatgagcgatgggacgacttccagcgagcactcaacgaaggtccggagaactatccgagtctcttcccggaagacgagtcgcccctgtgcgccatcgcaggtctgctggagctgcgggcggcctacgcatcaggccagccggaggcttaccgaagtgggttcatcgtccacatggatgcaacctgctccggcctccagcactactcagccattctccgagacgagatcggcggagcctacgtcaacctgctgccacctggacttgccaaagctgacatctactcccgagttctcggtctcgttgcagagtctctggcacgagacagagaaagtgctgaaggcgaggctcggggctacgctgtattgtgggataaggctggtctatcccgaagcctgacgaagaagccctgcatgacgctggtatacggcaccacgttcaagggcgtggtagaccactgcctggactacctggacgagtccggcctggagattcccgagggtatcccgtcataccgcctgggaagctacatggcaacgctcatactggacgcaatacgcgagacagtaccatcggcagtcttcgccatggaatggctccagcggctcgctaaggcccttcctgatgcatccaaggatttgcactggatcacgccactcggcatgcaggtgttccagtcgtacccgaagaccgaggaggtgcgggtgaggctgcgggcagaggctgtcgagtacgtcaccctgtacgaggccaaggacgagctggacccggtacgcaacgccaacggcatcgctccgaacttcgtccacgggctggacagcagccacctgggcctgacggccctggcctgtgcggcagagggtatcccgatccaggccatccacgacagcatgggcacctatgcggcagacgtggatcggatgcacgtccacatcagggagcagttcatcgccatgtacagcggcccctgtgtgctcgtagaactggcaaaacagctcgggatagaggctaccccgccccggagaggatcgttgaatctggaggctgtacgggactcctgggcgttcttctgctgaggggattatgtcacccacataggagcaagtgcatccgtccaaggccctcgtagaggggagcagggagaaagaggtcagggaagaccagagggtagaagaagagtagaggtagagtagaagatgagactagatgactacgaaggattctagatagaatagactaaccagcataggagatatgatagatggctactatgaagacccaccgacctatggttatgtcacccacagtggaaggatcgagaacaggcaagggtacggcccgtcctgtcacgttcacctctcagcagatcgagtggttagagcagaccttccccgaacatcagatcggtcctggaaccacgatggaagacatccagttccaggccggtaggcgagacgtggtgcgagcagtacgcctgcgccgacgcgatgccatcgcagtggagttgaagtgatgaacaagtccatctggcgagtccacgcaaaggccggcactccctcggaactccaggggctgtgctggctggcaatacaggagttggaagaattcaccctcttccgctcgaaagacgacgccctgaatgcgatgctggacagtatcgagggcaacgatcgaaccgagctgttggtattccgcgatggccagttggccggcggtgcctgcattgtgttcgaggacgatccccacgtcggcccgtgcgtcacagcacagtggcagtacgtcctaccgcgctaccgcaatacaggcgtggtccgggagttcatccgcgaactccaccgtcaggccggctggggtcaaatccccctcgtgtgctggagccatcgtgaaagcgatagccggtacacgatccactaccggagagccaagccttatgggcaagaaagtaaagaaggtgctgggcaagaccatcatcggcaaactcgctgatggcctgctgggcaccgacctgagcggcgcacaatccgatgcccgcaagatggaagagcagaaccgcctaatgcaacagcaggcggaccagctcgcacgaaaccagcaggttgacctcaccgccgagaacgtggcgcaggttgacctaggagcgatggccgatgccactggcaccggcacgcgacggcgccggaatcaggcgggcacaggcgtatcgcaaaccctcggtatcaactactgacgaggtacgccatgaaaaccaccgcagctatgctgtgggagaaacttcgggatgggagcgtggagagtcgagccatcgagttcgccaagaccacgcttccctacctgatggtcgatcccatgtccggcagccggggagtcgtagagcatgacttccagtccgccggtgccctcctggtgaacaacctcgccgccaagctggcgagatcgctgttccccacggggattccgttcttccgatccgaactcactgatgcgatccgccgcgaggccgacagccgggacacagacattaccgaagtgaccgctgccttggctcgggtggatcgcaaagcaacacagcgcctgttccagaacgcctccctggcggtcctgacgcaggtgatcaagctactgatcgtgactggcaatgctctgctgtaccgagacagcgccgccgctacggtggtcgcatggtcgctccgctcctatgcggtgcgccgggatgcgactggccgctggatggatatcgtcctaaagcagcgctacaagtccaaggacctggatgaagagtacaagcaggacctgatgcgcgcaggacgcaacctgtccggttcaggtagcgtggacctgtacacccacgtacagcgcaagaggggcacggcgatggaatacgccgagctgtaccacgagatcgacggcgtgcgtgtgggcaaggagggccgctggcctatccacctgtgcccgtacatcgtgccgacctggaacctcgcccctggcgagcactacggtcgcggccacgtcgaggactacatcggcgacttcgccaagctgtccctgctgagcgagaaactcggcctgtacgagctggagtcgctggaggtcctgaacctcgtggacgaggccaagggtgcggtagtcgatgactaccaagacgccgagatgggtgactacgtgccaggtggcgcggaagccgtccgtgcttacgagcgtggcgactacaacaagatggctgctatccagcagagcttgcaagccgtagtcgttcgcttgaaccaggcgttcatgtatggtgccaaccagcgcgacgccgagcgcgtcactgccgaggaagtacgcatcactgcggaagaggcagagaacacactgggcggtacttactcgctcctggccgagaaccttcagtcgcccctggcctacgtctgcctctccgaggtggatgatgcgctactccaaggcttgatcaccaagcagcacaaaccggctatcgagacgggcctcccggccctgtcccgctccgccgctgtgcagagcatgctcaacgcttcccaggtcatcgctggcctggccccgattgctcagctcgatccccgcatctcgctaccgaagatgatggacacgatttgggcagccttcagcgtagacacgtcgcagttctacaagagcgccgacgagctacaggccgaggcagagcagcagcgtcagcaggccgcgcaggcccaggccgcgcaagagaccttgctggaaggcgcttccgacatgaccaacgcactcgcaggagtctgatagatgtcccaaccgaacgaacagcaactgccgccgggcctcgctaacctggttgccaacgtaccgcccgccgccgcgccgacaccgagtcatgtgcaggtgatgccgaacccggtgatccagccgcaggctccggtccagcccggccaggtaggtgcgccgcagcaactggccatcccgactcagcagccgcaacccgttccgaccagcgccatgacgccgcactaccagccggtagcggcacctgccgtgggtcaacccgttgttccgcaagcacccgctcagccggccccggtagctccgccggctgcgggtgcagttcttcccgagaacctggaagtcccgccgccgccggccttcactcccaacggggagatcgtgggcaccttggcagggaacctcgaaggcgacccgcagttggcgccctccatcagctatctggaggcgttctctgacaaactggataccgtccgagccttcggcaaggccgccgagaaccgcgatcctcggttcatcgacgagcactatctgaaggaagttctcggcccggcccaggcgcagcacgtcatcaacgtggccaagggcgtcctgacctatgttgatgcgcagaccaaagccgtcctgagccagacctatgccgccgtcggcggtgaggccatcctgaagcaggctgccggcgtcttcaaccaacacgctgacccggccaccaaggccgccatcggtcggctgatggactcgggcgatgcccaggccatgcagtacgcagcgaagcaaattgtggccttcgcacaaggctcgggtgccgtggtacaggctaccggccaacccctgggtgctgcggcacctgcactggcagctctgagcgctgagcagtaccgcttggaagtatctaagctgccgctgaacgcatccgaagccgagatggctgcgctgcgcgagcgtcgtaaggcaggcatggcgcagggtatctaacgaccctgccctactccggccttaaacccacatccaaaagagagagcatcgtatgagctttttgaacgacctgacccgtccgaactacgctggcaagaacgcggacgttgacatccacctggaagagcacctcggcatcgtcgataagcacttcgcctacacctccaagttcgcaccgctgatgaacatccgcgacctgcgtggctcgaacgtggtccgcctggatcgcctgggtaacgtcgaggccaagggccgccgcgccggtgaagagctggagcgcagccgagtcgtgaacgacaagtggaacctgaccgtcgacaccctgctgtacctccgccaccagttcgaccaccaggacgagtggacccaatccttcgacatgcgcaaggaagtcgccgagctggacggccaggaactggctcgcaagttcgaccaagcctgcctgatccaggtgatcaaggctgccgcgatggacgcgccggtggacctggaagatgcgttctcgccgggcgtgctggagaaactggacctgaccggcctgaccgccaagcaggctgccgacaagatcgtccgcatgcaccgccgcgtagtcgagaccttcatcgaccgcgacctgggcgatgcggtctactccgagggcctgaccccgatgtcgccgcgtgtgttcagcctgctgctggagcacgacaagctgatgaacgtcgagtaccaggcaaccggcgcgaccaacgactacgtgaagtcccgcgtggccatcctcaacggcgtcaaggtgctggagactccgcgcttcgccaccaaggcaatcgcagcccacccgctgggccgtcacttcaacgtgagcgccgaggagtccgagcgccagatcgccctgttcctcccgagcaagaccctgatcaccgcccaagtggcgccggtccaggccaagctgtgggaagacaacgagaaattctcgtgggtcctggataccttccagatgtacaacatcggtgcccgtcgtccggacaccgctggtgccatcgaactgaagggtatcggcgccttcgacatcaccgcgtgatgccacgaaaccccgcacttcggtgtggggtttcttcaaagcctaacgacccgcgcagattccctgcgtgggtttttgcgctttaggagaaaccctatgctactactcgacgcagtgaatgtcatcctgcgcaagatcggcgagctgccgatcccgagcatggatgagacgtatccaaccatggccatcgccctcccggagctggaagatcaacgcatccagttgctgacccaaggctggtggttcaacacctggtggaagcacaagctgacacctgatcccacgggccgcatcaacctgcccaagggcaccttggcattctacccggattccccggacctccagtgggacggcctgggagtgcgagatgccaacaccggcgacgaccgcatcggtaagtcggtcgagggccgattggtgctgtctcgggagtgggaccgtatcccggagatcgcacagcgcgtcattgcgcaccaggctgcgctcgcggtatacacccacgagattggaccggacgagaccgcccaggtcatcgcccaggaattgcaggcgtatcagaacgaactgtcccgcatgcacacccgatcacgtccgctgaacacccaggccaagcgtagcttcagccggtggcggcgcagcttgaggacctgagcatgagctacaagcaatccgcgtatcccaatctgctgatgggtgtgagccagcaggtgcccttcgagcgcctgccgggccagctcagcgagcagatcaacatggtatccgatcccgtgtcaggacttcggcggcgcagcggtatcgagctgatggcccacctgcataccgaccagccctggccgaggccgttcctctaccacacgaacctcggtggccgcagcattgcgatgctggtggcgcagcaccgtggtgagctgtacctgttcgacgagcgggacggtcgcctgctgatgggtcagcccctggtgcatgactacctcaaggccaacgattacaggcagctacgggccgccacggtggccgatgacctgttcatcgccaacctgagcgtgaagcccgaggccgaccgcaccgacatcaagggcgtagaccccaacaaggccggctggctgtacgtcaaggcaggccagtattcgaaggcattctccctgaccatcaaggtcaaggacaacgccacgggcaccacctacagtcacacggccacctacgtgacaccggacaacgccagcacgaaccccaacctcgctgaggcaccgttccaaacgagcgtgggctacatcgcttggcaactctacggcaagttcttcggcgccccggagtacgccctgcccaactccacgaagaagtacccgaaggttgaccctgacccggctgcggctacggtagccggctatctcaaccagcggggcgtgcaggacggctacatcgccttccggggcgacggcgacatcgtggtcgaggtgtccacggatatgggcaacaactacggcatcgcgtcaggtggtatgagcctcaatgctacggcggacctgccggccttgctgccgggagttggcgcccctggtgtgggggtgcagttcatggacggcgctgtcatggccaccggctccaccaaggccccggtatacttcgagtgggattccgctaaccgccgctgggcagagcgggccgcctacggcaccgattgggtcctgaagaagatgccactggccctgcgctgggatgaggctaccgacacctacagcttgaacgagttggagtatgatcgacgtggctccggcgacgaggatacgaaccccacgttcaacttcgtcacccgaggcatcaccggcatgacgaccttccagggtcgcctcgttctcctgtcgcaggagtacgtctgcatgtcggccagtaacaatccgcaccgctggttcaagaagtcggcagccgcgctgaacgacgatgatcctatcgagatcgcggcccaggggagcctgactgaaccgtacgagcacgcggtcaccttcaacaaggacttgatcgtcttcgccaagaagtaccaggccgtggtccccggtggcggcattgtaactccccgtacggcggttatcagcatcaccacgcagtacgacctcgataccagggcggcacctgccgtgactggccgcagtgtgtacttcgctgcggagcgtgccctgggtttcatgggcctgcatgagatggccccgtcgccgtccacggacagccactacgtcgccgaggacgttaccagccacatcccgagctacatgccggggccggctgagtacatccaggcggcggcctccagcggctacctggtgttcggcaccagcacggcggacgagatgatctgccaccagtacctctggcagggcaacgagaaagtccagaacgccttccaccgatggacgctgcggcatcagatcatcggcgcgtacttcaccggcgacaacctgatggtcctgatccagaagggccaggagatcgccctgggccggatgcacctgaacagcctgccagcccgcgagggtctgcaatatccgaagtacgattactggcggcgtatcgaggcgaccgtcgatggtgagctggagctgaccaagcagcattgggacctgatcaaggatgcctctgccgtataccagctccagcccgtggccggtgcctacatggaacgtacccacctcggcgtgaagcgcgagacgaatacgaaggtgttcctcgacgtgcccgaggccgtagtcggtgccgtgtacgtggtcggctgtgagttctggtccaaggtggagttcactccgccggtgctacgggaccacaacgggctgcccatgaccgcgacccgcgcagtgctccaccggtacagcgtgaacttcggatggactggcgagttcctgtggcgcatcagcgacacggctcgacccaaccagccgtggtacgacacgacgccccttcggttgttcagccggcaactcaatgccggggagcctctggtggatagcgctgtggtgccgctgccggcacgggtcgatatggccacgtccaagttcgagctgagctgccatagtccgtacgacatgaacgtccgggctgtcgagtacaacttcaagtccaaccaaatctaccggagggtgtgatggctttctggctaccactattggccgctggcggcatgtcagcccttcagcagggtatggccaacaaggaagagcgcaagaagatcaaggctgagaacaaggctcgactgaaggcggacctcgacaacctgggcgccgctgcccgcgacatcgccaacctgggcgtcatggccgctagctaccgcaagcaggccgtggcctcgcaggtggaggccaagcgccaggggatgctcgccggcggcagtgccgaggctcaggccggcgcgttcggcgtcaagggtgcatccgtggatgcggtggccctggacatcgagcgcgaggtcggggaggccctgatccagattgacgacaacctggacaaccagatgtggaacctcgccgagcaggcgcactccatccaggctcaggcgaaggccggcctgctggggcagaagagtaccacggcggggcaacggtccccgctggtggccggcctgatgtcggcgggttccctgtacgcaagtcaatacttcaagttcggcgccacgcctaaaggaggcaactgatggcggaatcgcaacgtgcttcccaagagcttgggatcaacgtcggacagacgcaactccagccgggccagagtgctcggcgcggagtgcgcgactccgagatcaactacagcggcccgagcgtaggctcgcagattctcgacggcatcctgggtgccggtcagcagatcgctggcaaatggttcgagcacaacgtgcagcaggaagttctgcgcggtgagcgtgcccgtatggccggcgaggctgaggaggcagtagacagcaacgtactggccaaaccattcgtgaagggcggctggcgcaagcaggactaccgcatcgctcaggccgacttcagcctcaagatgcagcgattcatcgccaacaagggccgggagatgactcccgaggagttccgcaagtacctgtcccaggaggctacgcacgtcctggattcgaccgagggcatgaaccccaacgatgccttacaggcgctggcgcagcagcagaaggccgaggaacagctcttcggcatgcaggctaaggcgtacatggactggtccatcgaccaggccgcccgtggcttccgcacccagggtaacagcatcctggccaaggctgtgcaggctcaggccaccggcgacgaactgtcccggcagctcagcctggaagaggccggcctgttctataccaacatcatgacctccgaggatatcccgctggaggtgcgcgacaaggtaggcatgcagttcctggcggccagcctggacatgaaccagcggggcatctatgagggcctgcgcgatgccgggttcctggacagcatgtccttcgatgatcggcgtgcgctcaacggcctctatgaaaagtcgaaggctcagacccgcgccaaggaatcgatggctaccctgcgggccgacgcggacttccagcagcgggtggccaacggcgccatcacagaccttgccgaggttgaggcgtactcacgaggcatggtcgaggagggccgctggagcgacgctcaggccatctcgttcatgaccaaggccatgaccggcctgggcaacgctcagcgcatgcagggcatcatggcggccttggaagccggagacatcaacgccctccacacgctgggtaccaacgtcaccgaggcgctggagcagtgggacaagatgcaggccgccaacggctcaagcctgactgaccgtctcgtgcagggcacacagctcggcctgcgcctggggaccttccccaagacctacggcgagtccgtaggcagcgcggtgcgcatgatccaggccgccaaggaaggcgaggcaaacccggagctggtcaacacgctgaacagcatcttcgaacaggtggcctcggcccaggagatcaacccatccgccggcaacgtgatgctatccggcatcccggaagccgagcagggcgccgtggcctgggcactcaagcagatgaagatgggcatcgcaccagctcaagctctgcgcgagtttagcgccaacgccgaagtcgtgaagcagatggacgagttcgagaaaggccagaacaccaaggcattcaaggacaacctcggtaagcaggtcaacgacaagttcgtgaacaacatcttcggtcgagcctggaacatgctgaccggcgagagcgacctgagcaacaacgaggccgtcctgagcatgtatcgccgggcgaccatcgacgaggcgaactggctggccagcgaccgcaagcatgcgggtctgctcaccagcgacacgggccgcgaggccctgctggagatcgccgccgccaacgtgcgtaaccgcaccatccaggtaggcgaaggtcggaacctgaaggaaggggacctattcagccgccgcgatagcgcgccgctgatcctgcctcgcggcaccaccgccgagcagctattcgggaccaacgacaccgagaccataggaaccgtcctggccgagcagcacaagccgcatgtcgaaggactcctcggctacaagtcggtagtcgccttcgagtacgaccgcaccagtggcagcctcctggccgtcgagtacgacgagaacggggtcgccctggaccgcacccgtgtggacccacaagcggtgggcaacgaggtgctcaagcgcaactccgacaagctgaacgctatgcggggcgccgagtacggggccaacgtcaaggtcagtggcacggacattcgcatgaacgggggcaacagtgccggcatgctgaagcaggacgtgttcaactggcggaaggaactggctcagttcgaggcttaccgaggggaggcgtataaggatgccgatggttatagtgtgggcctggggcattacctgggcagtggcaatgctggggcaggcactacagtcacgcccgagcaagccgcgcagtggttcgccgaggacaccgaccgcgcactcgaccagggtgtgaggttggccgacgagctgggcgttacgaacaatgcctctatcctgggattggccggtatggccttccagatgggcgaaggacgtgcccggcagttccgtaacaccttccaggcgatcaaggatcgcaacaaggaagccttcgaggctggtgtgcgaaacagcaagtggtacacgcagacgcccaaccgggccgaggcattcatcaagcgcatggcgccccacttcgatacaccgagtcaaatcggtgtcgattggtacagcgccgcaacagcggagtaagacatggcaaagcaattcaagggccgcatgacgcccaagtatccccttgaccaagcacagctcgacgaggcccaagtacagggccaacttgacgcggtgcctaccgtggggttcgacgccctgacgggtggcgagatcggagaacggaacgtggcagcgggccaacgagccaatgcgcgggaactggaacgcatcgtagcggaccaggaactgccggcccttgaccgtgcttccgcactctggaaccagtccaccctcgtcggacgctggggcgatgcgctccagctcgacgcagaccttgcggcgaacagtaccggcgaggtggaccctaacttcgacgctgggacctatggggtccaggcgctccaggcggcaggtatccagccgactgacaactatctccagatcatggcccgtgccggcaatgccgaggacgcggcctacctcctgtcgaggattcaacggtatgagcaggacgagcaaatcgtgcgggacaacccgtactggaacttcgcggc

SEQ ID NO: 15 - DNA, 167410 bp, unidentified
  source 1..167410: mol_type = genomic DNA
ccaattactccttcggtaatgagcccagattacttattcattcgtcataatattaaagcttcttatgcgctgaataagttacaagaatctgagcagtggttacagtcaaaaattatagactcaattaatagatattacgttgatgaagttgaaatgtttaacaaaaatttcagtaaatctaaattattgacctatattgatgatactgaccattcaatcatcggttcttctgttgatattcagatggttcgtgaaattgtcaactatttcactcttcctagcgcaggtattaaatactataatactattactccgcggacgttacgttctggtgatttggtctttactgtcactccaactgcagattcatatccagttaatatcgttggaactgacccagataaaaatggtaaaggaaatatggtcattggaccatttaaaccaggtgatattaaagagaatactcatattcagccatatactgaagacgattttgatagaactactaatggagaaagaactcgttggtacaaaatcggtgaagtagattattatggtgataatatttactggagccttggagctattggagccgatcctcttcagtttgaagaccagagtattgagctttattctactcctacccaggatatcgtcttcgcccgcgatggaacacttatcgtatttgagaatgaccttcgtcctcaatacacaactattaaattggagcctattactcaatgacaattgcaccgttcgtcaccagcttacgaattcataagctatctgcgaatcaggtcaatattcgttgggatgacgttggtgcaaacttctactattttgtagaactggccgaaactcgaaacagagcgggggaagttatccccgctgataacttgagttggtcttcactgggttataccgcggataatgattggttcgaacaaaatcgtattgaaccgcttacttattataaaatgcgtgttcaaactacgtcagcagggtttgagccgtctgaatgggttgaaacagaagagttccaaacttttgaagaaaacgcatacacatttgagcatatgcaagaattcagtttagtgaaagaattcattaaacagaagttttctttaaacaacatgtcgtatgttaacttcaacacatctgccatgatggcatctttgatgactgagtcttttcagtttagtcctgaatattctcatttatcagctattgaaaacttcgttgtaggtgaatctggatatcatgaaattcagggacctattgaagcagtgtgtgttgataaaaatagaactatgctgggagaaatagacggaattttgtatctgtttgaaagattccaacatatggttaaagtatcaaatgataaaggacagaattggcaatacgttcagttatttaatgaccgtgtcggaaatccggtttctagagtggtaatttatcaatctaaaactacttcttatgttttaggatatgataaaatcttttacggaaggaaatcatctgacgtacgttggtcatcgaatgaagttaagtttagcgataacgaagttacatttgctaaattgggagaccagttaaagcttggctttgaagtagagttattcggaacgtatgcatcattgcctgctgacgttaccaaatatgctgaagcgtttacctgcaatgacgactatttgtatgttgttgcaaaagacactgtccgtaaagttaaattaaaagatgctccaatagatactgaccctttaagcccgacatttggtgaaaaggtatttgaaaaggaagtatctcatataacaggcaatcctaaatctgtatgctttaaaatggattccgttgggggcaaaatctttgcccttattaccggggaagttaaaaccttaggattagacccaacagacccaaggaacgttgtggattctgcaactaaaggcgtctatgtttaccaggaaggcacaaatacttggaagcgtgtatttggtaataccgatgaagaaaaacgtcgtatagagcatttatggacttctatgtcaactgacggaaaggaaatattcttttcatcagccaattttaagacaacagagtacgctcaggatattgagcttgagacgaaatatccagaactaatttctaccgcagttaaaaatgttaacccaattcagtatcactctgataagcattatcacatgatgagtttccgagcagatgaattttcaagatgggaaacatttgttcctggaccgatgaggttttatgctgagccttggtttgtctggatggctcgtgaaggtaacagatgctggataagtacagctgaccatgcagttgtcatttataatgatattctttatcagaaaagaatagatgcagcggcgcagggaactaccgagcgtattctttcggaagtgtgggataaaggcgacgcaacgttttattgccctccggtttcatttaacggatttttgcagtatgcttctggtatcatgtttcacgagccagatggaaagctgataggttattatgcattcgattatcgtgttcgtgaccaggtaacgcttaactggaaaccaactgatgtaatgtttaaggcgtttctgcagaaccaaacccgtgaagaagattggactcctgaacatactccaggcttgcgtgacccggatttacgtccgtatcttactaaaatgatgccggatagttacttgctacaagatagtaattttgaacacttttgtaagtactatctccaattcctttcagatggaaatggaacacattacaacagtctcgttaatcttgttaagaacaaatatcctcgcgaagaaaatgcatgggaatatctgtggtcagaagtttataaacgcaacatttatctgagtaaagacgctcgtgacgctgtcgtccgtttctttgaagcacgcaagaatgatttctatgctactaaaggaattgaagactcatataagttcctgtttaaacttctttataacgaagacgtcgaaatcgatattgagtcaaagaacactaccgaatatgacattattgttgaaagtacaaatatttctgacgatttagttggtcgtacgatttatactgcttccggtcgtagtaatgtgacttatatcgagagagaataccgggatggtcgtctgttatggcgtattactattcataacttatcaggacggttcattgaaggccaggaaattaaatcagagcgtacggactttgagggtattatagttcaaggtgttcgtggaaaggatatgctgagtaataacattgattatataaaccgcagccgttcttactatgttatgaaaattaagtctcagcttcctacttctcggttccgcgacgatgtattaaggtttgttcatccggtaggtttcggtttcattggtataacattgctgacaatgtttatcaatagtggcttaaatatgaagcatgttgagactatcataaataaactcaagaactataaatgggatgcaggactgccatcagtttatcctgatagagttgctattatcgcttcagatgatacaatagaaagagacccaataaccaatgagcctaggtattcttcacgtgctcaagctggtgaacctttcccgttacctgctaactataatcaagaaaataacaatagtgttatcgctggacaaaaccctggacaacgacgtaagccgttaagtcctacgtttgaccaatcagcagtaacgtttgctaattatcgcgatttagttaaccaacgtcttaaagacgatgcaggtaatcctcgcgatcctgaaaatccgacacaggtaaaaattgatgagtaattcaacaagagcaagttcaacgcgtagcacgatttatcgtgctatcattacatctaagtttagaactgaaaagatgtacacattttataaatcaattggtccgggaacggaccaaaacacgttgtatgtttcatttggtaaaagcactccgtggtcagataacgaatctgaacctgggtttgcacctccatacccggccgataatgaagacggtgtggttgatatttggacaaatatgatgggtgcagtcaaaattgaatcatctatgcttgactgtgttgttccaagaagagactggggagatacaagatatcctaatccacgcacatttttaatcggcgatatcgttgttgctaactctgcgccatataacagaactgatgctggatttggatggatggtatatagatgtattgatgttccaaagaatggaatgtgttcaattggtaatcttacaagcaaagaagaatgtattaagcttgggggtaaatggacgccatcaactatttccggttcagcgcctcgtgggcgtggtgatgcaaatggtactgtcgatttgggcgatggatatctttgggaatatctatatgaaattccagccgacgtatcaattaacagatgtacaaatgaatatatcgtagttccttggccagaagagattgaagaatctccagctcgttggggatttcaaaacaacttaacttggcaacaaaacgactttaacctaatctatcgtatgaagtgtaatacgattagatttaaagcataccttgatgcaatttattttccggagtttagtcttccgggaaatactgggtttaggcagttgtcaattataactaatccgcttgaagttaagccaatgccaaattctcctaacgttaaggctgaaaaaggttggtatagcgcttctggtcttgaaagacagtcaggtgaaatgatttacatggaaaatcgacaacctattatacgttcaatggaccaaacagaagagttaaatttaattttcgagttttaattatggggagcctttggctccccatttttatataaataagactatactttgatatgaggttaacctatgtatacagataagggtaaaaaaataattgacgtcggtgagattggtaatgcttctaccggcgacattctgtatgatggcggtgtgaaaattaatgataacttcgacgccatttataacgccttcgctgatcaacgattatttgcagccggtggtggagctttaaaccaaaaaatccacgcaacaagttattatcaaaagataaaatttggtgatgctaactcggccggtacagttccgatgggttcatgcatagatgctgattgctcagaaggggcagttcaaattcgtctttcaaaaggtaaagcgggagaagctgtattcgttgtaaatagtaatggctcagcatcaaaagctagatccataaaaataacaacaaacggcgaaggtgtagcagatgcatttaaagatggatcgcgagagttgattatcaacacgccaagatgtagaattgaattgtggtgtgttgaagtcaaagctaacggtgctgcagtttgggattattcaatttcaagtatgtttggcagcacatattcaccgttagaagctacatataatttaacaagttctcctattaatattcggcttggatataacgatgattactctactgttaaattgttattaagcttcagcgcaaatccaggtggtcaaaccatcaaaaggcaatcatctgaagtcatgcttatgattgacccgactattacttcatcagcgccaaacggaagagtatttgacactgaatatgcagtgttaagaagcggtgaatcatctgaaaatgaaaagatgtattctatttcatactctattaacgcgcagaaagatttaatatgcacagcttcaacatcttatggaaacgcacgtttggcagttaaagttattgctacacagaccgtaggggtatctcaataatgaaacaaaatttgatagtaggccaatctgtagatgatgggtctggtgattacctccgtaaaggtggtcttaaaattaataacaactttgatgatttatattcagagttaggtgatggttcagttccatttgcagcaggtgcatggaaaacttttaaagctagccctactggaactactttaaatgctaagtttggtcaggcctttgctattaatacccaggcagcaagagttaacgttcagcttccaaagggtacagccaacgactataacaaagttattaaacttcgtgatgtttggtcaacctggcgattaagcccaatcacagttattcctgctcaaggcgatacattaaaaggttcagcttctcctaaaattttcaatactaacttccaagatttggaattggtttattgcgcccctggccgctgggaatatattgaaaataaaacggtagataagctaactaacggtaacttaagtactgtagcgaaaaaatcaattattgctgctgcgggtcagactgactttcttaacatttttgatggcgtagaatataacgaagactcgcttaatgtatatcgtcgtggtaatattttatattacggtgaaaccagcgttatggataaagccaatgctgattacggttctcctggaacagtagcaggtcaattggtagaattaaacggtaaagacattcgtttaaaagttccatgtgttgaaggggaagtaataacatttgaaaccttcctagatggaattggtgtttatcggtcttcatacaacaagttggctatccagatacgagattcagcccagactacatcccagacgattcctgggtcaatgatagtagataaccttactactctccgcagaatcactctggatgacatgggtgtacttccgggcgtaggggtaaatcctaactcgcttgaaatttcattgaacggaaaggaattactcgaagctggaactgcaggtcttcctttattttattgtgaaggcgcggaaggtggatatgcagaagactgtataaacaatggtggtcaatgggtaaattctaaccaagactatagactggaatttgactcaactggtactaacgtcgaagctattatttttggtgaggcgtttgaagataaagaccttcttaccgtccgttggttcaataataacatcggtactactatggatattgacgatatcatggcagaaaccgaccaagtgtatatgaatgctgagcaattagtaactctaaaaaatcgcattgaatacacaaattatgatgaacctaatcagaaaaatatgcgtccggttgctgacgatattatgattaaagtcaataatattgcagcattttttgacgtaatttatccgattggcacgatttatgaaaacgctcacaaccacgcaaaccctgctgactatatgggatttggggtgtggaagctttattcacaaggccgtgttactgctggttggaataatgattcatctgatccttatttttcgcgtaacaacaataacttaaacgaaaatggtcagccatcattaacagcaggtggaacggttggagatttgacgtttacattaggaaaagaacacattcctgagttaatgtcaagagacaaagttctaatttcagaccctgaacatggcagcgtagttattggcggatgtcaattagacccagacgcacaaggtccaggttattctaaataccgtgaagacactgttgcggtaaacaacggtgtagttccaaatgacatcactaaaattcagccaacaatcaccgtttatcgttggattagggtaggttaaaatgacgattgaaactaaaactcgtgaaggggctaaagttaattcaagattaactgccttttcagaatatcgcgtagacccgcagaatattgcggtaggaaataaggctcctatagggagcctaacctttgaacaaatggatttaggtgtttggtatccaaacactgaagctgctattaatgatttaatgtcattacagtcagcagaaattggaactattatttgtaatgacaccggaatatctccacaaccagcacagcaaattacacgcgctactttttcaggcgtagtttcgttagaacctaaagaagacggttctgttggcgacccagtaataattcacattcttggattgccaattagaattgcgaatggtgatgactttgcagcagtagctaccaggtggtatgataaggtaaaagaattagaagcagttggaaaagtggttcaacaagttactcaatcacctgcaactcctcagtatgttgatattattcatctggattatcagaaccataattttgaaacatataaaaaatatggtttaactgttgagtttactgttacttcacctgctaaagcgggttatggacaatgggacgctattggtaacgaaactaaaaccttcggtgcaaacacatttacattccactattttagaaggatgggataatggcccagaataactataatcactacagtgatttggccaaatatacgatatttgacccagcaaatacacaatggccagttgctacaaaagacgtccaatcagcgctagcgttgattggaagctgggcaagaactgacattggattacctgcagcatctccaaccgtagcaggtataattcgtacagctacgcaggccgaagttgaagctggaactgtaggtaatgctgcggttaccccagctacattaaaatccacaattacccggcctgaagcaactaccgcaattcttggcttaacccgatacgcaactaatactgaagccgcagcattaaccgcaggaaatagaactattacagctgctgctcttggccatgtgtttaaaaccgtaaaagcccaagaaaacgtagatggaactgttaggttaacgactgccgctcaagctcaagcaggaactgatgaaaccaccgcagtaactcctaagcgtgttgtagaaatgattggaaagttcagcgttaatcctcctacttatacttctgcaacagaaagcaacttgggattagttcgtgtcgcaacccaagcccaggtagcagcaggtgctgttcacgatggatacgcagtaactccaaaaaccttcatggcatcaaaagcgtctgacagcgtatttggtatagtaaaatttgctaaagactcagatgtggcttcagctacttctaacaatttggctgttactccaaaaagtctacaagcgttaaaatcaaccaaggataaatatggattaacccgattatcaggttctccaacatcagatgcttcacttgctgcagctgcgactgatgctgtctttaaaactcgcaaaataaatggaaaaacccttgataacgatataacaattaccaataacgatatcaattgttatacacgccctgagtcggatggaagatatatgccagctggaacgcgtgtcggtaatattacttgggtagaaggtggaacttatattcctgctggaaactggtttgggtgtaattctccatatgaagccacttctagattggcgctgactctcacaataaaattccaacgtaataacgacggctatgacaatagaatttggagatttagaataactgtcaacggggaaaatagaggagaacatacactcaatatagagaataccaagggcggtagaaatggtcattcgtggagatttgaaggatatgctacaggctcatatattataaatgatgttcctcctaacgccagagttcaaattgagccatttgaaaatatccgtggcgataattattcagcgtcattaacgttttgcaccaaccgatagggaattatatgacaaaattagtagactcgcttccgtttgtagacggaattccagacgattttcaacagagaattaactggataaaaaatacagagcctcttaatggggcttcaacccgctatggaaatgatggagaactgaatagagcttctgtgcagattcagaaaaatgtggttcaggtacataacgatttgaacaacgttggaactgctgtagaaaatattcaagtagatgtagaccaaatcaaaaaatcgttagaaattacaggttcttctgacgccattgagcaggtttatatcaataaaaagaatattgaaaagcatgatggacaaattcttaaattagaagaagacaccgaaaaacttcgaactgaccttgattttctcgaagaggatgtaggtgtttatgattctagtaaagatgattattacagaacagttcgtgataatatagtttgggttaaacgtgaaattggtgcgtatcctgggcaagatgttaacggacagcctaagcaagacgctccgggttctggtatgaaataccgaatcatcaacaatgcgtcagctatagtaaaacatgacgagcgtattcaggcgctagaggatgcatacaatgattcagacgtaggttctctgactattgaagtaaacgacctgcgtaaagaagttggtcctaaatccggagctacgtcagcttcaatttatgcaaggcttgtgaataacgctgatgctatttccgcagctaataatgaaatctttgctattaaccaagccattgattttaccaatccagtaaaaattggagctcgtactactagattagaaaacgattatcgtatagttgacgcaacacttaactctgcacaaaccgggttagttcctcgtgtcaataatattgatgctcgtttggggtcttctgataagcctgatactattgaaggaaaaattagttctctttcaactgaccaagggtacatttctgatgttgtaggacgtgatacttcatcagggcttcagggtcaagtagcatggataaatcagcaagttggtattgttcctggcggacagccgattcctccggggtcaattttagcgagaatgaccaatgttgaagggatgcaaaactctcagcagtctgctatccaggacattcaagtagaacttggcaataacagcgaagggttaaaaggttctgtatttacgttacagactcaaatgaatggtgacttttcgtcagaaaatccagttcaacgggatggtgtatacgctactgtagtagaattgcaagataaattcgtgactgcagttactgacgtagaacagactggagcatacctccgtaaacggggcgaatggtttaagaagccttcatcaataggtgaattcagtaaagaagatttcactgttgatttaagttctgatgcattggtaaatcctaactcattggtcgctgcttcatttaatgctggcattcgtattgttgatgatattattgttgatgacgatggcgtattttgtgtagaaactgatacagttatcgaagcttctgattcagataaagctgtccaaattgttattctcgtcaataacattgaggtgtttacttatagcctaggtgttaaagcagtaaccggcgagcaactgttgaaaaccaagaaacttattaagttttcgtctggcgatgcaatcaaaattgtgtatagagctgcttcagaagaatcaaaagttcctgttagtattaaatcattggatattactattcatccagcagtataatgaaagggaccttcgggtccctttttcgtataaatagaatataaagaggagcttatatgtcatacaacacatacaacccaaaaacgcttaaagacgctatacttcgacgtctaggagcgccggtaattaatgtcgaagtaactgaagaccaaatttatgattgtattcaacgagcattagagttgtatggtgaataccactttaacggattgaataaaggctatcaagttttttatattggaaaagatgaagctgacaacgcaagatttttaaatggtgtgtttgatttgcgtggtcgtaatgtatttgctgtcactcaaatcgttagaacaaatgtaggttcattaacttcaatggatggtaatgctacctatccgtggtttactgactttttaatgggaatggccggaattaatggcggaatggggtcaagctgtaataagagttatggaccaaacgctttcggtgctgacctgggctattttactcaattaatgacttattggtcaatgatgcaggatttgcttgccccacttccagactattggtataactctgataatgaaatgcttaaagtaatgggcaacttcatgaagggggacatcattgtttgcgaatgctggactaaatcatttatgaataccgacatgatggtaggtaatactgcaggttacggcttcgctggtgaacaaacttccgaccattggggcttaggagataggtatcagaatcctaaccttcgcaataacggccaatatgcaggtgaaggtaatacaaatagagaaggtgcttataataatcgttgggtaaaagattatgctacagcactgactaaaaagttgtggggtgaaattctgtttaaacaccaagggctacaattagccggcggcgttacagttgatggccaaacacttaaagtagaggcccaagaagaaatcgagaggctccgagaggaacttgatttacttgacccgggttgtcctattctgttggggtaaaagatgactacatttaattctagtttattcgctcgccttgaggattaccgaggatacaataaaactaatgagacagaaattctcaatccttatgtgaatttttataatcacagaaatagccaaacgttagcagatgttttatcagctgaggctattcaaatgagaggaattgagttttatttccttcctcgcgaatataacaatccggatttgcttttcggagaagacccatcaagtaaattcaccaaggcttggaaatttgctgcttacttagactcttttgacggttattctggtgataacacgttcttcagtaaatttggtatgatggttaatgatgaagtcaatttgactattaatcctaatttgttcaagcatcaaaccaataattcagaaccaaaggcaggtgacctgatttatttcccgatggataattcgctgtttgaaattaattgggttcaaccatatgatccattttatcagttaggtcaaaatgttcaacgtaagattactgcgcagaaatacatttattccggtgagcagcttcaaccagaattgcagcgcaatgaaggaattatcattcctgagttctctgaacttgatttagaaccaatcaaaaacattgattctcttgctgatatttctgacgtacaatacgcagaaagcgatgcaattaataaagaagcctctgaatatgttcatccgtattatgttaataacggaagaggacttgagtctcctcctaaagcagattcgtttgatgacggattttttgaataaataaaataaagatgggacctttgggtcccttaggagaaatcatgtttggacattggtataattcgtccttacgccgatacattgtattgcttggagatttattttctcatgtacaaattgctcgttggcgtgaagacactggactaaaatatattaaagtacctatcacttatgcttcaaaggaaaagttcctttctcaactcggaaaatggactgctatccagtctaccgagaataaagcaaagatagaaactgttttgccaagaatgaatttgcacttggttgatatgcaatacaacgcgatgtataaaacatcacagttgaatagaaccaaatcatataaaaccccttcaaaaattacatctcagtataatcctactccgattaagatgatttttgaattgggaatttatacacgcaatcaagatgatatgtatcaaatcatcgagcaaatcgttccttattttcagccgcattttaacacgactataactgaactttacgacaaagacacaagctttaatcgtgatgttagaattgtattacagtcattttctccggatgaagctgttgatggagataatatcactcgtcgtagattagaatggtcgctgatgtttgaagtcaatggatggttatatcctcctgttgccgaggttgacggcgaaattagaaccatttatttagatttcttcgctaacagcaaagagctaactccagaaggaaactttgaatcagtagatagcgaagtcactccacgagatgttcaacacgaaaattgggatggttctagtaaacaaacttattctcacgatattcctattccggtaaatccggaggctcctggaccgagaggtgaaaaatgagtgaattacaattagatatggctaaattattagacatcgaaggaattcctggaatagaaggacaagaaattccagtttatgaaaaacttgaattagttgaagttaaatctaatccaaatgaccgtaaacctgacctcgaagatgactattcggtcgttcgcaagaacatgcacttccagcaacaaatgttaatggacgcagctaaaatatttttggaaactgctaagaatgctgactctcctagacatatggaagtatttgcaactcttatgggtcagatgactacaaccaacaaagaaattcttaagcttcataaagaaatgaaagacattacttctgagcaggttagtactggaaaaggagctaatcctcaacaaggaatgaatattcaaaacgcaacagtctttgtagggtctaccgctgatatgatggatgaattcggtgatgcctatgaagcacaagaagctcgagagaaaatagtaaatggaacagactcaaccgtttaacgttctgagtgatgcccatcctttaaatgacgggaaactgacggttattcgtcacccgtctgaaatggaaacgaaaatcgaaaacggagttcgtttctttaaatcgcaatgggatgataagtggtatcctgagaaatttgaagactatcttaagttgcatgggatagttaaaattcgtttgcaaggtgaagacccagctcatttccaaacgtttaaggacaaaaataataagcgcacccgctatatgggattgccaaaccttaaacgagcaaatattaaaatgcagttgactcgtgaaatagttgcagaatggaagaaatgccgagacgatattgtgtacttcgcagagacctactgtgcaattacgcatattgactacggtactatcaaagtccagctccgtgattaccagagggacatgctagaaatcatggcggctaaacgtatgacttgttgtaaccttagtcgtcagcttggtaaaactactgtagtagcaatctttcttgcgcacttcgtgtgttttaataaggataaagcagtaggtattcttgcgcataaaggctcaatgtctgcggaagttctcgaccgtactaagcaagcaattgaattacttcctgactttcttcagcctggtattgttgaatggaacaaaggctcaatcgaattagataatggctcatctattggggcatacgcttcgagtcctgatgctgttcgtggtaactcatttgcaatgatttacattgacgaatgtgcgtttattccaaacttcatagatgcatggcttgctatccaacctgttatttcatcaggtcgtcgttctaaaattattatcacgactacaccaagtggattaaaccacttctatgatatttggactgcagctgttgaaggtaaatccggctttacgccttatactgcaatttggaactcggttaaagaacgtctatataacgacgaagatatgtttgatgatgggtggcaatggtcacttcaaactatcagtgcttcttctcttgaacagtttaaacaagagcactgtgcggaatttcatggcacatccggtactctcatttccggtatgaaacttgccaatatggattggattgaagttactcctgactcgcacgggttttataaatttaaagaagcggaagcagaccacaaatatattgcaactcttgactctgctgaaggacgcggtcaggattaccatgcactaaatattattgacgtgactacatctgaatgggaacaagttggagtattacattctaatacaatttctcacttaatcctcccggatatagttattaaatatctaatggagtacaacgaagctccgatctatatagaacttaactctacaggtgtttctgtagcgaagagtctttatatggatttagaatatgagaatgtcatttgcgattcaatagttgatttaggaatgaaacagacgaaaaggtcaaaagccgtcggatgttctgcactaaaagaccttatcgaaaaagataaactcattattcaccatcgtgctactgttcaagaatttcgtactttctctgagaaaggagtatcctgggcggcagaagatggatatcatgacgatttaattatgtcactcgtaattttcgcatggttaacaacacagcaaaaatttgctgatttcgtggataaagatgaaatgcgtttagcatctgaagtttttaaacgcgaattagaagatatgaacgacgattacgctcctgtagtgttcgttgacgccgtgaatagcgcagaatatgcgcctcaagaacatggtctttcatttgtataaataataaaaagcaaacaacattgaggatatatcatgcctttagtctctcctggaattgagctcaaagaaacgagcgtacagagcacggtagtacttaacgctacaggtcgtgccgcaattgtcgggaagttccaatggggtcctgcatatcaagttactcaaatcactaacgaagttgaactggttgatatgtttggtggtcctaataaccaaactgctgattactttatgtcagcaatgaactttctgcaatatggtaatgatctacgtacagtccgtgtagttaatcgtgaagctgccaaaaacgcatctccactggttgataatattgagtgggaaatcacaactgctggtagtaactatgaagttggtgataaaattacggttaaatatgcagaccaaactgtagatgacactggttcagttactgaagtagatagtgacggaaaaattatgtcggtgttcattccgacggcaaaaattattgcatatgcaaaaagcattaatcagtatccggatttaggtgattcatggacaactactattacttcacagagttctggtgtttccgctgttattactctgggcaaaattatttctgattcaacagttctgttaactgaacctgaaactgcccatgaagaaatgacaaaaactgaattccagactgcgcttgcgcaatataaaatgcctggaattgtagctgcgtatcctggcgagctcggaaaccaactggaaattgaaattgtatcaaaagccgcttttgataaaggcgaacagctgacgatttatccgagtggtggacagcgtgcatcaaccgcaaaagccgtatttggatatggtcctcagaccgatacacagtacgctatcattgttcgtagagatggtgcggtagttgaatcaacggtgttatcaacaagccgtcaagataaagacatctacggaaacaacatctttatggacgattatttctccaaaggttcttcacgttatatatttgctaccgcgcaaggatggcctgaaggattttccggtgttattcgtctgggtggtggggtttcagctaatgaatcagttactgctggcgatttaattcaaggctgggatttatttggtgaccgtgaagcattgcgtgtaaaccttctgattgctggtgcttgtgccggtgaaaccgatgaaatcgcaagtacagtacaaaaacatgtttcgtctattgcagatgagcgtcaagactgtttagcactcatttcgcctccaaggtcaacgattgtaaatattcctctgactcgtgctgttgataatttaatcgactggcgccaaggcgatggaacttatgattctgctaacatgaacattaataccacgtacgcggcaattgatggtaactataaatatcagtatgataaatataacgacgtaaaccgttgggttccactggctgccgatattgcaggtctgtgtgctcgcactgatgatattgctcagccttggatgtcaccggctggttatcgtcgtggtcagattctgaactgcattaaacttgcgattgaacctcgtcaagcacatcgtgaccgtatgtatcaagcaggtattaacccggtaacgggtcaaggtacaggtgaaggtttcattctgtttggtgataagactgcaaccactgttccaactccgtttgaccgaattaacgttcgtcgcttgtttaacatgctgaagaacaacatcggtgattcttctaagtggcagctgtttgaattaaacgataactttacccgtagttctttccgtatggaaaccagccaatacctcgcaggtattaaagctctgggtggtgtatatgacttccgagttgtatgtgataccacgaacaacactccagcagttatcgaccgcaacgagtttgtagcgagcttctacatcaaaccagccagatcgataaattatattacgcttaactttgttgctacagcgactggagcggatttcgatgagttgatcggaccacaataaattgtacattttcgctaaatcctgatacaattgcacatatgaaatattatgtgcaattaaggaaaaccaagtgattatctctaaatttgttaaagtaaaaataattcctaaaaattttaaatacttttcggaacttggatacaagctgcctcctctgggttcgcctaggcatggattcaaatattattcaattgatatcagtgttgaccatcttgagcccgggtcaaacatatatgttgattgtgtttgtgataaatgcggtgaacaatattcacagcgttattgcagagacactgacgtgtgctatgattgccgtagcggaaaatttaagataggaaatactattggaacagctaataagggtaaagtgttgtcttcgatgacaggagaaaaccatcctcgctggaatccaaacaagacagaatataatgaatatgctagtaaagttagaagagaaacttctaagcataaaccaatttattctacatgggaaaattttgataagattggactatgtggaatacctggagcgtatcaattagaccataaggtttctgttgcatatgggttttacaacaaagttcctcctgaaattataggaagcattgataatttagagataatcacttgggaagaaaatcggtcaaaatcaaagaaatctagtattgatttatgggatctattgaaatgaaccccaggacattctggggtcatctaacctttagatgataaattatattaccgcacactttaatagcctctacgatgatgtagtcaatcaagaggctatataaatatctataggaaacaacgatggaattaacagacatcacccgtgcgtttgaatctggtgactttgcacgtcctaacctgtttgaggtagaaattccttatctgggtcgtaacttcagtttcaaatgtaaagcagcaccgatgccggcaggtatcgtagaaaaagttccagtcgggtacatgaaccgtaagattaacgttgccggtgaccgtacttatgacgactggactgttaccatctataacgatgataaacatgaagtacgtaaggcaattattgcttggcaggctcaggcccacgctcaaggcaatgatatctctggtatgactccagccgattacaaaaaggttgctacggtacgccagtttagtcgtgatggcaaaactatcacaaatgaacacaccattaccggtctgtggccaactaacgttggtgaagtacagatggactgggattcgaataatgaggtagaaacgttcgaaactacatttgctattgactggtgggaataatgttatggggcttcggccccgtatcgaagttctgtgagttatttgcttaaatatctgacaaaacttcgatataaatatacttatagataatttcggagactccaatggcctttcatattttggacttattcgctccgtgggaaaaacgcgacgaagctgaatataagcaacaaatcaacaatgacctagagtcaatcactgctccaaaatttgatgatggagctcgtgaagttgaatcaaacgaaaacgaaatccagtataattcattcaaccaaatgatgtttggttccaatgaacctggaatgaaaacaaccgctgatttaatcaacacttatcgtagtttaatgaataactacgaagttgacaatgctgttgaagaaatagtttctgacgcggttgtatacgaagacggtcatccagtagtttctcttgatttagattctaccgacttcagtcaagcaattaaagaccgcattcttgaagaatttaatacagttttaacatgccttaatttcgagcgaaaaggagccgaccatttccgccgttggtatgttgactcaagaatattcttccacaaaatcgtcaacaccaagaaaatgaaagacggaattcaggaactgagacgtcttgacccgcgcaacttacaattcatccgtgaaatcgttaccgctgatgacgctggcactaaaatcgttaaggggtacaaagagtatttcatttacgatactggcaaagaaagttattacgcagatggtagattatattccgccggaacgaaaattaaaattccacgcgatgctatagtatatgcacattctgggctagttgattgctcaggtcaaaacatcattggttatttacaccgagccgttaaacctgccaaccagttaaagctattagaagatgcgttggtaatttatcgtattactcgtgctcctgaccgtcgtgtgttttacatcgacactggtaatatgccttctcgtaaagcggcagcacacatgcagcatattatgaacacgatgaaaaaccgtgttgtatatgatgcgtcaactggtaagattaaaaaccaacagcataatatgtcaatgacagaagactattggttgcagcgtagagatggtaaagcagttactgaagtagatactcttcctggtatgtcaggtatgagtgatatggatgacgtccgttactttagaacagcgttatacatggcattgcgagttcctctttcgcgcatgccagatgcaaataatcaaggtggtgtgcagtttgatgctggcacagcaattactcgcgatgagcttgattttgctaaatttattcgtagattacagcataaattcgaagagattatgcttgatccacttcgcactaatctaattcttaaaaaagttttgtctaaagatgagtgggaagacgaaataaataatattaagattgtgttccataaagattcatatttcaccgagttgaaagatgctgaagttatggagcgtagaatcaatatgctcacaatggctgaaccgtttatcggcaagtatatttctcataagacagcaatgaaagatttccttcagatgtctgacgaagaaattgaacaagaagccaagcaaattgaattagagtctaaagaggctcgcttccaagaccaagaaaatgaagaggatttctaatggaaaattatatttccgcaattgaatccagagacctcgtagcagccaaaaaagcttttggtgcaattatggctgaacggacatctggtttaattgaagagcgcaaaaaatttatcgcagcgtctgtcatgattgagggtgaagagcccgttgacgatgaagatgaagacgacgaagatgaagataagtctgagaaagacgacgacgaagaggacgagtaatgcttatactgcctgaaaatcatgaattagttatcgacgctgtcgaagcttttcttcctgaagcacaggcacgttttgataagttgtccgcagcgctttctaaagatgatataaataaaattgtagagaacatggttacttctgagcctgatttagcaattgctttaggttcaattaacgaatctctacaattaaatgaatttatcgttaagcacgttgattctaaaggtactattacacgtactaaggatcgtaaaacacgtgagcgtaacgcgttccaaacaaccggactttctaaagctaaacgccgccaaatcgcgcgtaaagcagtaaaatcaaaacgtgctaatccatctgctcaaattcgtggattacgtaaacgtaagaaagcacttaaacgccgtcaggctctggggctaagttaatggaaaacctcaatgaacaacttttaattgagcattggggtcaaccgggcgatgtaattgatggtaaacccatgctggaatctattatcgttgaaggcgaaaatgaatctggcttaaaacctggtctgtatatcgaaggtgtttttatgcaggcagaagtagtaaaccgtaataaacgtctttatccaaaacgcattcttgagactgcggtaagccgttatattaaggaacaggttgctactcgtcaggctctaggagaattaaaccatccacctcgtgcaaatgttgacccgatgcaagccgcaatcattatcgaagatatgtggtggaaaggcaacgatgtttatgggcgagcaagaatcatcgaaggagaccacggtccaggtgataaattagccgctaacattcgtgctggttggattcctggtgtatcaagccgcgggctcggttctttgaaagactcaggaaaaggatataacatcgtacaagaaggctttcgcctgactgttggtgtagacgcagtttggggtcctagtgctccggatgcatgggtacaaccgaaacaaatttcggaaaatacctcggcacaagttgccaatagtgctgatgatgcttttatggctctcgcagagaagttaaaagcgttataaataattatgtaacttaacacaggacatcaaaaatgcttaaagaacttttaatgaccgaagctaaaactatcgatgcttccgtcgctcttgacagtattttcgaatcagttcagctttctccggaagctaaagctaacttcagcactgtattcgaagcaacagtcaaaaaacacgccgtagctctggcagaatctcatattgaaaagattgctgagaaagcagaagaaaaagttgaagaagaaaaagaaaaagctaaagaagaagctcgcgaagagctgaaagaagctgcttctaaatactttgaccatatcgctgcagaatggatggcagaaaaccagctggcggttgaccgcggtattaaagctgacctgtttgaatccatgtttgtcggtatgaaagagctgtttgttgagcacaacgttgtaattcctgaagaatcagtagacgtagtagctgagatggaagaagaacttgctgagcaaaaagcagaaactgctcgtttatttgaagaagtttctaagcgcgatgagtatatcaattatgcccaacgtgagtatgctatccaagaagcaacccgtgaactgactgatacccaaaaagagaaagtagtttctctgacagagggtatggattattctgactcgttttcaactaagctgaaagctattgttgaaatggtgcagggttctgtagagcagtctgtaacggaatctgccgatataaatactatcgacaaagaagcagacggtttaaacttcacaactgaagcagtagaagaaactcctgcgactaaaaccccatccgttatggatgcttatgtggcccaagcggctcgtctttcttaatttaaaaggttatacaacacatgaaaaagaataaacttatcgaaaaatggcagccgctgcttgagaacgaagctctgccggaaattgttggcgctagcaaaaaagctctgatcgctaagatttttgaaaaccaggaagctgatattaatcaggctcctgaataccgcgatgaaaaaatcgctgaagcatttggttctttcctgtctgaagccgaaattggcggtgaccatggttatgatgcacagaacatcgcagctggtcagacctctggtgctgtaacccagattggcccggcagttatgggtatggttcgtcgtgctatccctaacctgattgctttcgatatctgtggtgtacagccgatgtctaacccaaccggtcaggtattcgctctccgcgctgtttacggcaaagaccctctggctgctggtgctaaagaagctttccatccgatgtacgctccggatgcaatgttctctggtcagggtgcaaccgagaaatttgaagcagttaaagccggtgatgctctgactgttggtgatatcgttgttcacgatttcgcacagaccggtcgtgctcatctgcaggttgttgaagatttcactgtagacgctggcgctactgatgctgctaaactggacgctgcagtaactgccgctctggaagctggtaaagttgtagaaatcgccgaaggtatggctacttctgttgctgaactgcaagaagcatttaacggttctaaagataacccgtggaatgaaatgggcttccgtatcgataaacaaactatcgaagcgaaatctcgtcagctgaaagcacagtattccatcgaactggctcaggacctccgtgctgttcacggtatggacgctgatgctgaattgagttcaatcctggctaccgaaattatgctggaaatcaaccgtgaagttgttgactggattaactactccgctcaggttggtaaatctggtatgacccagaccgttggttctaaagctggtgtattcgacttccaagacccgattgatatccgcggtgctcgttgggcaggtgaaagctttaaagctctgctgttccagattgacaaagaatccgctgaaatcgctcgtcagaccggtcgcggtgaaggtaacttcattatcgcttcccgtaacgtagttaacgtactggcagctgttgataccaacgtatctccggcagctcagggtctgggtcgtggttataataccgacaccactaaagcagtatttgctggtgttctgggtggtcgctaccgtgtatacatcgaccagtatgctcgtcaggattacttcaccatcggttataaaggtgctaacgaaatggatgctggtatctactatgctccgtatgttgcactgaccccgctgcgtggttccgatccgaagaacttccaaccggtcatggggttcaaaacccgttacggtatcggtattaacccgttcgccgattctgctgctcaacagccgaaaggtcgtattacctctggtatgccttctatcgtcaactctgttggtaagaatgcttacttccgtcgtgtatgggttaaaggtatctaataccaataagggagccttcgggctccctttagttgttttaatggatataaataaacttataaatccacagaggaaagcgcaatggctaaaatcaacgaacttctgcgcgagtcaactacaacgagtagcaacttaattggtcgccctaatctcgttgcattaacgcgcgcaactactaaattaatctataccgatcttgttgctacacagcgtactaaacagcctgtagcagcactgtatggtattaaatatcttaaccctaatggtgacctgacgtttaatacgggtgcaacttatgcaggtcaaatcggggcgccagaacgtgagtcaattgaagaactcactatggcaaataaagactcattcaataaagacgatatgttcaaataccagaatgtggtctttaaagtacttaaagatagcccgtttaccgatacagcagaaaccgatgaatttggaattgtatctgaagcagtagcagctaataatattcgtatgatgtcagatgctgcagtcactgaaaaattcgaaggacctgattcagacccaatcaccgaagccagttttaaaattgataaatggcagacccaggttaaatcgcgtaagcttaaaacggatttaactgtagaattagctcaagacttagaagctaacgggttcgatgctccagagcttattgatgatttacttgctactgaaatggcagaagacattaataaagacatcctgcaatcattgattacggtttcttctcggtttaaagtagctggtgtatccgataaaggtgtattagatttaactaagcaggattctgccccggaacaaggtcgtactctgtatcgtttcatttgtgaaatgaattcagcagttcaacgtaatacttcttattctggcacctacgcagtagcatctactcgttgtgcagcggtactggcagcttctggttggttaatgcagaagaacgatgggactattccagaaaacgcatatggcattctgaataacggccttccactgtattgtgatactaacagtccgattgattacgttattgttggtgttaaggcagaatttggtgggaaggaaactgtaggttcattattctatgcgccgtataccgaaggtcttgatttagacgaccctgagcatgttggtgcatttaaagttattgttgacccagctagcttgcagccttctgtagctttactggttcgttacgcgctgtcggttaacccatatactgtaggattggacgaggacgaagctcgtgtgattaatgctgcggatatggataagatggcaggaagaagtcagatgtctgttatgctcggtgttaagttacctaagctgattgcggactaatttatgggagccttcgggctccctttttgctataaactaaatatgtcaaacttcggagagtattcctcctcgagggatttaaacactttcttatcgtatagattaacacattctatcccgtgcctgcgagctatatcaacagctactctcgtccctccagatacactcccgcatcttttctcaggcgcccaatataataccttatctacaggctcagtgcattctaggcccaatacctgcatagaattccgtgcgaataaagtctgcactatcttcgagcattcatcccagtacgacgtaacttctctcgccttaatgatgcttttgattttggcttcgtttgataattcagaccatacaacaacacctgtaccaggaacatggccacaaaagccagaataaggaataatcctacaagaatttgacctatcgtatttcgccaaccacgcttcatctgaacctggagctccacctgaatatgaaaaatgcccctcttccgagaggcgttgacctattgtagtcattagactcagaactctgcgtggcgcttctcgtgaaccaataagcgccaatctcattattctacaacctcatgccatttactacgaatagtattttgaatcaaagtagtgatttctttcttaaccgcagaaggattatcagcgaataacatatcatgaccttcacgtgctgcttcgttaatgatatctttcatagtcagacccataacacgaccgaaatctttagcagttacagtaccaatatgagacagaacgttacttacgcggttccaggttacatattcggaaaagatttccagaacacgcttatcattctcggtgagttcaaccttcgctttaataggcttatcggatttagccttctcgctgaacttagagttcttacacttaatagcaacacgagtaccattattgaagaacttaggatgaaccggcttaagaacatagccttcagctacgccagtttcagaagaagcctgtgggccgaacacatgtttatttgcatgttcaaggtcagtcgtgtcaacaagctcattatagtaattgacaatagatttaaagtcattcacatactgagatagctcggcaaatgaacctcgaccaagaagtggagccaatttaagaccaagaccagtagcaaacgattctactacgtagtcgtcccaataaactttttcattaccagaatctgacagaatatcaaacacgtagaaatctttctcaccataatctacgcccttctgaataccaccgccagcaaattcgccaaagatttgaacagatactaaatccatggcgttcagcatgttctgcatcttaacgaaagaatccttgtacttcttcatgataatctcatgaccaaagaaactttcactttctaaaataggtccagtacgcttagccggaacgatttcggtaggagtaataatcacactaaagttagtgccatgaatcttctcacgagccacccactcaacagtatgcatatcaaaaccagcaccgcgaatcttctcgatgaacttaccgttgtaatgattctcgagactagaatattttgcaaacattataatttccttagaatgtgattttcataaagtcagtatcaccattacgctgggcactggtataatttgtaacaaatccttcatcatgcaaataattaagaacacttgtaatatgtttcttaactaaactgctaggatacataattaactcacgttgacccgctaaagcggttttctcaatctgggttaatacttcttcttttgctgcactcaattcttctgtagcaatattgatggctgtattagccattctatcggcaaggttcataatttttctctcaataaataatataaaaccaggagtctatcttggtcaaaatggtatcagaggatttcccctgagcccattataccacatcgatttttaaagcaattaatagccgctcggcacgaagcgatacatgatatatccgcttttagttagcatgatttcaaattgacttttgcttccaacctcaagtactaatggaatatctttatccatcagcatccaatcaatttttccataccgttcattaatcaaatccgttattttacgtgcaccacttttatagtagtaagaactctgaacagccatcattttactaacaaatttagatgcaaacaaccagacatttaccccattagcagctggcgtaaatttcttagaaagcatttcttcaaatcgttctactacaattgggtctactttaggcattttcataataacctcatgtgtttaacaagtttcttatgacgagattttataccaacgtttgttaagcgtttccgataaacgactttttctttttgcttaaaccgttcgtgtgctttctcaactgagacccacaatttagcagcttccgctggagtgatatctaacgcccttgcaatttcttgaaaatcctttccgctttcatgcatcaagtgagcttgtaatgctttcataataacctcatctatgtgacgaggacataataaaccaatccgtgaatagcaaaaagggagcccgaaggctcccgaatattacggatagataatacctgcttccagcgcagtacgatgaacaatgtatccatttctagattcttgtacatcgacttctggataatcatctagcattttagctagagtataccgatgcaggtaataatcgctgtcagggtcgtcgagtttccaatctttgccctcaacagtcattcgttggatttcatccattacccaccatccacaccagatataggctgttccacggaacggtagaggatgaatatacggaagttctccgtctggctccggggctacccttttagtaatggttacatcgccagttttagtgactgtaatcggggtgtaatcttctgcggaaacctcaacagaaacctcaatcacttgagaccctatatcagacgtgtcaatcactaacgtgcttgttgagccttctacaggagaaccgtctttggtccaagaataaaccccagttgcaccttctggagcaccgataacgttggctttaaaagatgcttcagacccttgttcggtcgtaatagactcaggagtcaaagtaacagaaacaccgctcatggtctttttagtaaaagcgacagcaatacctttagttgcagttccattattatagtctggggcagaaaccgttacttcacaattcagtgtgtagctagtttccgttgactcggttaaggtaattgttttacccgtttggccagaaataacagaagaaccacgtttccaaacataagcaatgcttgctcctgaaggggcaccagtaacatcagctgtgactacttgggattgaccaatttctttagaaacagaagtcgggctcaaagttaaagtaattgcaggcatagttttgttattaacggtaagagttgtttctgcttcagccgtttcaggatcgccttcagccggagtaacagtagcaactactttaacggtcttactacctgcaggtcctgcagcaacataattcatagctgcggtaacagaagattgttttacaccatttactgtccatacaaacgtttctgtgccttcagctgcggctccagaagttgttgcagtaaaattggttgttgctccaatgactgccgaagcagccaaaggagcaatagatacgctataagccatagctgttccttattttaaagttacaaatgaagaattacgtgtttcacgaatcataacagacccgtttcttttgatgtaatagattaaactaaacagtgtctggtgtgctgatgggtgttcaaacgacgttggccgagatttccaatctgggttatctttaatccattggtaaatccaccatggaagagtaatatatcctgggttcttacctagcaattgcatatttggactaaagttttcaggaagctcaatgatttcgtctgttttaataattttaactactttgtccattgctttgaaaaattcttcggggtccgtgatactaaccggaatattggtaacttgtccttcatcatctatatgaataacgctgtctccaataggagcttcagcataaaatcctttatcattgatagaaggtgtttttacttcaaaccctgggtcatttaccttaggggtttctttatagaaacctgggtcaatatcatgaattttaataccaacattaactggagcgtcaaacagtagttttgcttcatcagacgcttcatcattgaaaagtgattttccttcaatttcatcatctgcttggattaaatcagcaattgatagaccatcgttgtcttctggcataggctcatcggccaatttagccagttctttttccaaatcagcaaccatattgtcaaatgagcgggtcttcttcagtttaataccgaaggttttggcatattcgtcgagcttgtctttagcttcttttttatcgagtgcctgaatttctttaatatagtctttatctagcattgggtgtgcctcatgtaatgtataaatatgattgtatttataaactgaggatagtacagtgcacgacatccaagtcaaatttaaagattttagtcatgttcatattgagtgtgatgactcgattttctatgaactcagagactattttagcttcgaagccgatggatacagattcaacccgaaatatcgctatggacattgggatggacgaattcgtctgctagattataatcgtctcttaccgtttggtcttgttggccaaattagaaaattcgccgaccaattcggatataaggtttatttcgatccaactatattcgagcaagaaactctttcgcgggaggattttgataattggttgtcaactaaagaaatttattcaggattaactaagattgaacctcactggtatcagaaagatgctgtatatgaaggtctagttaatcgacgtagaattcttaatcttccaacatctgctggtaagtctcttatccaggcattacttgctcgatattatgtagaaaattacgaaggcaaggttcttatcatcgttcctactactgcgttagttgaccagatgattgatgatttttgtgactatcgtttatttcctcgtaatgctatgctgggtattcgaggtggtactgctcgtgattcgaatgcattagtttatgtatctacctggcagaccgctgttaagcagcctaaagaatggttttctcaattcggcatgatgatgaatgatgaatgccatcttgcaacgggtaagtcaatttcaacaatcattgcaggtcttacaaattgcatgtttaagtacggactgtctggttctcttaaagacggcaaagctaatatcatgcaatatgttggtatgtttggtgaaatcttccgtccagtatcaacttctaagttaatggaagacggacaagtaactgagcttaaaattaatacaatcttcttaagatatccagatgcagccgcaaatgctttaaaaggaaaaacgtatcaagaagaaattaaattcatcaccaatgttaagaaaagaaatcgttggattgctaatcttgctactaaacttgcagcgcgtgacgaaaatgcctttgtgatgtttaaacatgtagctcatggtaaagagctattcgagatgattaaagctgctggtcatgagcatgtctattatgtgtcaggcgaagttaataccgaaacacgtaatgctttaaaggctatggcagaaaacggaaagggaattattatcgtcgcaagttacggtgtattttctaccggtatttctgttaaaaacctgcatcatgtaattttagcccatccagttaaatcgaagattatcgtactccaaactattggtcgtgttcttcgtaagcataaagataaatctttggctacagtgtgggatatcattgatgacctgggtgtaaagccgaagtcagccaatgctaaaaagaaatacacacatttaaactattgcttaaaacatgcattagagcgtattcaacgatatgctgatgaaaaatttaactacgtaatgaaaacggtaaatctatgattaaatttgaagatatttacgaagccacaattcgtgaggctactatcgataacttcatgagtaaaattaatgcttgccagaccttagatggtctggaagaactcgagaagtattacgataagcgctctaaagaaactactcttgctgattctgatgatatcattgtgcgtgatgctttggcggggcgtagacaagctcttgaagctgattctgaagatgaagacgacgaagacttctgatataaaaaagccccaaccgaaaggaaggggcaaagccaattggctacatcaacactagactaaattaaaagctgcgtttcttgcaattgctcttctgtgtcttcagtgacaggcaattcaatcgcataattatagcaagctccgggatgaaccgggcctttgtctgtttggacaaccaatgcttcatcgattggtcctttacagacgacacataccgtattcgacatgattgtctccttagtttacaagtttatttattacgcgccagcttcaaactgacgaaggtcaataatatgcttaatgctaaaacctcgtgacttaatagcatccatagcatcactacagaactccaaaagaattccccaatattgcaatttagtatctacacccaagatttctttatcagcgcttaaaacagttttcatttctgatttttcatacacatccatgcatacttcaccaccaacctcgccacggccagtgtaataatccaatcgtgctttaagattttgctttttgagggcatctaatcttaacatctcttttcgacaagtcgagtgcttacgcacccatttaccatacagaacagggttattagccgcttcatactgtagtttagtctggtcgataatcaaatcattatccaattcatcctgtaattcttctaatctcattctatctccactctactgtttctttggaaggactagtaccattatactctactgctagagttagcattactacgcatctgtatgcgtatacgttctagcgtatcagggtcgtctactatagaaaactgcacggtgacaattatagcattatcgtcatataacggaagcacatcaactgatagacggttaatcctaggctcataattacgcacggcagagactatattacgctttatcgtatcaccagttaatggagtcatgttttcaaataattcgtttgtgatatcacaaccaaacgctgggtcaaatggccgagacccctttcttgtggttattattccaagaaggctatttttaaccgatcgtgctcctaccgtttttgacacatcggtatcccaagcaagtcgcatctctgggtcaaggtcagaatataatttatcaatattgctcatgacataatcttaaagaattctttaagccccttaattacatgaatgtgagaaattccgcattcacaagtaatgggaactgccaattgaacctgtggcttcaatagcatatttttgatgttaactacatcttcggttgtaatagcagaatataaatcatcgatttctgcatcatttaaatcattaaagtaaatctgctcatttccaaccacgatataatctatgcattttgatatcatcattggaatgtctgaatcgtcaaaaagattcggatacttgaactttattttaaatccctttaagtcataccagaggtcttctggaggatcgatttgcgcatgtgtataatttaatggcacaggaattttacgcccacaggtgcaattccaggtcacctcatgattaacctcgcctatactatgcgcccaaagtataactataagtaattccgattcctgtttgtttaattcagtggcattagtgcattctctgagcaatgctttaacgcattcatcgattgtaccgtttttcttcgctgcaattaaattagcgtattcttctagtgtaaaagctcggcactggatattcttgccatttattcttgtttcaaatttgtatgtgatgttcatatccactcctcttattcaaatatttataaatagtataaagaggattaccttatggccaatatagttagatgcgaattaccagatggtgtccaacgttttaagccatttacagtagaagattatagagaccttttattggttagaaacgacatgaacaccaagtctgaagaagaacaaaaacagcttatagcagaattaatggatgattattttcatgaccatcctgctgagtatcgtccttatatatttcttaaggtatttctttcaagtattggtaaaaccaaaatacctgtcagaatgaagtgcccaaaatgcggaaaatataagcagtatctttttaatcttaatcagcctccgttgacaaatccgaaagtagaggttgctggattaacgctcaagttcaaaaaacccatagaaataattgacgatacaggtaaaatgattttagataacattatatctgtgaaggattcatctggggaatacgcgtggaatgaattgagcgatagcaataaattgaccgttatcgatgctatagatgttgaaaccttggaaaagattttatcgcagatgaagccgtttaattttgagctaaaaacgtcatgctgtgataccacgacagtattaaaatatgataacattgttgatatctttaagctattgctacatcctgacgagattttcacattttaccaaattaaccatagattggtttctcaaggtaaatatgacttgaattctataatgaagatgctgcctattgagcgtggcataaccttatcgcttattgaaaaggaccttaaatcatgacaacacaaagattaggatatcctaatataagcataaaattatattctggatatgatgcgtggctagctaatagattcgttgaattagcagctacatttattacattaacaatgagagattcattacgcgggactaacgaaggcctacttcagttttatgactcgaaaaatatgcacacgcgtatgaacggtgatgaactagttcaaatatctgttgcaaacagtaacacatcgagaacacaaacccgaatttatgggattaaacactttacagttggtgttgatgataaaggcgatagcattatcacccttcagcttggaacactgcatgacataatgaatctcaagttcagcagagcgttttttagttctgcgtatgaaactataaaagaaatgataggtgcaatgtatgttgaccaaccattgattgctcctcctatcaacggaattaacgcttacgtcccacgggttccctggactagtaccctcaaagattacttacgatatgttagaaatgtaggcatttctacagacaacgatcaatttatttttgcgtgggaagatatcaccggaattaacatgatggattatgaatcaatgatatcccaggatccaaatgtattcatgttcggggctcctcaaacaataggtcagtttgctgcaggattaaaatatccattagcatgggattttgaatggcttgttaaatcaaacagatataatagaaatcccatgaaaaacgcaacattttatgcacactcgtttgtggacaaagatgttacccgaattattaatggagaaggccaaaacagcgtattcattaataggtcaggaggatattctgacatgatttttaggaatggctatgaagaagcactacgcatttctacgatggctcaatatgacgggtatgctcaaactaagtgttacggtaattttgaactaactccaggaatgaaaatcaactttgttgatttaaaggaccagttcagaactgacttttatatagatgaagttatccatgaaatatcaaataacacatctataactaacttatatatgttcacaaatggctctgcccttgaacctgtagatttgattaaggtgaaaaatgaacttaaacgtgattcttcctattaagaaaatagtaataaatgaaaagacgatatcaattccaaaactggggttaaagcaccataatctgatgaaagatgttaagggtccagatgaaaacatgaatcttcttttggattcaatttgtccaggattaacagcagccgaatctgatattgttgtattacatttattagcatttaacaacagaataaaagaaactgttgttaaagatgattttacctacgatttgaataaggtttacatttgccagcgattaactcaaaggttagatggtaaagaattcaaattcagagctcctcctcgttattccaaactaggttcagtagattcaattttgagcgaatttcttgaatcagtagatggaaaaccaatggatataaactttatgaagcttccagcttttgtgacaaagtgggctgatgacttagtaaacactatagccattgatggacctgaaggaccaatcaaaggcatgcttaacgtaatggaaatatttgaatgactaagaaatcagaaatgaattcaatgcgtagaagagttattgctgactcggctccacagaaaaaggctgagtctcaagctgatgctcaaattaatacgctagaagatattggtcgtcgtttagacgaccaacaagcatctactgatttaatttcggatgtaatagaaactaaatcaaacgaaattatcaaatcagtagaagatgtttcagctggtgtcgaattgaccgcagaagcttctgagcgcacaactgatgcagtatcaaaacttaatgatactgcatcattaattaatgataagctcacgaaacttgccgacttgttatctaaaaagcatgatgttcagcaagatgtccaaaagactggtactggaacatcattagaaacgataacagaacaagtcccggatgctcctactcagcagccgctagaggaattactcgaaagacttattcctcctcaggatggcagacgtcctgacgcggatttctttcctagcacagaagagcaagaggaaaaagctgagcctaaaaaggaaactgaggacaagaataaaaagtttcttgacctaaaatttggagaattaattaaaagcgttaaatctggttttggaaaaactatttcattaacagataaaattagcagtatgctgtttagttatactgttagcgctttggcccaaatggcgaaaactgccgccatggttttgggtgtgataatgcttatagatttaattaaagttcattttaattattggactaaattattcgaaaagaactttgttgaatttaacaagcaggctaaagaatggggtccgctattaactgcaataagcgagatgtcgaatgaaatagtaaaatcattcgtcaaaggagattggggcggattagcaaaagccattggctcgggtttggttgatgtaattgataagctcggagaaaccattatgctcggaatgagtaagcttcttgctggaatgttacgcgcattaggatttaacgattcggcagataacattgaaggcgctgctttagacagatttcaaactgttactggagcagaactcgatgaagaagatgctaaaatgagagcaaaatatgttgaccgtcaagaaagagaatatgacgaacaacctgaatggaaaagaaagctttctgctaagttccaaaaattcaccgggcagattgatgacgatgaatataacaaactgctgagcggagagaaaaagcagtcagcgtatgcagacttgccagaagacgaacgcctcaaaatcatcacagctcgtaataatgctgaagcagaaatgaagagaacaaaagcgtatgtagaaaaaactgacgcatctgattccactcgattagactctgctaaggatgcagtacaaagcacaaccaccagatataaagaattggagaaattatctccagaagttgcaaaagacttaaaggttgaattagaccaattgcaaaaactccttgattctaaaatatcagaacctgctccaactgccgaagctatacctgcagcagaacaacctgaggttaaacagtctgcttctattaaagccgctgcggatagtcgtgaagctgctcgtacacgtgaatctaatacacagtcgcaacctattcaggttaataccgctgtaaataagaatagcacatacgtttatagaacgcctccacagacttcaacagctgctcctggaatgcaaggcgctatgaaaacctcttaaggaaaaataatgatttttgaagaactggccgatggccttgaaaacatcaaaaaatcaggaactcgaatttcccaaggtaaatctaaactgacgaatgcgccaaccactaaggtggcgcagttcccagctgaacgttcagctgggaatgattccgcccaagatatgagagtacatgacttatatcgcaatgggttattattcacagcatatgattttaaaggaagaactactcctgatttgcgttcatttagacgagatgtaatgttatcgtctgtattcgattcaccaatgtcagcattggctaattcatcaagttctaccactagtactgcaccagtagctaatattctattaccgcggtctaagtcagacgttgattcagttagccataaatttaatgatgttggggattctcttgttacacgtggcggcggtactgctactggtgtattaagcaacgtggcttctactgcggtgtttgggtcgatagagtctttaacgcagggattaatggccgataatggtgaacaaatttataacactgcccgtagtatgtatgccggacctgataatagaacgaaagtgtttacttgggatttaactcctaggtctgcagatgaccttatacaaattattcgcatctatgaaatttttaactactattcttacggtgtgactggaaattcatcatacgcaaaagaagttaaagctgctattgatgaatggtataaaggaactcttaaatccgcagctccagatggggctaaagtagaaaacacggtgtttgagcaaataacatcgtttttaagcaatgttattgtagtttctaacccaacgatttggactgttcgtaattttggatattctacatcaatggatggtagagaggatatatttggtccatgccaaattcagagtatccgctttgataaaacgccgaacggacatttcaatggtttagcaattgctcctaaccttccaagcacatttacgcttgaaattactatgcgtgaaatacttactcttaatagaggtaacgtttatatcggaggtattgaataatgtttactctcgaagaatttaagagtcaagcggctgatatcgatttccagagaactaatatgttctctgttgtattcgctactgtaccctctagtaaaacccaggctcttctaaacgactttggtggagagctgtataataatatgggtttagatggaaattggcttggattgaccccaggtgaattcaatcagggtataacaactatagtgacacaaggaactcggcaagttgttcgtaaatcaggtgtgaatacatttatgattggcgcaatgactcaacgtgtggtgcagtcattattaggagaatttacggtaggtacttatctgctcgatttctttaatatggcatttccaacagcaggattgatggtttattctgctaaaataccagagaacagattatcatatgaaatggataagttccataacgctcctaatataaaaatcacaggaagagatatggaaccgctggttctttcatttaggatggacccagaagcaagcaactaccgggcaatgcaagattgggtaaatgctgttgaagacccagtgactggtctgcgaggattgccacaagacgtagaatgtgatatccaagttaaccttcatgctagaaatggattaccacatactgtatgcttgttctcaggggctatgcctgtagcgtgtggagctcccgaatttacatatgatggagaaaacacgatagcagtgtttgatgtcacgtttgcttaccgtagcatgcaaacgggttcggttggaaaacaagctgctatggattggttggaagataaggctattcagaaaattgagacgattaatccaaatcagggcttgagtgcgtctgcttcaagattgtctcgtttaggcggggctggtggtggaatttctaatatcactactacaacaagtagaataatttaggggccgtaaggcccctttgttttatgcaatgcagccaataaaccctggctcagtgcgaagaagtttcatttcgtttgtggtccaaactactttaacaggaatgataccttctgcctttccattaagaacggcttctacaaacgatggctctgttggcttacggaagatatcttgaataagaaccgtcggagtaccttcgttaaacccttcaagcatgataagaacttcttcattgaacttctctgcatctttaacatcagcagaccattcaataccgttaaagcgaaatacgtgtttcatatcaatttcctcattggtttgtgtaagtctatagtatcacgtccttgtgataagtaaacaactttatgcaagtttttctgggataccatccaggttgatagcaccagccagtagctccatggtacgcgtgtagctaaccttatctgtagaacggtctggcgaaaagtaaatctcatttaaaaagcctttgaacttgctttcttcaagaggttccactttgccctgttccatcaagatgtcaccatcatagagatgaaccgattcatcgatttgctctggcggaactaccgtcatttctaccatgaatgtcttgttattcgctacaccaactccatttctaaaaggagttccccatactttgttgactttcattgccaacccgcgaggaagaataacttcagcctcatcgctaaagcttgacaagacacccgggataactaccttaactttatcggccccatggataacgaatccaaacttaaactcatcgccataggcaacttcctcgcctctatcaactctttccaagttgtctgttccaataacagaagatactgcatctatagttgtttctttgttttctaaatcagaactaggtgcgtctggcattaatgaatcaccagcatttgaataagcaccaaagataattggacttaacgaagtagaaacatagttctggaaataaaacattttagactcaatgttatctttaaagtcttcatattttcctcgctgaccacgatacaaaagagtgcctggttcaagacgcaaacctttttcaaaggcagaatcgagcggacgaattttcttgtcaataattggatcgcctaagctttccatgccaataagatagttattaacaaatgaataaccagaaccacagtaatggtgtattgcatctctttcttcttcgcttaaacgagaatgcatttcacggttatattcaattgctttggatatagaatcgccaacaattgacacataagcggatatcatataattgacaagattttggtattgacgtaaagctccgaaatcgtcagctggaggcatatcaaatccacgagtagctacttcaacgattttacgcattgtttccatagatgcaggatttttagcttgagcaataacgtcagcaacgtctgaaattcgttgttcagcgattttcattttgtctgaccccgaaggaatgaaaaccttccagtcgtcatgcattctcgacatttggcctacaaataatctctcaactgcatcgccaaaattacttccatatccgccacgaacacgatagtgcttgatatcatcaacataaaaaggaattgatttttctaatccggctttgatatctttttggaggtctaccgtatcgccttctgcgctaagaaccggtgtgttagtagttaattcgtaccaacgttcgcgtttattttctggccaatcttcatcaacatatgaaacaaatttgccgtactgtgctcggattaaatcttttcgagacactttcattttactcattacagcgagttcagatttcttgtcttctttttcgccaatggaattagccaatgcttcggctttggtaacgttttcgccggtttctttagacacataaacttcgcctactttggaatctactttggtgtaaagttcttctgaaatttcaggaattccttcaatctcttcaagtttcttacctttacgaaccataatagaataagcatacttacctttgtagtaagccatatctttcattagattgaaacgaccgccggtgcgagtagtaatcaaccgagcaagaatgcgttgaatggctttatcctgtccttgcattttcttcggattaaagcggaacattaccgcatcagctttaatttgcttaactactttgttgacggtctcaaaaatggtattgatagcaccaatcgggtcttggcctaaaccacctttaagcgccccgatgttacctttttccgacacagagaaaacatagacctggatgaatttatcacccatcttgatgttcttaactgcatcaccttgacctgacccttgtactaaccgaatcattaaattgttattacccggcaccttaatcaaaaagacctgtggtaccttaagttttggcttaacgttctcgacgggatagattttactattctcttcatcgaaaacttcatttaaaagttccatgacatatcctcgtttgtttattctatttatacgaaaaaaggcccgaaggccttaattaattattgttactgtacgccaaacttgtagtccatttacagactcatactcttcaatgttttctttgaagtttcttaatgtgttaatgttattaaactcaataacttctgtgtgaacagaaataccaccacgtccgtcaagagatttagcaatcacttcgtataaagctttcattttattcctgttgcctcagtaaagttaacaccaaacgcggcttcgaatgtattagccacttctttatcatatctacgctgtttaatgataggtaagaataatcctactgtaccatcatcacgaccttcagcagttacccaaccattacattcaagttcccagatagttcctggaagagaatctctgtttttccatagatgagtacgatcaagttcatgtaattcttcgggcttatctttaagacctgacccagcgttaacacgaatacgaccacattctgatacgaacattaagccgcccattttaccaggttgttttctatgctcgtacgaaccgacacatttcaaatctacagtgataacctctttaaatttaacgaggttcttagaacgcttatcttcccaataagcaccgatattcttaaggataataccttcgagaccttggtctacgtatgtcttatagatagcccgagcttcatggatgttatgtacgacatggttttcaattagaataaccttgtcatagcctttgctcatcatttccaatgcacggaagcgtacatcataagcaaatccaggaactttaccttcggaatatactacatcaagcggaacataatcccaaacttggaatctcataccttccgcttcttcggcagatattgttcctttaatagccttattagccaatccgtttgattccgtgcgagccgtctgttggaattccttagctttacttaactcaggaagctcaggctctttaaacatatcaaacaggtcgttttcttcttctttcacttcgacatgatataccaactcgccgtcaatcatcacaccgttaggatggcgttctcgggcttctttggtcatctcgataagttgacgcttaagtttatctagacccaggtattcattaccggaacgagtaagaagagtcacatcatctaaatcatctccgcggatttcagcgaagcatcgggctccatcagctttaagttgtgcgaatgcagggaacttaatatatgacagcgctttctcagagtaggctgatgctaacatctgtggcatctcaggaattaatttcttccataccttattagcaatagaacctgaagcgccgcaacgcatatctttaagaagaacccgtaccagtacactagcatcaccctcattcatcttagagagcaaatctactagcccctggattgccatattaccagtaagtactcgtgctgccagaatgtcttggaggtaatctagaccatctgaaaacgtctttgaaggaacatttggatatttaacgggagtatattctggaactttcttaataaagaatttaaatcgcccggaatacgccagcagataagctcgctttaaatcaacgttatctttattgtcaatgagaatttgggttttggctttagaacccttagcatcttcaattgctttgatgatatcaaaaatcattattcacctaattcttttgaaagttcgcttacgctacgatgataagttaatccatcgatataaacaaacccgttattgatgcattcattccaaatcgggcacgactttgcttcacgccaaattggattccaacgataaaactgattaacatggccataatcacatgataaccagcgtttaccaaccttagtatgaactacaaacatatttcctcctagggtatggcaattataccatacccagagtgttagcaattaatttggtgattatcacatgtaatacgaccattattccaccagtcgtttccaggaggaacatgcggaccaggactaaacggaatgataggttgtttccaccaatctcctggaacttgtcgtggaggccaattaaaaggatgttgctctttacgaatttggtctttgatagcttcttcccacaatccagaaagagacttctgcggtttcttaacgaatttcagagattccaggcaagttacaatttgatgccaatcttcaaccataattccaggagcagtcactgaaccttctcgctcaccacgaggcatataaaacacacgggtttcagtgtcttcaaagactttgctagctgcagcaatgtgtttaggcaaatcatctacatagcaaacgatgcgatcgccgtattttactttagccttttccagtaaagcatctttagattcatcataatcgcagaccatgatttctgtaaatgcatcagggaacaaagcattcagattgaaacgacgattaaggttagcatctactgagttgccaagagccgtgatagcgacaaaatcgtatttttctttgagcttattaactgtagctaaagcatcagcatacggagcaagataacgaataaaatcactgttgttgtacttcagaagcagcttaacagctagttcttcttcacaatcaaacagctcagcgggtttaatgaatttttcagtagtcatcatatcaaggatatgctctacaggaaggttatatttctgggcaaagtaaggcagaccactttgccatttaacgatgattccatcaacatcggtcgcaattacaggttttgacattcggggaaattcctcaatgcttgtttaaatttggcgacgctatttgcggcaccggtgaaattgaaccagattaaccctggagtgtccgagggttctatatcaattaattctatattataatactcaacagtctttagcatttccctggtgatacgtcgggcaaccatatgaccgaagtgaggattaatagacatcgtcgttagcagcccttaattgagtaattggataaagctcggattctgcatggattgaacgattgccatcaacccaattaacttcataccaaggttcaaccaagtaggctttaattgctggagccgtatcacatacaactccaggaattccatttgctaatcttactgtactgaagatatgatatttcatgcatcaagtctcactgcccattcgggcaattcaaagaaatccggagcatcaatttcatactcaacggtgtgttgtttaacatcagctgacatgatatcaaccattgggtggtttttcaaactgcaagaaaaaataccagctttaggtttaggcacggatacaatcatgttgatttcctcaaaatttagttatgaatttttctttcggcattttggcatttgagccatcactgtcagaatacccaattggcatagttgcattaatgaattcaattttagcatttataacattaatgctcagagaatctacaccatcaaccatacgaaattcaggagggcaatacttatcaatgtatgctttcacgccatttttattagcaggtgtaccatcgcgagtatcgctgataatggtttcaacttttttctttcgtgaatcatagaaagctgatacaatcatttcaatttcctcttaaaacgggcgaatattaacgtgaaccacagggacagcaaaaggttgcatgattacaacttttgtgtctttagttgcattcaggcgttgtacttttgcaagattaacagcttcttcctttgttaatccgccattgtaggtatcatttcctttatttgatgtccaaacaccccaatcattgcttccatcatcgtcggtcttcggttcaggttctttgtagatggtttcttcaaaataatgctgaaactcttgattagtaagaatacaccacatatgggaaaagcgaacttcatctacactaacgcgtttgcattctccatctggcttaatgatttcaaattcaactaatccggtattttccgcatatttaaaggttctggtaattttaatcggattattaccgatttgctcaaaaacacccttgataagagcgcctggagacaagattggagtctttttaagcttatagaatttacctttttccattatcatttcctcaatagtggggccgaagccccgagttagttaaaacttgatttcgtttgaaacgatatcccagattgcttcacgttgttcttcggttgttttacgaccgaggatgtggcgcagataaattttaacaagcagctgacgatttgtgttccaagacggatgtgaagataaatcacgtttacgaacttcatcatggaatccaactttgatttcagaaccgttgaactgaatatccagagtaggaccattttcaaagctgaagaatacgtagttatcttcccagtacatatcgatttgagctactgtgccattgttgtgttcccacagcaaagtagtagaaacgtcccaagcattgttctgtacgtatttgcggttgaagttagtgaagttcatttttattctccgtagtttgtttatctgtttgggtggtacaggtctatagtaacccagaccacccaagaagtaaacaacttttattcaaaaacttcagacatttttaacctctacagttttaacagtttttacttctgcaaatccggtgcttttaaacagttcatacttggtagtttcggggacgatatcggttagttcaaggatgatttcttttgcttcttttaaagtgaagacgctacgcccatctttaaccactggagtaggtttaacgaacgttgatgggatttcaaaaactgcatagcggtcatcagagctttgattttcaaacgctcctatttgcacaacacgtccttcttctaactcgtgagaagaaaataaacatgacagagaccggtcatattcatctcctatggtttttgccgaaatgattttaccggtttcggttttaatcttaacgacccgtcccagcgaatcaagttctaacggcgtccagccttgaactccgacaacggtggcaatgagatagttaattgtgttcttagcgtctttccatctacggtaagtttctggggaaatgcaatatactcggtttttgctgtaattcattttgatatcctcaaagatggggccgaagccccagtcaagattactgtttagtccaattatccatgtttaatttaccgacctttttcatttgctcaattaaagcatcggcacgattacgaccattttcataccaggttacatcttctgagtaaccgtcttcttcatctgtgtaagtttcagaacgaatacgaccaacaactggagtgttcagaacatatacagaacctgtgaaccaattggttagcgtgatatgccagcagaaatcatctgatggaccgtccggtgtcatgcatggaacgatatcaccttgaactttagacaaaatccacattttctcgtggacagtctgagctttataaccgtcatggtctttagtcttgatagttgcattcaggttgatggtattcattttattctccgttgtatctgtttgggtggtacaggtctatagtaaccttgttgagcctagaagtaaacaacttttttcattctgcggaaaataaaaaagggactcccgaaggagtccctgaacttatgctttcggcttaccaaaacgagaagcatcatcgcgaagaaccgcacgagcccgacgcatgattttctcaaccgtctgattgatacgcttgttcgacccacgcttgtagccagcgcgtttagaggtaccaacaacttcttttactgcagtttttgctttagcttgtttagccattttatcatcttccattttggagaaatacatgggagcacgttcttccgaggttcaacttctttcgacagttctttcggttgtagctcccgcaagccctcaaagggtacgtttaaactcttatctgttgcacaccgttagcttaaaggttccgggtccgatttctcggggataagatatacaccgatggatgtataggccttgaggcgtactcccgattggccatcgcctcggggtagcatgcacttgccgtttattttctagctgcactttggtagcaaatcaccgatggtttcggatgttttacgtggggataaccaacaacgtccacatcatacgttacccatgcgtacacatggtgggcgtacaaattacttcagcgttaccacaaagtggcgaacagctttgcgagcagcagaaccaagatgcttagcatacttcagttcatccatcgcttctaaagtatcacgaaattcagcttgtgctgggttcaggtgtttaaaccctttcagaacttccagtgcttctgcatagatatcgattgaagcaccgtagttttcgtgaccggaattccatgcattacgttggagttccagagctttagtaagttgtttgttcattgaatcgttcctcaaatgaggttaaaatttggtggacggtaaccgaggtttagctcgggcatccaccgcgtagaattgctcgggtaactaattgtccgacgcccaattcatattattatttatatacgcatgcaagggacttataatgacaagtcacaaacttctgccgaatttctttaggtttcttcacacctgctgctactaacggatgaggtacatttctgatattaccaacaggcagtggagtcaaatcaccgacttcaacaaatcctttcggtacatcatcaccgatagaatagatttcacacatatccggcagttgtccttgttcttcttttccaagaataataccggaaggagaaacaatttcatcaccttgctgtgcaggttcagatacgagaattacatactcgcctagagctttaattggaagttccatgtgttacctttattgtttgaccatgtagttatattaacatggtcagtttaaagcaaattacttaccgatcatctgcagcagatgctcaactttcataccatttaccgagataagtttatcaaaggcaaatgagcgccaaccttctttctcggtatcatatactggaagtgaagtagtgctttctgctcgagcagatttagtagtgctttctaccaaatcagatggaataatgtctttatcacgagtacagcgcagagtacgaatagtgccatcagctttttcaaacacaatctgggattcgcccatgctcagcacagccttcagagtttcacgaatatggatgttttgttcagtagtcagtttcattttgatgtctctttaatagttttgataattacagatttgcgcttggataattcttttaataatcgaactgcttgatcttcaaatttaaatgttgctagtggtttccatttaaaccaataccggcgttctactgagtatgatataacaacatcaccacttaggttaagtttattaatttcaacaattctaagtttcattattcaattccacagaattctttaatgttataccaattcaacttatccaaattacgttttggaacattgaacacctcgattccagcagaacgaagaatatcgtcccagccgggttcgttcttgtcgtatgtttcgcagtatactaattttttaataccagactgagcgatggcttttgcacaatctggacatggagacagtgtgacatacattgttgctccatcaatactactgccgttccgggcagcaaaaagaatagcattaagctcagcatggatttcattgactttagaccatgcagagtgggctgctcgatgttctttgagcaatccgacttttttgacttgaaatccgtcttgacgcaatcccgtagatttgtaaggaatttcaccaatccaaccttgttctgctgcatggtcacaacagttcacaccaccagaaggtgaaccgttatagccagtagaaataattcgtccattcttttcaattactgcgccgactttccacgagcagcattttgactcttgagatacgagatacgcaatttgtagtactgtcgacgctttcatttaaatcaccagataagttgtgttatttgttttaaccaattttaactcgtcggtaggagaagcaaaactctctactcgagaagtacgaatgcctgtaccatctggaaacggatgatttcctcgttcaagaacatcggaaaagacataaccataaagaggttggccttccttaacatcaacgttactgtacaaaatagcatcatattcttcgcgcggaattgaccaaacgccttggtcagaaccaataacagcattaattagacgaataccattttggctaatttctgccctaattccacgagcatgttcaattaaaagagcttctacagcctcacgtaaagtcattagatatgtcctaaaatgttagtcatttcaacttggcctgttccggttaaagccaattgagtgtgttgattgctctttccattattaactgtaatgatataagcatcaacatagttaaaggatgactctcgtcggagagtcactttacttccaggaacccggtttgctacttcctgtgcgaagattttaaccttcgaaataaattcatcatgcgaaaatttagcatcagacaacataagtttcaacctgttgggtttcaaaattagcaataattccaacgataaaccagtcgtgttcaccttcgccacaagaaattttaacttcagatgaaccgcctgaccggtcaatagaaaatttaataacttcgccgtttggaataagtgcattcatggcagataaaaactctgcatgcattttggctacttcagatggagtaaactcatctgttaaatgattagcaacaacttgcgtaaatgatacttttactacttcggaatactttggaaacattatactttcctctaaaaatcaccgtgggctacttgccagcattcaacaccgatacgacgccacatttcaaccacctgcgccctgtcatctactgcaagttttacattataacgatcagcaattcggtcccagaagatttcttcttttaccacatcgtctttgcgtgaatcgccttgcttacgttggaagtgttcgcctgtttcgccaacatggtccaacaaccatttcttcgtaatgcgttgataaacagtagggtcttctttagtaccagactctctgccggaaacagtaagaattttatatcctttgttacgaagcattttaagaaattcaattaccatttcctttggatggtctttaccacatttggccaagtcataaggagaacgatgattgttatctgctaacgtgccgtcaagatcaaagataactgcttttggcaatgattcgtctggaatgtacaaatcatatggatgcatcttagaatagaagctacgaagcacttcaataggaactgcattcgcgccacgatagaggttacgattaagcaattcagtccaaggaacgtcaaagcgtttaatttcccacttgacaccatcaatttcgtatgccaactcttgccacttcttgatagtcgttggattaaggttagtatcagcaatgatgacacctttagtggtttccatctcgagtagagtcttcgccatagaaaactgtcatacagatactgacttctcacgaagcttagaatatttgtaatcattacgtttatcaaggccaaagatgccttcacgcaaatcatcacgagacaaaacataccaacctggattagctgctacgtattcgttagcccaggttgttttaccagagcctggagccccttgtgtcaaaaccaattttttcattatacatccttaagagtgtcaataaaatcatgaagagccttagacttttcaccccaattagcacgatatttttctttaattgctcgcaatggcttattcattgacagtatatcatttttgtcataattttcagctgcgcgtccaaacacgatgcacgccaattcattttcagcaattaatcctttaagtgtttcatactgctctcggttcattataataccatcacttaacgcaacgaggttctttaaggtcagaacgataataacatatcattccattagcatctttagtatatcgtaaaatgtcattcatccagatacgatattcttgcgactcttcaaacggcataccaacccaggctttaccgtcaattacttttacttcccaatgtccttcccatttttgaattgggtctggccactcaggatgtaaaaccgggacatctggtgcactagaagagcatccagcaagtaagctgataatacccatggctaatagacttcgtttcatctggtagcctcctggatatcttctgcaaacttattgaagcttgcattaatctgtttttcaactaatccaggtttggctgcaactacgtttccacgcttagaatctttattcatcttagcgttagaagtatcacgagctgctcggttttcctgatagcctttatatgttgtctgcagattttttatagaaacaccaatgttttctatttcttttgcttgtcgatcagattcatcttggacgactttgaggtcagctttaagattttctacccgccacgaaagatatttcaatccaccggcggataacgctaacacaccaatcatcaaccaagttgtgtttattttgagcatagtttaaggataacctctacgatatcatcacgggataatcccgaaatgaggatgtgacgatcagaactttccgaaggagaacacttgaagcaagcttctacatattctgccatctcagaataattcagctcgcgatgcataatgccaagacgatgcttgccataaatcgggtcaacgattacatagcatttgcatccgttagcatgaacgtttggctgggtgatgttcttgaacacctctgcaccatacttcgcgagatgattatctaggaaatcaatcatttcatctacagcttcaggaagggcttcggcacgctgctcgttcacacgattagtgtactctttttgcttcttacgagcagcttccttgcgcgccatgtgcgtccgtaggtcagtgacgaagcccaccttcttggtaccattccacacaaaaattccatcggaatgagtaccatatttgttaacaaccatatctaaagtaattgcttgcatatccatttcaatatcctcatcagtttgtgtaagtctatagtatcacactctgacgaggatgtaaacaactattcttcagaaatttcaatttctttttcgtactcttttggaacatatcctgcccagtactttaagaacaccctttcgaggtctttaagcagtttatccacatctacagttccttcgtacatgttcatgataacaccaaaaagatggcgctgattaaccgttgctttctgagcagcaatagcataatctttacgagcacgacctctgtattcatcgtagaacgactgacatagctcaagtgactttcctaggtaatctagataagcttgctcaaacgcagaaattttcttaattgcgtattcatctccagcaaaaagagaacgcaaatcgtcggaatttgcagatacgacagacgcaaacagtctttcatttgacgttattgagtctttagtgtgatgaagagcagaataccattcggttttaaccttaaatctctgcccagtgtttagaactgcaatgtacccttctacgccttcaagttcacgaacaccttcaacccaagttttggggtcagaaattccgtaagcattaattaaataaggacgaatcttagcattagcgtacaaatcatcatatttaatatactcgccagttgcgttattacggacgtttaacacaaacagctgtggctcctgatatgctaaaacaacacgattattaggtgaaacaaattccatgtttaccgtataaccatctagcgctagctcaagaataacctgatgaagcgaagaatattcttcactgttaagcaaagctgaagcttgtcttgcctggtcactgtaaagagaggtttttgatttaaggtatagatacccatcatcaacataagatgatactagagagccatcagccttatccataatgtattctacatcgctaatatcaattcccatcgttagtgggttttcattcaaattgaagaatttttccatcggacgcgaagcaattcgaattggggtatcgccatccatctcaaacatgataccgcggcactcaagagcatcgggttttaaccactcgctgtagcttgcgtagtgatatgaaaacactctgaacttaccatccataggaccggtaaaatctttataaaagaattttgcaacttctgagctttcacacagattcattaaatttttatatagctctaacatttctttaccttatgtttgcaattatcgtagtgccatctgatagcaatggcctttgaagttattataccacaatgcgggcatggactgtacaaaggctttttctttcctttttggctttctgaccgcttgagtttagtttcttcagattgtgttttaccggttaaagattttgatatcttttcgcgtgtttctttggcatgagtctttccttgagttggacttactctgcctttcagtgctttagataaattctttctatgttcttccgttcgtttctttccggagaataagttagatgtataattagaatgctttattctagagctttcataaaatctggaatgaactttaaaattctttccagaagaattacacatcatccaaagagcataattcattttagaattattatgtatctttgataatagcaaatgggcaatgaaatgttcacgtccagtcaataaaactaaattagaaacatcgtcatttcctcctaatgattttggaatgatatgatgagcttcagtataatagtttaattttcctttatcattgcctcgtaatttaccctttgctattaggttatcatatactttaacatagttcatttagctttgttagtatgttgtgtgttccatggaggattgaacttcttaatcagaagtggttcttccaagtccatagtggatattgacatctcgccaagttcattattaatcaaaagattaaaacactgacgagcatagaactctacttttttgccagccattagtgcttcaaaaatcttggcagatttagccgaatcagaggtttggtctttccgattaatagcagttctataataatttatacgtttacgaagattttttgtcttaccaatgtaaactagttcatcatcaactgcgatggcataaactacattcaacttgtttgctatcaaaattggtttgatggtaaaatctggttctaactcaagttgaacatattttataaaagaaaactcgttagcaatatcattcataataaagaggggccgaagcccctttccttataagtactttttaaatccaattagaacatcatcagtgacatcattgtcaatctgagctaccagataagaacttatctcaacttcctgcggagcagattggactgcatcagagttaagatattcgcgaatccaaggaataggatgacgagttggtgcatccgtgattgggcacggcagaccacagctacgcatgcgagatacagtcagatagtcaatgaagtcatgaagaattttaacgttcagacccggaagaccaccgttgcggaaaagatggatagcccaatctttttcttggcggttaacttccatgaagattttaattgcttcttgttcacactctttagcaatctcaacccattcttcgccatcagtgccagtttgaagttgacgcagaatgtactgcgtgcccttcaaatgaagttgttcatcacgagcaatgaacttcatgattttagcattaccttccatgatttccatatttttatggaagttgaaggtacacgcaaaactaacatagaaacgaatagcttctaatgcgttaataacatgtaagcaaagataaagagatttcattaaatcacgtttagcttctttaatttcgatattatcttgattaaagcagcgatttttggcattttcccatgcgcgagtcttcgctataacatcatcatagtaaacaccaattgactcagcgcgtttcatgattgcttcgtcaagaacgatttcatcaaagattttagctgggtctacatataggttacgcatgatatgcgtgtatgaacggctgtgaatagtttcactgaacgtccaagtctggttccaagtatctaggcttgggtcagaaataagcgcagataaaactgctgctggagcccgtccttgaattgaatcaagaagagattggtacttcaagttatcagtgaagatattacgttggtgttctgggagtttttcaaactgaccacggtccatcataacgttaacttcttcaggacgccaaaagaagctcaattgcttctcaatgagttcctcgaatactttatgacgctgaatatcatagcgtgcaattcctagaccagaaccaaagaacattggttcggtcatgatatctacttgcttggtattaaaaactgtactcattctatttcctattctgtggtgttaaccatccgtggtctaattataattcccttttattaaagcttacaggccgcgcagtcagcagaatcttgaatcatatcatcgttaccggaaccatcacgggtgttatgatagtaaagagtcttaccaccaaagtaccagaaataaagcaagtcgtccatcattaccgacatttcaactttgcctttagggaaattcgccgggtcgtaataagtattagcagagatgctttggtctacaaatttctgcataatcagaacctggttcagataaggcttattaccctgtttcgcgagctgccaggcataatcataaagggaagcattgtgttcaacatttggaacgacttggttgaagcttccttcttttgattctttaactgacactggtccgcgtggtggttcaataccgttggtagagtttgatacctggcttgacgattcgcatggcataagcgcagataacgttgaatttcggataccgtatcgcttgaggtcttctcgcaggagttcccagtcacagacatagtttggagctgcgagttggtcaattctttcgttgtaccagtcaataggcagttcaccacgtccgtatcgagtttctttgtaaagcgtgcacggacctttttcgctagcaagtttaacagaggctttgatgagtgcatattgaatacgttccatcatttcgtgagtaatatcattagcatctgcgtatgaagcaaagttgcttgctaaccaagctgcatagttagtaatgccaacacctagtgctcgacggtctttagcttttaacgctttgtctacaggatagtcttggtaatccaaaaggttatccaaagcccttaccattacttctgcgatttcgttaacttcttcttggtcttgccagttgaagttgtcgagtacgaatgctgcgagtgtgcatagcgcgatttcgccatcttcttggccaacatccgaagttggtaacgcaatttcgaggcagaggtttgattgcttaaccgtagccacatcacgaataaaaggaccatattcaccaacgttatctaccatgtacgggtaaattcgagcagtaccagcacgttcagtaaggaacaactcaaacagttcacgggctttaatacgtttctttcttacgtctgggttcttttccagctcttcgtataaagtacggaatgcttgtgcatcacggaagtattctgtatacaaagtaccaagacacacatcgggactaaacagagtgatgtaatcattcttaatcaaacgttcaatcatcaggttattaatctgaacaccataatctaaatgacgaatacggttttcatctacccctttgttgttcttaagtacgaggaggttttcaacttccaagtgccagatttgatagtacaatgtcgccgcgccaccacggactccaccttgggagcaggatttaactgctgtctggaagtgtttccagaaaggaataactccagtatgtttgacttcaccgaatccaatttttgaaccctctgcgcgaatcattccagcattaataccaatacctgcacgcttactgatgtatttcgtaattgacgcagcagcttcgttaattgaattaagactatcaccaccttcaataaccacgcatgaactgaactggcgtgtcggagtacgaacaccagacataattggtgttggcaatgaaatctttttagtagaaactgcatcatagaaacgaataacgtttgctaaacggttttcgccatcatcttggtgcaagcacataccgatcaacataaaggcaaactgtggagtttcatacaattcaccagtgtgacggtcttttacgagatacttctcgataagctgcattgttccagcataagtcatagtgaaatcacgctcatgcttaatataagaatcaagcaaagtaatttcttctgcagaccacttacttagaatttctttatcgtacttatttgcgttaacacaacgtgaaatgtggtcaataaatgcaggcggttcaaactgtccataaacacgtttacggatttcaaacattgctgcattggatgctacatattgataatctggctcatcaatagaaatgctattcgctgctaccttaacgatagtcttctggatatctgcagtgctcatgccatcacgcagatgggatttaataatttcatacagctcgtatgggtctactttagttccttcgcacgcccattcgaggactttaatgattttctgcatgtcaaattcttgactaacacctgagctcttaattacttgcataagtcctctaattcaaatgtatctttaaaaagtttattcactacaagagctattatatcaccatggcaaggaagcggtttgcaggtgcatcctaatctcattcctcttaaagtttctaagtgctctcgctttatttctccgttccgaatcttagcaataaaatcgtccttaaacgctgcaatagcatcaggacgattatcgcaatctttaccgacgtaatttccccacattgttccacgttggatatttacatcgaagtcggaatggtatttattaaccacccgacatatcttcatgttatatcaacttcaaaccaacagattaattgtgttttgcctatagaccattcatatgatttaacaatagacagaaccctttgttcggtcccatcaaaaactatcttgtcattaacttcaggcaaatcgctagagaatgcatcacacatctcgcctaatactgttttagactggtgtcctttacgaacaaatcgaatattcatatcgccatctttcctgtaattgttgggtgagatttatacccaactagttcaaaatgatgaggacgtgcaaattgttctaaccaacgaacctgagaactagtctgccaagtttcatacgtatctgggaatgcaatttcaagctcacaaagttctttcggttctcgacgaagaatttctttacattgctcaatatgattcaggtaaatatgagtattaccaccagtgaataccaaatgcccaggtttaagatttgtcattttagcaatgatatgaactagtgctgcatatgacgcaatgttgaaggggaggccaaggaatacatctacagaacgctgataccattggaggtcaagatgcccctgacgaacgttaaattgatacagcaaatgacatggtggcaatgccatcttatccaaatcaaccgggttccatgcagtcacaatctgacgacggtcatatggaagttgcttgatacgatcaatgatcaatttcagttggtcaacacccatgaaatctcgccattgcttaccatacacaggtcccagttcacctccggaataccccatgtcttttgcctggttttcatagttgtcgtcccagacagttttaccttctagtaatgagtcatgctgaataagacgtaattcatgcacattagtagacccacgcatgaaccaaatcagttctgcaatacacgctttccacgcaagacgcttggtagttactgccggaaatccttcttgtaaatcaaaccggtgttgagtaccaaactttgcaatagtaccggtaccagtacggtcatcagtctcgtatccattttcaaaaatatctttaattaattcttggtattcacgcattaaatttttcctgaagaggagtaaagaaaagctggtctccacgcttttcaaatcgtccaataatagacactacatcatcgttaaccgtcacattaccgtgtgacattccgatgaacatcttcttataatcacgctcaatttcaataggtatatttccatttcggttatatactgtagttgaaccgttataagtgctaagaccattataactgaaaactagaagatgaataccatgcttaaatggaaatcttttccacttcttttggactttgtcttctgatagctgagtgatatcatagtttgcgctcatagaccacctctgaaatgttagtcacttcatcaatatgataccagtgattttctttagtaatgaatcctgattctggccaagtaggagctgctacaaattcagcaggtagagtgacatcagaattcactctatgactttttctgatggttgtttggataaccctatctgcatatggatatgccttctggatgattccggcaccacctatgatagaataattaaggtctctattaaaagtgatagtactgttgtaagaagtatgagcggccataatgtcaccacccaagaaaccgataaattctaattcacttacataagcatctgcaaagaagccatttttagcagttgccaacgcacgactcatgtcttggacaacgattgtcttacgaccaggaagaggtttaggaaaactcataaaagtctttgctccgcaaatcaagatagtatctcgagtacgattagcaaagtttttcatgtcctgggaaatatgtttccatggaagaccatcgcctaaaccgaaagcattttcgtttttgccgtctacagtttttgtaggagcaaatgcataaactatttgaatcatttaaacctcagcaaaatttagacatataaaaataatcctaatataatgccgctaataaaagcggcagtaacagaaattaacaaaactactaattcagcctcaatcatttcttggccttagcaagtttaaatgcttttttgaattcttcaacatcttcaacaggaatccagaagcctgagccatacccatcttcatagcatgggcagttatcacagtaatcattccaatagacagtttcaccacccatagtgaatggagcttccatctggcacagtacttcttcaacacgctctaattcttctgggtttttgtcgcaaatgcagaaattccatttaccacgatattcagaaccaagtttgatgctttgacgttgaagtttcatttttattctccagtagattatggagctatactatcacaagcatagctccttgtaaacaattattcttcaaaatcttccataaagtaatcaatgtcgtcccattccagagattcaagatatgcaataaccttttctctagaaccgcggaggtcaatatttggccaaccaccaccaggtccatgacgcataatcaagtcaaaatcaataccatggtcagtgtcataaaaacgtgtaccatctgcatactccaaatctacacaaataccgtctttgttgataataggagttgctacgatatcaatgtttaatttacccatgatgttttcctctactcgttttgtttcgatgtagatatagtatcactcatcaactggcttgtaaacaattttgtgaaatattttttggaggaataaagaaaaagggacccgaaggtccctttatattagaggtcgttcaaaatatcattcagatcgtcatcgccaacactgtcaccagcatcgcccatgatatcgtctgcggaacgagaagaggtcggtttggattcaaaatcagacaggtctttgtcaaaggaatccaggtcatcgccaattttatcggcttgagctgctgcttttgccgcggcaccaccaagagctgctgtacccataatctgtttaaatttggcttcgttaacttcaaacgatttaaactgagatggagcaacaatttcgctgaggtcagccatattttcggtcaggaatttctgagtttcttcatcattgatgtttgcaatctcggactgaccaaggaatttacattcatcatagttctggaaaccaccgactttcttaactttcatgacgaagtttgcaccttcatacacgcaagttacatcaaccggagtttcacccatatcaacatcaacttcaaccatcgcgttgattttgtccataattttctgaccgaaacggaatttgaatactttgccttcgttttctgggttagccgggtctttaataaccaggatgttagaccagaaagaggttttacgtttcagaagcttatattcagctgggttgctgttataagaatcgtttttactcagatgagcacaaaccgggcaagaatcaaaatcaccgtgggtagaagtacaattttcgatgtaccatttaccgccgtgtttgaaaccgtgattgatcagttttacaaacggtagagagttttcatctttaccaggcaggaagcgaattactgcttgaccattaccagcattatcggtcttcagtttccattcgtttttgtcttcgttagagaaagaagaaccacctttcagaccagccagttgttgttgaagttgagcaggatttttacgcttaaacatatgattacctttttaaatttaacagttgttgttgcaacatgggtccttgcaactggacgatagattaattatatactaatttctttacaagatttgattatgctaataaagagtttcttagcttcagcaccgtcaacgtttaaaagttttttataagcttttaatttagtggagtaattactccaaactaaattatccgttgcagtatcatgagtatttattatatctaaaaacgagtcaagcatgatgaatgtctcgaaagatataacgtttgactgaagaagtttgaacacataagatgttccgactttctcattatattcaaaaatatcatgaagcttatctacattaactttcttggcaaaatagtaaatgttctttacatcttccgagaacgttgttttaatctgcttcaatttacctatatattcacgataaaacacgagggcatcagcatcactgatatcgccaatccaagcatcttggttagctacgaggttactcatgaatatcagtgttaactcttttaatgtatatttctcagcgagtttctcaaagaaatatttgtctctacgcttttgataagctttatcagagacccgcataacccagttatacttaacaacgtcatatcgaccggcaaagtgttgtttgagcattaaatataaaagataaacgctcttaccgttaacgtatctgttattatttccaggcatgcggagacgaatcataataaaaaatccagactattcgttttatgtgtttgactaaatgatggtcgaagcatattttcttctaatgcttctgacataattttttctatgattgcaggtggaatatatctattgaagtttccctcaggaatagaattttcttctaaccactgagttgttgcttcaagataccccattccaagttctgttaccatagactcaatagtaaatccgttagcttgcttatctaacagctgattaatggattcagagggggatacctccccctcgtctttaagcgaaaatagagtcataagcttctaccacttcatctttttcagtttcaaaacgatcgcgtgtacctttatggaacagggcaagcagctgattaaataatttgccttctacaccaagctctttcttggcgcggtctttaatgtctttgttaagttcaagatagctttctgctttcaacttattacctgaggcttctttaatcatatctcgcagagcctgtccatgtaccgcttcatcaaatactacttgctctttttctttcttagccattatattcaccttaaaagttgttaatttctttcattaatttagacagaccggatttaacaaagtagctataaattttaccacgacccggtaattgatagttattataacaatctaaaatgttagcaacaatgtcttcgcggatgtaatcaaaatcgattaacacgcggttttccaagaaacgcttatactgttcttcagtaagcaaatctttaatgttttcgccagcatcaagacattcttcaacaaatgtcattttcgttgaaggagtacgctcaccatcaacatgggtgtaccaaaaatctgaacgaactttaatagaagctacgttatctttcttgtcacctttaataattttaaccatacaatctaaagcaggagaaccggttttagattttaccagtttcttctgcattggtgaccattgcttaacattaggatacttatgcaattgagtaaagtcaccatccgaagaaacaatcatgactggatggccttcgagactgaactttttggttaataccgcaatgctgtcatcagcttcagctttatcaatatcaatgacataataaggcatatactgcttaaattcatcaattacagtacgaagaccttcaaagtatccatcccagtcccaattggattcttcacgggctttagcacggttctttttatagtaatatgctacgtcccgacgccaatacccattaactgcgttatcaacgcagatgacaattttagtgtatccatctttcttccacttaaaagcattaaattttaaagtagaaagaataagatgacgaaccataggagttgttagtttgtcaccttctttatacgtatgaagaattgtcgccattgcaatttgtgacaagtcaattaaaatgacgccttcttttacttggtcttcttcggcgaataagcaatttaaatcagacatttgaacctcgttcaattagttagtacagccattataaatacttctataatgaagcataaccccataggagactctatgagcgatttactgaaacaacatttccgtgcaacgaacggcttggacgcaggcggaaataaagttataaatgtggcacttgctgaccgcaacgttaaaaccgacggcgtctccgtcgagtacgttattcaagaaaacactatccaaaaatatgacccgacacgtgggtatctcactgattttgctgtgacttatggacgtcgtatctggattgcaaataaagatattccaaagcctgctggagattttaaccaggcgaattggacttctttacgtgttgacccgaactggatttataccgtccgtaaaggagagtttgaaattcaatctggtcagttcatcaacgttgactctaacgctgcaggtaatgctacattactgcttccgttagcaccggatgaaggcgataccatcgtagttcgtgatattggcgggcgtcctggctataacggaatcttaattaaagcacaagatactggtgcgtctatcgtatttggtgaatcgcgtctgcgtgaggtaagacttacacgtccgtattcacaaattatgcttacgtttagtaatggtgcatggcgtgcgagtttaacagattttggcgatactgccaagatggtagttccgaacgggattgttccgacgcaagttcaggcaggtgataacgtagttcgtcgttatacttccaactcagagatttttattactctgccgttgttcgctaattcaaacgatatcatcaattttactgaccttgacggtacatcgccaattaaccatatgactgtgcgtacgtttgacccaactatctcaattgggactcctgggcaaacagaggttcaagtacgtacttcaggcaccggatttttggtatatgactcgattgacaaaatctggcgtatttttgaaaatgatttacgcaccagagtaagaataattacttctgatgttactttaatgcctaatgagcatatttctgtatttggcacagataacaataccgttaaaacaattaacgttactttgcctacagacgtagctgttggggatactgtcacaatcgcaatgaattatatgcgcaaaggacagactgtagtaattaaagcttctggtggtgatactatcgctagcaatttgaatttactgcaatttccaaaacgttcagagtatccacctgatgcagcatgggtgcaatcaagctcaattacctttaacggaactacatcgtatgttcctgttcttgggcttgcatatattgaagataaagcatccggaaaaagctattggattgtaactgaatctgaccctaccgtagaacgagttgatgctaaagacaatacaactagagcccgattaggtgttattgctcttgctacgcaggctcaagctaatgcggagtcaaacccagaaaaagaattagcaattacgccagaaaccttaaatggacgtcgttctactgaaacccaaactggtatagcaagaattgcaacttccagcgaagttaatcagtcaacaactgcttcttacttggataatgtaatcgttactcctaaaaagcttaacgaaagagctgctactgaaactcgtagaggtttagcagagattgcgactaatgctaaaatggatgcaggaacagacgattttacaattgttactcctaagaagctgctttatcgtactacgtcggattcacggttaggtgttattcaattagtaaaaactggtggtgctcctaacacaactgctgatcgttcttctgctggcaccggtatattcgatcattctgattacaaaaatgcagttactccaaaaactcttcgtgagtataaagctactgtaaaccaatcaggaatagtctggttagcaactgatagcgaagttagaaacggaactcctgcttcttcaaatattcctacggttgttacaccagaatctttgcataaaaaagttgctactgatggagcaattggtttaatccaaatagctacacaaactgaagttaatgctggcggcgtgactaataaagcagttacacctaaaacattaaatgaccgtacagcaactaacaatcgtactggtattgctcgcttcgcgacacctggtgcccagggtgaatttgaagctggtacttcaagtacagtaatggtaaaccctaaattactgttcgataaatttgctaataccgatcgtatccaagttaatactagttctggcttaactattactgggaacctctgggaccattataccatcaacatacaggaagcaagtacttctcaaagaggtacaaccactcttgctactgctgctgaggttagaactggaaccgacgctaagaaaatagttactgctgccgcgttacatgctaaaacagcaaccgaaggagctatcggtcttgctcagtatgctacacaggcacaagttgatgcaggcacattaagtgatagaattgttcctcctgcttacttgaaacagactattcaggtaacagagtcatggcaagctacagacagcgttagagggaccgtgaggctatctacaggcgatggaacgtggaaaggtaatgataccaatggctcaactcttccggataacgggtatgcctctaagggcgtcgcagtgtctccgtatgaattgaaccttacactgaaacattacttgcctcgtctcggtaaagcctatgacacaggaatgttaggtggtcaaacaccagacaaatatgctcgtcgcgatatagcgcagactatttctggagcttggacatttagtcaggacacttcatttagcaataatatttctgtcaagaatgttatatatgctaatggtggtgaagttaaaatttctccaactgctgacactggaattgtgcatgttcgttttcaaaatagagacggaagcgagcgtggtataatttatgctgagcctcaaacagcttcagccggaaacttaaaagttcgcgtaaaaaacggaacaggaactactgctgcaagccagacctacacatttggcggtaacggtacgttagaagttcctaacgaagtgtcaactaaaactctgaggtcttctggaaatgcaatagttggcggaactgttatggttaaggacgttcagatgcttgctgtcgagggattgaattcaatattcggtgcccaatcacagtccgcatttattcgttcccgtgacgctgatacacaaatttttgcacaggattcaactggatcgtatccaattttaactaccaaaaactacgcaagattagctgatggccgttatgtcaagaaagctggtgataccatgaccggcaatcttaacataaatagttctgctatcgtcattacgggttctgaatcctggtatgtgccaacgaatgaaactgtaataagacaaggttcttggactgctgaaatcaaagacgctactaaattgaaaggtcttcgtggttatatggttccaatcagaacaccgattgaccctggtaacccaagcactttagtagtgactgggtatgaagaaaaaactgcagctggtggtgttttaactcaggttggtgtaactacaaacaatacttatcagctttggacgccttatcctccgacaaccgaaactgctgataagcgtttcgcgcatactgtgtggatgaggatttataatccaaaccttaataagtttgatgattggatgcgagtatttacatctgctactcctccaactgcagctgatatcggagctccgagctcagtatcaactcaggttaaaacccttgaagttttggaatggattaagcttggtccagttaaaatctggccagaccgtccaaatcaaactctcaaatttgaatgggtaggtgattaatggctgaaccaattttaatggcagccttcggcgaggatttcgtggaaacacgaatcctctctgaggcaaactctgtgaagtattggctaaaagcttatgctacgcattctaatgctgttccgaataagccagaattgaatattaacggtgcctttgatatgacctcctccttacggagggggattaatgttgttcaagttaatggtgacaggtttattaactttaaaacatttgacgttaccactgatgataacaacgctaataacaaagcgtttgtagaatatgcaaatggattaacttcgggattgtatattataatgacacatgaacgatttcaatccagcccgctaatagacaggtggtttaaaaataagtggtctgcttcttggccaggttctgatttttccaaatcatttccaaactctgcttatgtaggagtgctcggagcagcaaaaggacgcatattaattgagtcattttacggaaatgatggaaaggttaaagaagattccagagctaaagtcgatactgtatatgataacgttggcgatgtaggatatacaggctgcccttatcgttccattgaagacactaatgagtactcggattctactggatatgaatataagcgatatccagttcaaaatgaatctataagcaaaatagctgattatggactatctcctggggattctgtatttttagtatgtgatatgtatgcatctaaaagtcttcttgatgctggttctactactagagctagcctgcgatggttcaaaggctcatctttattatcttcaaacgtatcattagaagttccaaaaaatggagctgatagatggttaagatttgaaagatttaccgctgttcctacagacgctgatggatttactattgtggtatcaagatatccaaaaacgtctgtagttggtgactctaaaatcaaaaaccttgtatttgttcaaacctctcatagcgaaaaactgaatagtgttgttcaagaatttggtgtgaatggtataagaatgaataaaggcgttgaaggaggaaccactatgattatggaacttccaaattcaaaagtcgatccgagcggtgttattccagttcaatcgttcagagaaacatcagactaaggaagccttcgggcttccttttttcgtataaatagaaaatatataagaggataaactatggccgatttaaaagcaggttcaacagttggcggaaatcctatttggcacgcgggtacttttcctcttgtgccggcaggaaactccctaacttatagaggtaagaaggtttatactgagatagataaacctcaagcaaatgataacgacttcgtgtccaaatcccgtggtggtacgtatacaggcgaagtaaaaatagcatatggcggctctggcaagttaagcatgggtccgttggcaaatgttggtattagagtcggtggtagtaatggtgaagttcttatcatcggagggaattcaaaaattcaattgcgcggcggcggaacggaagattccagcggcatagttgaaattgctaaaaatggtaacttaactgcacagactggtagaattaccgctaacgtatttacttctaaacaacagccatctggcgtagacgatttaactcgtaaagattatgttgatggacgaataaatactgttagcaacgtagctaacgcagcagtcaagaaagctggtgataccatgaccggtgtacttagggctaacgctggcgtagttatagtaaataaagcaacatccggtgaatatgctcctagattagatcaggttatttcacgcggggtaacaatagattttggcacatactaagaggtagccatggccgatcaaaacttaaaacaaatacaatttaaaagaactagcacagagaataaagcaccaggtgcagatatcgtagcccgtggcgaaatcgctttgaatacacatgggcgtactcttgccatttatactaaagatgaaaatgatgccgtagtacagctcgccggtaaaggggttcctttcttagatacctccggaactcttagcgttgatggaactactacgttaaaagacaatgtaaccatttctccgaataaagcaattagttttgaaactactgatttgagcggtgaaataactcgtcatatcgttggcaaatgtgctactaatgatggctggtacattggtgccggcggtacaagcaacagtggtattcttgaaatcggtactattgatgatggcgctgaaactattcaattcgtacaacgcggtgcaggcaacgttgaagcccgaaaattggtcttgcttgacggctctggtaatacgactcttcctggcgatttaagattatctaccaataagactgttaaaattaacagtggaagcactcttgttcttgaaatgggtgtaggctctaacgacgtctatattaaaaaccaaagaggcacgggtgttcttcaattaactaatgacagtaatttaacgttcagaaattcacaggtgtattacgctatgagcggaagaggtcctggtaaatccggtactcttctgacgaatgtagaaaacaatcgtcaagcctggcaatatactatttctgctgcaactgcgtcaactgctcgctgggtaaaagtagctacaataaagcatccaggaatggcttcttcgcaactggatttaatgattagcggtggtattgattctgggcacggtagacattacgttgattttatcacgttatcaggacgaaatttaacatcttggagcactaacaatttagataactgggttgaatggcgtcgagttggttctcctgataaaggaaagattccagagtattacgttgttaaaaatgatgctgctacagattcagaggcttcatttgatttttacgctaaagttcctcgatacggcaatgggctttatgttacagtgctaaacactgctggatacaacggccaagatagcggtaaagtaattatctatgaaaccaaccaagacactggtggatatggaccagctggaagtattcttgtttcaatgaaacagatttttgacagttacgcaaaaccagatttcggcgatactacgggtactcttccagttaaccgtggtggtacaggtgctactagcgcaggagcagctcgtaataacttaggtcttggtactgctgctgttcgcgacgttggtgaatctaacggaaacgtgatggaagttggtgcttatggcttaggcggtaatggcggtaaatcaatcgaaaacattacctctaatgctgatatgttgacccgtttaaaagcatatggtggtactttctggcgtggtgttactaaatctggtgttagtgttcaaaatggtctttatagccatggctccggtatttttatgaatgctggcgataccatgtcagctattaatatcgactacgccagcgctaaagttcgcgtatacgcagctaacgacagaagtcttgctgagggaaatgttagatacaacgaactttatggtacagcaaataagccatctaaggctgatgtcggacttggtaatctgacaaacgatacccaagttaagaaagctggcgacaccatgaccggtgatttagctgcacctaatttacatgcttccggcaccggtactgcatcagtgtatgttaatgcaggaagcggaaatgctcatgtatggtttagaacaaacgccaatgaacgcggtgtaatttgggcaactccaaatacagcggatttaggacaaattaatattcgcgcaaaaactactggaggtgtttctgctggtgattttagcttccgttctgacggtcgatttgatgttcctgtagcagttaaagtcggtggagcagcaatgctgactaaagacgggaatattacctctggttcgatgtttggtggtaaccttaacaactatttgacttccattaaaaacgacatcactgctggcgataataagcaagtaagtaaaactggcgacacaatgaccggtaacttgactattaacgctaacttaaaagtcgaaaaccctaatggaacaatggctgattttggttcagagaattcggataagtatagcagaataactcttgctcgcaaagttggtagcggtgctgccgtagcaatgcttaaagttactcctgaaggacacgtgcaatttggttatcaaactgcagtttctactccagctcctagtaaatatattctagttaaatccagcggtcttgaggtagaaggggatttagtttttaatcagacatatagcggcgctgaagaggcagttgatatttccgataagactatcgaccttaatagtctgattattagacgatcagatttaggtactcgtcagttatataaatgcgtatcttctggcggtggttctaagataacaaacaaacctacatctgatggtaactttgttcttgaagttctgtctttacgcaaggtttctgataccgattggtcatgtaagcagacctttactacaaagaacggcggtgttgaaggcacatatatccgctacggacaaaatggttcatggtctgcatggaaagaagttgtttctggtgttcagccaattaatttaggtggtactggagcaacttctgcagcttctgctcgtaacaacctcggtgttggtgaaggacaaactgtaaaattcggtaatttagttacaaccgatttaaccgcaaacggaaacgctagattagtcggaagactgaaccttggttctacttccgcaaccggtgtattacgggctaatgaatctggcgcagttgttttaggttcttctagtggtcaaaacatccacatcagagcaggaagtgcagatacttctaatggtgaaacccgctttgagccaaatggaaacgttttagttggtggagctctaacgtcttcaggaagcttgcaagtaaatggcgaagccgcgatgagcagaagcttgatcgtttctcaaaacataaagaatactaacgataatagttttattctgatgggaaaagactccgatttaggtttcgttaaaaaatctaactcaggcgctaagctggtatttgcttcaggaaaatcatttgttgttgctaaatcatcagcaactgccatagctaatccagcttcggaaacttacactgatgtgtttaaagttgacgcagatggaaaccaaacagtttatggaaactcagcagtttctagagctttgactgtatcaagtacagcaactattaatggggttattaatgccaacggcggtattattgttcctactaccaagtatgtgcaaattgccgatgctcctacacagaataaccaagctgccaacaagaaatatgttgatgataaggttgcttctgctattagtaacgctggcgatacttatcttccattagccggtggtactgtaactggtaaccttgacgtaactggcaccagattaaaaacatggcagttagaagttgatggcaaaagtactctaagaggcgggttagatgttagtagcagtcttaaagtttctagcggaaacttagtcgccgctgacacaaccaatgctggtggtctttttgctaaaaacggtaatgtttactgtgatgcaggttcagctggtacaaactctaactactggttccgtgattctgctggaaatgtcagaggtgttatttggtcaaatggtcaaaacggtgacatgattatccgtaaccaaagtggccgagagcttgtattcagaaatgatggatatctgcaattagcccacttagcaccaggaaacacagataatgcaaacaccgtaaatggaatacgtttacagcgcggtgatacgattttcgatagctttaacgcatggcagtcgggtgaatatgttcgcgctggatggcatttctataacgccgctggagttgaccagtggttagcacttacagatactggtgtaaaaatctggggtagtgctgctaatctacgcgttgaaggtgttggtaatttctgggacgttgaaattcgttctgaccgtcgtgtgaaatcaaatattgctaagattgataacgctcttgataaagtgtcgaagctatctggtaatgtttatgatttacagcttccaaatggtgatactaaaccatcggctggccttatcgcacaagaagtgcaggaagttcttcctgaagcagttacaactgataacgataaagatgcattacttcgtttaaactataatgcagtaattgcgttattagtcgaatctgttaaagagcttaaagcagaaattgaagaacttaaatctaaataatgttatggggcttcggccccatctttgaggagatatcatggcagtaacaggtcctaatgtaggaagctcagctaaggctgtaacaggagaatcttcaatgattgcagctggagcaaaattaaggctgggaacacccttttggatgtccaacatgataggaagaaacgtttggaatgctagtataactatttcaggtaacaaccctgcgacaggacctaaggttcgtggcgcttggaatgataagaacagtgcttcgtggaacgtattacttgattctcgtgggtccttatcaggtatatgggaaacaggctttaatttggttgtttttgggctagcagagcctagtaaatgggacggttataatgatgccatcgttttagaaggcagtgggaattttaatgtaaattggcgcgttgatattgaagatggaagtcagttccattttaacagctctagagattatagaggaagacgatgctataattgtacagacccaaatgctttttggaattggctttacgccaatgatggacgaactttccaactgtcgtttacagcatattaagcatatgctagagcaataaatagctctgtaaggagagcaatatggcaagcaaacaatcaataccgttttttgatatgtttcttgggttgctcgagctattattcaaagatggagccacgggaagagttctcttttcccgtgttttcgttgtcgtacttttagcactattggcgtttgctggatataagtctgatagtcttattacagcttacgtcgacagtacttatgacaagtatgataaactggttcaaaaggatagagattcccgatttgataatacagcactcgaacaactccagatagtacatatctcaagcggtgcagacttttctgcggtctttacgttcagacctaaaaacttgaactacttcgtagacttaattgcttatgaggggactttacctagcacggtagattctaaaaacttgggaggatatccaatcgacaaaacaactgctgaatatagcacgcatttatcgggtagatatttttggacggataaggaatttgttttcttaccaacaaaaagaaaaccgcctgaaatatcgtatatgtttagctgtccgtatttcaatttagacaatgtttatgctggaactgttgaaatgtactggtacaattccaaacctgcattatctaacgaaagactaacatcgatatgtggtcaggcggttagagctcttggaagagctaagtgattacttattactatgcatagccattgttcgatagatagactcaaatccctcgttgtattcttcaacgagaattctcttctcttcgtcagttaactcagaaaccattttacgaaagttgctctgatttaactgacgcccctgctcattcttgattccaatttcattcaagaacgcaataaattcatctcgcttctccatgatatgttcagcattgaacttagtcagaatagaagcaacagtaacaatttcttggacaatttcaaacttagtcattatttttcctacaacataatggattatgtgattatagtatcatcttgataccgcgttgtaaaccagtttatgccaattcccaacgagaattcaaatcttccttggtagtgatatactcagcaccagaggacatccagagcccgtagcgaccatcttttactctagccgttaaataccattcctttccaattggacgaaccctacgattcatccagtgacatacgtcaattgcctcttgaaaggacaagtcaatcagacttccaagcgcgattttattcattaacgcttcaagatatctttgtgattcaacgacagattctaggttatgactcatgctaaaaccacctctccgcgattacctaaaatgctttcgatatactcaactccacttataatgtcacctctatcctttgctttaatagtaataattccatacgtgtggaaatctgctgatagactaaacggtttagaagtttcctgagtaaacgtaaacattactgcttgctctaaatgttttacttctaagtcattagcccaagagttaagaactttaagcctaacttgtaaggtgtattctactttaattgctgaaagcaattcaacgcgtttatgatatgccttggcttcatcttctctgcgtaaagtttcagtattcatagataatctccaatgtcataagcatcaacacatttctgaaattgttcaataacttcttcaggttcaacattagcgataatagctacagtaaaggtaccattattccaatcgtgtaccatccagtctccatagccagcattctggaggtcttccattagttcagaatggatatctgctactaatccagaatggtcccctaatttcttgtggagagcttctaggtcatcacaaataatagttaaagtagtacatttggaattattcagaatgcgcattgtctttacctttgtgtttttgcttacgttttgattctttggcagcgcgctttttatctttatgcgcgcctcctttgttaaagtcattcttcgctactgggttgtacatgtgcaattacctcatttaagcagttgcgtgtaatatcaaaacgcttagcaataccacattcttggatatgtgcttttaaatctccggcatgcacatatcccaattccaagataaaccgtttaatttgagccttttctgaacgatttaagctattgaagtaatctgccttggcgcttattgctctcacgctttatcttccttacattcaagttccttgatataatagtcaatatctttaatcatttcttctgtcattattttgtacatttcagcaagaaatggtttagcaccgccattaaatggatggctaaacgggcagatgtattctttatccatgagagttttcatgaatttgctatctgccattttaaacccggcttcattggtatatgtaccccaattatcgtccatcatttctaacgaacgctgaagcgatttacgctgaatttttaaaagcgtaatgttattctttaatgtactaatcattagtataaatcctctgagaataattcattggcgggtcctgatttaggacgaactgtattaacttggcctgcatgtgtagcgatgattaatgcttcttcgcgtgtgaagtactcaccccactggtcaacaaatccttgattgtctccatggacatggtcagaaactaatttgtcacggaacatatctagaacgttcgccatatcaacagaataatggcgagtgcctggaaccacaattgttccaccagttttcaattcaaaacggtttgctgcacaaacgatacggcgttgaagtaatcgtccatcccaccaatcagctactttaaagcaaatttcaggaatactaacttcttctggctcattaattagagcaccgtgacgagaagcatcaacaaatttattcatttgttcggaaaacttgctcatttaaagaatcctttaattttctgccacaaacttttcttttcacgaataccaatttgacgaataacaggttcaccctgcattttctctaaccactccattgagttaacagcttccgccattggaacaaatttagcaagggccttttggtagttatctacatccatgatatgtttaccatctgcattgtagatagcatagcattttgcgaatttcttatcaatgtatccgataaagtgcccacggaaccatacatcccaacaatcagttgggatattagcattcaagttaactttttctacacaacgctgaagttcattcagtactttaaacttgttcattacagttccttaatagagcggatgatggtttcaatgttttcagcagtacgggcgatatctaagtaagtattgcctgttgcagctacacggcaagacattccaaggtcagtgaagtgtttctgatgctcttcagaaatcttgtaaccgaagatgcggaaagtacctttgttgttaacttcaagactacgaataccgaaggtacgtttttccagaactgcgatatagttactgcggtaaacagtcagttctttcaaaggcaagatatcttccatctcgctaagaatgctcatcatcaggtctttgtgctcattcatatcttcagtcagaggacgagctttacgagtattgcgtttcttaagaagttcaggcttgttctcttctgcatagataactgccgctttagagatgatgtcctgtgcttcaccagtgatgattaaaccgtcaccagatttctcgatgagacctttcttaatcagaacaccgatgtttgagttaacagaacctgcgttcatggtttcttcaaggatttcacgcagttcagcagaagtgatgaaatcctttttagctacctgaaccaagatagcagcagttttttcgttcagagcatcttcggaagctttgatgatgtaagttactttagacattgtgattctccattctgttttgttcaatttgtttggtatgagactataataacatctgctaaccagcttgtaaacaactttgtgaaaataatttggggcattctaaggagggattttggagggatatagatttatatggaaggacctggagatgacctccaggttccctagattaactgaggagcaataaaactagacctaatactgcaattacagaacctataattaaataaaattctatcatagttcttccaggtctttcagatactcagcctcaggagttgtcttttcccagtacttaacctcttgggcaagacgttttgcttcctgagcgagtttctttgcttcatcatcagtgatgtgatagatgttcattgaaacaagtttttcagaatgttctttgaatagttcattctgttcaatttctttagtcaactgcttacgagttttgccttggataacgatgttacctgcgataacctctttgataaattgagcttttgcctgagcaagattaaatgcctgcttagtttcagcgattttatgctcgattcgtttggcagtgaatgtcttacggacttctacgaaatgacgaattaactcaccggaagttttgaacttatcgttcagcttaccattctcatcgatgaccacaatgtattgactcattttctcaatgagtttaaaatccttcatgattttagcatgacgctgctcagggtcttcgcttaaagcatagtctttacggaatttcaccttaaagccaaaaccagtcttagaacagtcatcatcataagtgatgtatcctgcatcttccagaggatcgagtactttctctacataagaagcacgctcaaacttgtatggaatttcgcttatatagattgagttccgtgaagtttctttatacacgccgtgcagctcaacagaaccgtcttctgtttgaacgatttttccgttaaatttaggaaactgtacttcaggttccatcatttcgccacgaagtgctgctttagtgcattccaaaacagattcaaaactatgcggaagaatagaagttgaatatcctgttgcaataccacgaacgccattcagaagaacagtcggaattaccggcagataatatgctggcggaacatgttctttatctttatgtgctggagcgatttctgtatctttgtagattttacggaagttgtcagaaatccggcagaaaatataacgacttgccgcagcagattgaaccagacgcgaaccgaagttgccttgcccatctaacagaggatagttgttattccatgtgtttgccatcaatgcaccagcatcttgagcagaggtttcaccatgatgatatcctaaatcagctacaccaccggcgacagacgcaagcttatggaatttttctttattaccgcgagctaaatcaagagcccgagcaataacaaaccgttgtacaggtttaaacccatcaatcaagttcggaatagcacggttttctacagtgtaaatcgcatactcttttgcttcattatcaatgatagatttcaaatcgcgatgacgaagatttgatgccttagccaaatcatcgatagaacctgcttgttttaatagagtgtcaaaaatatccattgtacctaccaaattagtgagccgatttgtactataacatcggaaatgaaaagcacaatataaatcattccgtaaatcattccatagtacaaaaccaaaagaatgatggaaataactacagcagaaactaggagtttcttaatcatttgtaaactcctgcaattttacaaatgcgctcaaacataataaatgctgcggtgaacgcaatgcttccaattactttagtggtaggcacgaggccataccacatgaatgttcctgagcaaatcattagggccatcagaaacacatagcccatcacgaagaaggttctcattagtatttctgcaaagtaaagatgaagttatcattcagaatacgattcagctcagagtaggtctgcgcgtcacttgaatgctgacgagtaaacgccaatgcaagctgacctttgccataaccagtggtgagtggtttcattttattagcaggaatccagaacacaccgtaggtcatgcaattcgagcgcagagtacgacccaactgagaacgtccagaacggatatgagaaagaacactttcaaatcctgcctttgaacgctgtttagctacaaagaaacgagcagatgcaccaatataacctgctttgccatcattgaacatcaaaaaataaaatccttcgcgctcagtaatttcacgagatggagcacctgctgcccaatcaccgttacgaatagaaccgatcagttctgcgccagcgttatcgagatcagcaaaagtcataatattacgcatgttaatttcctcagttgattaaagtttattctccgataaggggccgaagccccttctactaccaaaaatatactactgccgttacaccaccaacccaaaacacaagaagacctaaagcaagcagacgatacacgatgtgtcgtttcatttttgaccttcccatacggtttctactaaagatttaaggccatcggtctgaataatatcaaccgcttgaatagcaaaataaattccgaacccgaatatagcaacaattcccaacgctaccgcaacaataacagacagaacaacagttctcattaagttaaagcgacgatcaaaactattacgaatcattatattttcctcagatgaaagcattaatccaaacgttaactaaatcccatgcgaaaacaccaatgaaagtaacgataaggcagaatactacaaagatgttcttcagaatcgtaagtaactttttcattttgttctccagtttagctaacaagactatagtatcactggagaacaagaaagtaaactattaaatgcacaaattacgaattttttcttccagagctttgactttctctatgtgctcatcacgagcagcggcagctccattaggatacaacccgccatacgttgaatcaccgttatcacaagcaatgatagtataatgccaattcatagattcaagaatcttatactctttcaaaagctcagctttaatagaagcatttccgcgtttggctcgaagtgattttagctctaagtaactcatgttttactcccgttcagtttgtaaggccatagtatcatggccaatcccggaagtaaacaactttttaaaatttatgcatgatgtacccgccagcaccaactcgcgaaggttttacgacttccatgagctgttcgataccgccactgaacatcggtgtgtactgtatgacattctgggacacttcttctgcaacgaatataattatacagtctgcgactttatgtttaaacatgggccctagatttattccacttccattagggaatagaccgtctttaccagtcgtaacattaatccatggcttatgatttgctcggtcatgaacaaagtgtgttttaacttcaaccctaactccttgatagtacgggtgggctagtacgtcccatgcccattcgtatggatcgttgttattatggtcaacaacttgatcgttcacgtatccatcgagaaaatctgctaccacatactctgccggtatagcaattctgcatcgtttaagaacgtcaattctatcttgagatggatcgatatctaagctatatctggcagtatcaatgatttttacttttgcttcaccccttaacttattcaaatctagggtaaatgtccggagttggttcaatctctgcagggctttgttcatcaatgccataaattcctctgatatgtaattcaccaaaataaacacgatcgtcgtggttacaagtgtctggttccacaacaaaatcatcaccaagttctacgagttcatcacagtgcaaccaagcatagtgaacatcaccttcatgtttaactacatgatgacaaaacactgtagcagcatgatgagtaccacgaagattaacaactttagaatgagatacattaaatggattaatcatgtttcacccataataaaagaggagcccgaaggctccttataattagcgaagttctgaaccccaacgatcagttacatcttctaatactacataaccacatgtacgcattttagcatcgttgtaatcaaccgggatagatactacatcacgcggatgaactttaactgaaacaatacggtcagaaccactaccgaagtgaccgatgtaagatttagagcagacatgcagacctgcggaacaagtacgctgatcgtcttcatctacctggttacgcggcattgtaacagttttacccggagagttatcaaacgtgtttgaagcacagtccatataagtggaacgaactactttccaaccaatgaagtgaccatcatcagtgatgtcgatatcgtttgcattcaggaaatcaaacagacgataaactgcacgacgagacgggttcagcatcaggttttccaggaaaggcagataacgtttaaagtcttcgccatcttccatggctcgaactatacgctcagtcagaccagatttcagttcaatatctttatagaacagcgtaccatcttcaattcggacgttaccctgaacgaatttcttgatgccttgttccaggttaatgtggtcaatagcaccagcgatatcgccatctacaagtttctgcagtgcagatttaaatccaggatgttggctatcagcattataagtagtacggccttcagtaattgaaatgaatttggaacttgctgcccatttaaattcacgctcaacaggagcttctactttagcaggaacagctgccgcggcagctcgagcttcacgctctttaaacacacgccgaatagtgtcacgggaaacaccataattctcggcgagctctttcttagtgtacagaccgtttttgaagtttttaacgattgcatctttttggatttcagacagacaggtaacagccatttattcacctttattttcagaattttgagtagaagctccatcaaggagctccatgatttttacgatatcatcgacgagtttgctgtcagtccgccaagtatccaagacacttgcgatgacaggataatcatctttaaactgttcaatctttttatagaagattgtctcagcatcaccagacagtttattataaattttattacataaagctaaatcatcgttttcatctttgattttactggtacggcaaaccttagcgattttgtttagttttgtcaggaacggatttttcattccagacgcagtaaacttactcgacaagaaattcaatttatcgtaatgcgcaatatttccacagatacggtttccagtagcatttgatggcatgtactggtcataatctaccttatcaatacacttgatgtattggtcgataataaatcggtcaaatgaaagcaatccatcagcttttgcagcggctttcatagcacccggacgaattgcatagaatttcttaattccacacgcttctgccagagaccgcatatctgtgatgctcatattccaccaccaaacattatctgggaaagtgtggatttcatcacgattgcgaccgattgcataaccttcaagctcagcaatttcagatgatactaaagtctgacggtcttcttcccagtacccgtctttatcaatccaatgcagagaaacattaggagatttcggacgtttctcttttggaccagtgtcgtaatcaggaagagcttttctctgggcttcaagttcagacacacggaatactacaacttcatcagtatccatgattttcttcagctcatcaatgacatgtaattcatcttcattgtctttgattacagtaatgtgtgcccagattggaactaacccagatttacacagagcacgaaccgtagcaatacgcttacccgctttatcgtcaataagaacgaacgctttagttctatcaaccccgcaaatatcagaaatgtttacttggttatgacgatgccaagaactgcttgacactttacgacgagcaggttcatcgcatgaaacataaactgatacttcgttatctacatagtatgaacgaattttatcaagattatacttcgcaacaacctgcttgatatcacgatttccaatagtaacaccacggttttgaagaatagtacgctctttagaactcagcttattgaactcacgcaggaattcacggtcagattcatacgcttcaaacgctttaatatctgcggtaattacctcttcttcaagagcattcacacgcttctggatattagcaattgtttcttcgtcaagagaaagctcttcacgagatggagtaatgtctaattcgccaagagggaaatgaacataaaccttgccataacgattaagcagccaatctgccttaacatctacaccgctaatcggatatacgatttttccataaactgcatacagaccataactttcgtaagagctattaacgctgaaccagtcggtcttatctaccgggaaatattcaatttcgcgacgaagagaatctaccttcggaggaacagcaccaaacgtacgcaaaatatatgcgatttcatagtgccaggtatcaatatcttctactttaaccggaactgtaatttcaagaccagtttcttcgtcttctttcatatcatcgacaaacatcggacgaatagtaggttcacctcggtttttcatgacagtataacctgtagctttaccatcatgataagacactacgttaaatgtactcgtatagcttaatggtgatttagaaccaagaccaagagcaccgatgaaatcattactattattctttgtggattcaaagaacgttttgtacatcgtcatcatgtcattatgattaagacctggaccataatcacgaattacaaatcgtgggtcaagacgagttggtgctttgatgtaaaatggacgattttcattaccattcagtttatgagcatcatcgcagttagtagaaagttcacgaacaacagcacgaactttatacttatagagtttgtttgacaagatgtcaaaagctttacccgaggccttaatagtaaacgttgaatcatcagcgtcagaagaaccaatgattacttcatcatcacatttaattttcattttattcctatcaattatgtcgtttaatgatttctgctacttcaaggagctcttcagcagtagcggtgttagttgtaaaaattttattatggatttctttgaagcgttctttgaattcctcagctgcttggatgtcaaagaaccgctggatgatacgatattcacgatatatagcatcgttgaataattcttctgatgggatgtaactgcgtttcataatattttcctcagtgatttagggaaattatatcactataactttaagcaagaatcctagaatcatctccaagcacttcttgattaaagccatataaatccattcttataaagaaaaagggacccggaggtcccttagattaccacaccctactaactcgaccataaacctcatgtttagaaccatcaatgttttcaacccagatggttacccaagttccgggcagaggtttcttttcagcgaacagatatccatagtcgcctgagatcaaagtaatccaataacgttgcatgttaattccttctaagtaagggcaatagtacccttactatttattctttattcactcatccatgtcttacgtggtgcagcatcattacccataattaattcaaacagttctttccagttttcaggaagagtgactacatcataaaccgggtcttgaataacacgttcgtattcatcttcttcaagagaaccaagacctttaatataacgaagtttccaacctttgaaatcatctttatggtcttcatattcaccaagagaatagaaccaacgttgttctttacctttggtgagaataataaccggagttttcacaaagcggattcgaccttgttcaaataattctggccaattactaaagaacgccaaaagacttgggaaaattgaaccaacaccatcaacgtctgcatcagtcatgatagcaatatttcggtagttagtattttcagcaggctcaccaatcgtcaaaccggtgattgcacaaatgtcaaatacttccttgttcttcatagcatctgcggcagacattccccatgtattcatgaatttaccacgtagaggatatccaccatgaagttcacggtcacgtgttgtgagcagataaccaatcgcagaatcaccctcggttaagaataaagtggtgtcagcatctttgccatatttgttggctttgatgtgcttagctactttagctttctgcgctttcttggcggctttagtttctgcagctttctctgcagcaagtttacgagctaacattgcctcgataataggcatatgaatatcttcggatttcataatagcgttagcaagtttcttataatcaatatcaatatggctacgaatttctccccaaggagaagtcagacgctctttagtctgagaatcaaatcgcatgttagacatatcacgaataaacatgatgacagtcagacattctttaattcgcgctttattaacttctagtttgtacttacgctttaatgctggaataagttcattgctcagttcatcaagaactaggtcaacgtgagtaccaccgtttttggtgtgaatgttattaacatatgaaagttgacggaacccgtcatccgaacgaccaatggcaatagcacaagtatcagaatcctgcactacagcattttcgtcatacatgtgggcgtaagctttaaacttgccttgaacccgtttacccatgaatttaaattcaatatcaggataaactactgctaacgtcatcagacgatcgtgaatgattgattggtcaacatcagttaagccatcagattcaaagtgggtgaaatctgggataaatgacacgacagtaccagtcttgtctttaataaattctttatctttagctggatgttcttcccaagaaacattctctgcgccatttgaacagcggacaacgatttcattttttccatcacaggttgcacccacaaatgtcacagaaaaaatattcgttaacgcagaaccaacaccgttcataccaccggttttacgctcagcatcatcaccaaagttaccacccgcacgaggacgagtccatgcagctactggtcctggaatagtttctccttcaggtgttactacaggagcctgcggaagaccacgaccattatctgttacaataattttgttgcctttgacatcaactgaaatcttattcgcgtgtttgaaattagtacgaatagcttcatcaacagagttatcaatgatttcatcaatcagtttgataataccaggaacatactttactgattggaatttaccaaaaagaaaacggtcatgcgcttcaaacgcagaactaccaatgtacattccgctacgcttaatgatatgttctcggtcactcagaattttaatttcgttcttaatcattacatttcctcggttagtgaaggaattatatcaactattaattatagcaagtaattcttctttgatatacatcaatttaccaagaacctcatggcctcctttaaccgctttatactcgggatatcgtggccgctgtcgttcaaacatagtccattgagcatcactaacgttagcgtatgcatatcgagaatttccgtagtactgttcaatccggtactcgttgttttcattaagtgaaatccactcttcacagacttcataatatttctgcatccaaatagtacgaccattcacgtcattaattggccaccaagcaaacctgtattttccaatagcccgctctaccatttttaactgtcgtttagcacgcctttgcgcagttgtcattccaataatcataatattctcctctggccaacaagactataataccaaaacacggtgtccatgtaaacaactaaatgacccgaaggtcatttattcataacgaattgtgctgttcttaagaaaaagccctgagcacactgttccgttaacaggttttcctgttggcccaatagccgtaaagcctgtgtgctgaaaatcatcctctgagcaagaaaagaacttatatccagtgattttgatatcagtaaatcccgcgttatctaacacgcgagttgcgttatcagcgtcagtgcatccaatcatcatgaaggcaagcgctgtaattaaaatctttttcattttaatttaaccctataagttatattacctactttaataacccggatttctccgggtttcatggtaatgcgtgctttagttcccatcaataatcaccactctttaatccatcgtagtgaactgccggagcagaaaccacccgcttcatttgaccttcacacttagggttaaagcagttaacagtatagtcacgatgggaaattttacgcataatttctatcttttttccacagacttcacacttgtaatcatacattggcattaacagcatccttccatttttgtgttttgaccatgatttgctcattcagtgcacgagtaaccatcatggagatttcatcatctgatacatgggtatcatttttatggcgatttctgaaatgcagccaaagtgcatccactacacagttaataacatctgcgcactcgccttcaaattcttctttctgccgccatggacgattaatccaatcacacatttctccagtttctgaagaaagttgcagcatgacattcccaatgctacggttgggaataggataagataattttgatgcttcaaaaataggagctaaatttaacattgatatgcactctgcagtgctgcaatagcagcgattgcttgaccacgattatgaatagaaagattcataaccaaatcggttggaattacattcgcggaagttccaacttcagtaaagtatttgaattcgctatcaaaaattacaaggtcttcaccaccaacttcatcacattctgtgccattagcccacgtaattccggatactctgttattttggtggtcaactttagtaacagtaaaactcccgccattttcatggagttcatacacaaagtcttcattaaactcataacgtgaagaaaattcttcttccgcttcatcattgacgaatttgtactgtacgccttctttaaaattcattacacaatctccatgtattctgggccatcaactgtgattacacgagcaaaggtacgaactgggacgatatcaccatggttcgcgaatacatacaaccaggtccaatgctcttctttaccgaaggttttctctttctgaacgacaattaagtcaggattgaacagaatgtcttcaaaagcttcggcagtaatttttacggtgttttcagttttcatgttattctcctcagtagttgataagataatagtaccacatccttgtggcaaagtaaacaactttttatactaaaccttgacgctgtgattccgtcggctctacatcggctttaggcagaaccgcatagttaccttgaaatactacatttactaaagttttaccgtcttcttcccactcatcagtgacaagaacatttttatgcagcgacagattagtggctgaattagtagaactcaccgattgggtaataacattgtccagcgaattcacgtgtacccacttgcgcagatagctttcactagattcaacgaattttttcaagcagtggatgtaatcaccaaaatcttcacggtaaatcttatacccagatttaccgtcattacgattaactactttaacgattacaccattgtgaccaacccacttaccaccaattactttaacgttttcacctacaactaaacctttcatcgtgtttctctcagtttgttaatgtagagccattatataacggctctttcataaagtaaatagttatcggtgagaaatttcacacccaacatctactccgaacatataccctgcatcccagcccttagccatcaaagccttggccaccagaaccatcgttggagagatttccgggaggatttcccggttgaaccactcttcgaagttttcatcgaactcaaactcttccattagccacgccccttaggtaaactcagtggatcggtatcttctggacttggtgcttcgcttaggcctagagcataacgttgagcatatttaagcattagaatatccttagcgcagtcatggatactatcatgcgcgataaacccgtcgagcgtaccctttggaagaggggtagttgtcagaccacgagtcagaagcagtgattcaatcgcggtacgaatatcacgctgattccagaacttacacggctcttctttaaatgtatcaatttcttcttcggaaattccttgggctcgttgaacatcgcgaagacaatcaacaaaaatcggaaagtcaaagctctgtccacgacaccagccaaaggaatcccatgggtgaattccattatcaatcagatattgctgagcttctttaattccagcaattactgataaatcgtctggcgttgaggccaggttagcccgagcttcagctgattgtttcttccaccactcaagagtagacttaccaaacaaccgatgacctttctgggatttaaggtcaaacttaatacgatgaccacgtttaaccaattcatcgaagctttccaaaacttcggggtcagaatcaaaggtgattagagcaaggtcaatcacagaagagcttgacacatttccgaatgtttcaaaatcaataataaagtctttagccattttgagcctctagcataaatttaatttcgcgtaactggcaaccaatatattcgctcagatacacctttgggtcatatcctgtgaaccaagtaatagcattagcattatctgctatatcacgaagctcattcagaactgtatcaattttaatgttaatagcacgcttaacattgtctggtgcttcaaacttagattcttgtaagccaacaatcattgtttgaaggtcttctaatttcaattcaaacatattacctcacacataaaacacatcatatcgaccacgagtagtaccaacatataataactgctgtgcgagagaagcatctgccatgtgaatgcatggagtataaatgaagcttctgtcaattgagatgccctgggccttatggaaagtcgaagccggtaatgctttcactttatggaacttacgcttagcatcccagaactcagaccagggtgctttaccgcctttattccagttcttatatgtatctgcagtttttgccaagaaaaattgaaacttattcatttcttcttcggatgagatgacacagattttctctctagcgtactcttcatcgtcgccataggtttcaatatctaatacccaatgacgaaccagatattcacctggaacacctctggcacctaaaaatgacgtggtttcagttgcatctaatatgcgaacaaactgaccattattgaaaagaatttcgctgaatttcttcccttcaaatttaagttccttggtaagaggttcttgcataacaacaatctcacctactacgaatggtcgttcagtttcatagattcttcgcctgattatttcattcagtttatccacagatttattagtgaacgcaagcattcggttttcaaataaatcttctggtgttttaactaaattaaaataatttagcataaaatctttaagggcagttccttttgtaaaaccacggacgccatgaccatcaactacacagtcacgaatccacccaccgtttctgatttcagtagcgacttcaatgattggggcattactccgcatcacctcggtcaaatgaagttgtaagaaatctttatgagtgaagaatggactcagtgcaggttcattacttccaggttctaccggacgtatctgagccttatcaccaatggcaatgacaatacaccaggcaggaatagttgccatcaaaatcttaaacaacttacggtcatacattgaagcttcatcgcagatgagaactcgaatagatgccatatccggaactttcttttgttcaaacagaacgttttcttcatatgtcgtcgggttgattttcagaagactatgaatagtactggcctgcattccgctgagcttagataaaacctttttggccccatgcgtaggtgctgccaacgcaatgccagagataccctgagaaatcaaagcgtcaatgataaatttggttaaagttgttttacctgtaccagcaggtccattaatcgtaatgtgttgacctttagctccttgtttgaccatttcaatgactttattaaaaatcgctttttgactttcttttaattggtcaaacgtaatcatgccacttttaccctcactacatgtagatttttaatttttgctttgagtttttcgcgctcaacatcgctaagtggctcatacactagctcagttgttttccaccaaagcattcctttggttttgcttttcccagtaaaattaccttttgctagtttgtctgttaaaaccgacattgtacgaatccgtgctttattagccgattcttcattagtgaagaccacacatcgttctccatcgtacatatcagttgtgactggatggtcaaatccgtctttatccttatacgctactacatatccatagtgttgcattacattttacctctcaaaagttggaagaaggacgcagtcaatggaagaccttttttcaattttaacttatctagcattgagcatttttctaaccgacgaagtgagttaacaattaaccgtattgattgtacacggatttcagcatctgacggacgattcggaactgatgctaaaacagcagataacttacgctcaactttagctaattcagacttaccaccactgatacgagttctcaatgcattaataagttctaaatctgccgaggttgcagttccattcttttctttttgcataaattgagaaagatgattttcgcgattacgtaagttagttttaattgatgttatagttttttcatactcacgaatcttttccaaacgagaagcttctttatcacttgttggcttaacagaatctgaagaacgaactatgcgtgctgcgatttcattcgcttttcgttcaaggccttcaatcgtattatttccacgcaaagtattatacttttgcttgacaggaatgttattccctactacatatcccaagtcattattccagcgttcaagcgtcatgctatcaggatgatttcctttaacagttccaaacttttcgcctgagtatgcgcaatgtgtctgctgcatgatgttaaacagatattctggggtgagattgaactccttgtgccgacgttgagcagaacctaaagttgtaattaaacgagtataaactttagcggtttcagcagtaaatttcatcatgttttcctcaaaaatgctttcgtcttacggacggtataatgggtctaggtccctagttctagataatcactagttgactaagctatagtaacactaaagtagtccataagtaaaccagatttttcaactttgttatgacccaccactttgaacttagttcccatcggtagcatcctttcttgttctttatcaatcatctcgatgtcagcgcttctgcgctgagcaatgttatcaatcacatcatttggtcgcatgaattcagaatctggtgcagtaattaaaagcgatttcatgttggtatgataatcaaatgattgctgacaattattgacttcaatgactacaaaggtcgagtaatgccatttgcctgcaaattctcgggcaatcgtttcatctgttgtgaatgatgctacctttccgaagtcaaatttctctcctttaataagagcgtcataaaaggctttagcctcgcggcatgatagacctctatagagaatgtcactgttatcaatttgatgacgtctaacgatagagtcaagtttcttatgaaattcttcgccaatcttattgttcatgcactgccacagaattgactgttctttgcagtcaaaacgattggctaatgcttcccatacgcttaaatcatataaaggtaatcctttgctttctcgcgcgaagttaagaacatcaatggagcgaatgggttcttcgataggaataacctttgataattttactgaaatagatgggtttaatgaaatagccatgatattctccatttttggttacgagaggtatcatatcatggctttttagaagagtaaactactttgtgaaattattttgcccacggagaccagggcggcgggtcagaccagattgaagctagttcatctagaagagcttctggggctttaataccatacttctgtataattatacggtattcgtctttgatgtccttagaaatcactggatgaacctgaacctcttcctgaggctcttccatcatttcaaacaaatccatcacatgaaccactccatccgacgatattgactgttactattattatatgcatcagcagctttttgaagcaaatcgctcggagtaaatctggcgaaatcagcttgcataaatgaccatactaactgagtaaatactataaaagcgtcttcattgtcaatgacgatacttttgccgttaacgattttatcatttgcatattcaaacagatcggtctcatgatatgcattggtatatcctttaaggtgtaaagcacctaaaatattaattggacttcctggcatgtgtgaaacatcaaaagtatgggctgttttgacaagtccatatttactattaggacaccacccgcgtgcttcaaatttattgaccagttctttaaactcgtcataagaataattgtaaattgctacagtgaatactttatcagaatcaaaaccttcttttagtttgcgctgtaaacttactttatagatttttgcgtcggccacacatagctccttcagtcatgttgttgtcttcaaaccacttatcatttgctttaattaaagcaggcgcagcttttagtaataacgctgcagctcttacacctctgtaccaacaatcaaaatgagacttctttaatggtgattgataccagggcttagtataacatatcattttgttctcctcagttagtaggaataatatactattcccaatatagcataaaaggactcccgaaggagtccttaattttatacttcgctgtcagccggaacagcttcaaacattttcgcgttggtggttgcccaagttgcagcatcatcaactactgttgaataagcggctttttcggatgggaaaatctgatactgtgcattagcaatgcgatgtgagtcagaatataccttaaaagctacagatacttcagtacctttaacctcgccatcagcagtggtatggtcaaaagttttgatatttacgtaagccattttaatctcctatttagtttacaggagtatttatatagctgctgtaagcgtctttaatatttctttatcaatttctcgagtgatttcttctcgaagggccaatactaaggcccgttctttttgttttctgataatttttaaacgacgcttagatattcttttagccatcagtaaccactgtcttgacgagcaaagttctcggcgtttttcagataatacagcttaaagatttcttcagaatccagaccaagcgccataaacatattcagaacaaagtgcaggatatcaatcatttcaaatttgatttcaagctggtctttatcagacaggtctttgatataagtttcctgcatcttgacgtggtcagctttccatggtttccacacagcactagctgccttttcaccgttactcataccgccaagagacgtcagcaattcgcggaattcgtcatcaatgtaatctttttgattacgcagccactgtacgatatcaccagcttgagccaattcatcaggatgcatgttagtaccaggcttgtcatttgcaagacgaacctgaagagatttttgcatatcaagcattacttgcagagggtcaccaccaactttgcgtacgatacctgcgtatcgggcttcagctttatctgcaccagcgatcagttgactacattcgttgaaatgtggcatgttatttttcctttcttatgaagttttctatcatacgtctatagcagatattaggataacctgccttgacagctattttattaaattttgtgcgcttaggtctattattataaacccacaactcgtaaagcgaatcatacgagttccatatctcaccacgtcttggattcggtaaaccgtatctaggagaatttttaccactaaaccttccaatacgagcattgctcatgttagctttagcttcttccgaaataactttgcctttgtgagaagctcgcattttagccttagtttcttctggtgtttttaacccttttatccatgatggctttccaaaccttggattattttcacccgagaaaagaacagagttttggattttaagggtttctattaatctacttgttaatttaacacctttattatatcgcattaaatttacagcataatgcaatcctttcacatttggatatattttagttaataatctatgagctataaaatgctcgcgcgcagttaactcaacaagattgtttttgtcatctgctcctcccatacatctaggaattatatgatggcgttctttatatccatcaagatgccggcatttagcctttgtaactaaagctgagtaaattttttggtaattcacagatatcctttcaattagataaatattatatcacttaacataaatagcaggaggattcatgtctgaagtgaaacaagaatgtaaagacaaaggaggatttggaagatatctttacgtcggaatcgccactgctgctttagctgcatggaattatgtggtagttccattagctagcacacacggtctagttcttcctccaatgccgttagaaaaagttgtgtcgtttattatgaccggaggattgctttaatttaaggggctttggcccctatatcttcgcgtatttgtcaaggcgcaatttagccattaaaccttgcgatatattttgattaatataatccgttatttcagaagcagttgccccctctttcataatcatatcatttatatctttgcttttccaaggcgacttatcccagaaaactaccttttcacccgcgtctactaaacgcttcatacgcttaatcgtatcaggatgacgaggttcatggtccataatccatgctcggttatcatgacatggaacttgagctaaatctaaagacccaccggtaattgcaatagcattatcaatgaacagcgaatctattggtccttccatgacgaatacgagttttgactcatcaatagtgtcgagaccataaattttggtcgcgtgttcgtgggctttgattgtgatgtatttttgtggagcattctttcgtagtgctcgtccttgaaacgactcaatctctcctttcttgttgaagataggaataaccaaacgtggttcgttcgtctcattcttataggttcctggattaacggagttaacaagagaaggccattggttagtaaaccataaccttttccaagaagtgcttggaatacatctggcagtcacgtatttaactatcggatgttccttaggaagtctatctaatcgctcgcagaaattaagtttttctattacggggagttttgcattaattttctcagacggttctacagcctttggcttatcaaagacctgctcctttcttttctcaagaagatactctcgatagaggtcgggttcattatctttaagatactgcgatagccacttgttatactcgcagttgaagcaatgacagcgtaatccttgacctgcatcaaaaatccagaatcgtgctttattgatatctttctgtgagtcaccacaaattgggcaacggcagtttaacttgaatgttgaagatgtagtaacgtgtctaaatttaggtaggtgagatattgcgcgaattgcatactcgttatcaacccaagacataatatttcctctggccttaaactaataaggccattttatcactttttcttggcagcgtctttatccgcttttcgtttctttggaagagtttcgggtcctttattgacgatgtccccggaagttgtacctgatgcaatattctgtggattgccgcccgcatcacctgcgaccatctcagtaacaaactctttgtatgttttcatagagcctcctactatttattcatgcgtaatacgtaagcatttatatgtaggatacagcgtcggagacattgattttggattgtctttgataagcataaactgcttgcctgtatcttcacacttttgcttaatcacggcttcatctttaccagtgaatgccatcttttcagtagacattccacctgaaccagtagatagcgccattattaaaacgtatgtaatcatcctaaaatccacttaacaatgttgaagttatcaaactgggcatcacagtaaagaacataattcaacttaagtgctgcgccgtcgtctttaagttctgcttgcacttctgtttgtttgctcgggtctacgttttccacaatatgaccaacatctgcacgaatctgctgagctacttcagactcatcagcagtcattgaccactcgcataagtctttgtcatagttggccatggcaggaactgcagagcaacttgatactgcgaacactaaagcaagtacaatctttttcattttggtttcctcaagcagcttgtacgttaagagcagaaatcaggcgataatcaccgtttgcgtatactaacattgacacattgccatcagtgtttttgaatggctcaacaactactaaaactgtatcgccttcatctaatgcttttcgtactacgccatcacaacgcagattagcatgtggagatttaactactttgcttccaactaccataccgcaatgcggtacagtttccgctgattcatctttactcttaaagactacgtctaatgctttttcaattgtccacatgatgttttcctctactcgttttgtttcagtaaggccatagtatcatggcctttggagaaagtaaactaccttttgaacaattttttcaacaaaatgtcagaggtcagattcttggtaggtaggtatgtagcagagttaacccagatgccatcgctgttatacaccttgacctctccatagtcgcatacagataggtctgctttgttatatgcctcaatgcctcgatgaatggtatctgtggctgttacaacaaaagagtgacctgactggtcacggaccgcgctaaacacaaaaatcatagaattccttagaattttaactcttctgccagagcatcaagcttagaacgtgatactcgttcttgacgattagattcggctacacggttctgtgcaccggcaccttctcggacggtattgcttggattaggcttagttgggtcgttttgctgctcaatttctacccaacgctgattagccttatgtacacccatagagaacttattgttgatgttcttatcaccgtaacgtgatttaatctgcttaattaattgttgcttcatctgagcaagttcaggggtttcaatcacagccaacataaagtctgctgtagcaggtagaccagcagattctgcaatatcactcatgtccatatcagaagcatcccacgctgaacgacctacctgagctgcggtccaaagaacagtttcagattctacagccaatgcacgaagttcttctgcaatagctttaactaacgtgtaactgttttcagtatattgacgaatacggcaagaagcacaaataccaagatagtcaatgatgataacagtcggtttaaagttcttcttgagtttcaactcattcagaagagctcggaatgtattagcgttagcaccgccagtcggatactgtttaatgattaaacgaccaagagtactagaactacgccatttttccattttgcctttatattcggcgtatgatacacagccatcatcaatatcgtcaagtgatacatcaagcaaattagcgtcaatgcgtttagcacaaacttcttcggccatttccatggaaatataaaggacattatgccccatctgaagatagtctgcagccaatgaacacaatcctaacgatttaccaacgttgacgccagccatcaatacgttcagcgtaccagtctcggcaccacctttagtaattttgttcagaatgctaagtttaaacggaactttacgagctttattctggtatgataaccaacgagcttcataatcttccatccaatcatgaccaatatagctatcaaacgatactgataacgcttcgcgcatgatatcaggaatagctcccatatcaggaagacgcttatctcgcttatttggctcaagctgggcattagcctgaatttcaataattcgagacgtagcgttatacatagccttttcttgaacgtacttttcagtttccttaactaaccaattcaaatcttcaggagcatcagataacttatcaataagtttctttgcgccttcatgttccgtttcagttatagacgaattatccagtgctacacataacgcagtctttgaaggaattgctgtgtattcattaacgtgtttcttaattatgttaaacaccgtctgagcaggtccttgctcgaagtactctttgtccatatatggccaaaccttcgtaaagaaagcctggttgtaaatcagattagctaagattgtttctaccactttaacctcttaaaagattttccataatgattttttcttggtctttaatgcactctggatttgttgtttaacacaagcttccacatgaggataaagttcatccttatgagcttcagatggtgtactgaactcaatagttacttcccccgaaggagaaatatttaatttatgaacataaaccaagtgtgattgaccatttaattttatcacaatttcttggataacagtcttcatagcttcttggattatttcatggcttttcttgaacactcgttcttgacgctcgaagtctccctcttccgagggagattcttgttcaaatttctcgagttcagattctaaatcaaactcagtcttcattcatgaagttctctaattcatcttcaacttcagcagctgatactgaaccactctcaggaagtttaacaccatcaaccttagttgaaacttttgagttaatcatttctgctaccgcttcatcaaccgcagcgtttgaatcaatagcacccaactgataacgggctttgatagcgtcacggaatggctcatgcttaaacagaggaccccaaaattccgtactgctcgtatcttttgcccgccaggatttttcttcacgaatcatctcaccggtttcaacatccaggaattctcgtgcataccatccgtttttcggtttaaccacaaatccgatatccagagccatatcaagcagaccactgtatggatcgataccgccatcgaatttaacatcgatgaagaacttacttttctctttgacagtacgcgatttctcagcgttcaggacaaactgatatccttcaagctcagtaccatctttaatttgacgtttaccgatgatgaacacagtatccgcagaatacataggacctgtaccaccagtcattaccgtcttactgaacatctcgatagtctcgattgtgtggttaaccgcgacacaaggaatgttcttaatagagaagtaaggagttacgatacggaagagagacttcagacttttcgcacgagtcatatctgcaacagatttctcgttcagagcatcttcggtttcctttttagacgccatgttaccaatagagtcgataaacacgatgactttttcaccacgctcaatagcttcaagctggttaaccatatcgatttttaattgttcaaccgactgaaccggtgtatgaattacgcggtcagggtcaacacccatagatttcagataagctggagtgataccaaattctgaatcatagaacaaacagactgcatcaggatacttattaagataagcactaaccattgtcagagacatgttagatttgaagtgtttagatggacctgcgaagatagtcaacccggactgcataccaccatccaacgctccactgattgcgatattaagcatcggaattttagttctaactacatctttctcgttaaagaattttgatttagtcagttctgctgtcattttagaagtggatgctttaatcaggcgagattttaagtcagacattcattatattccataagtctccattatatttttctcacaggttaaaggatagagtaattatattactttgttcttgaagctattatcagaagttccatttcttcttggtgttataaaccactgtttccatatctatttcatagtgtattttacatccaacgcacatgccatgccaccagcaatgcattccatctgagccagtagttccttcatgaacaaactcatcagatttacatacgaagcatctgaattcttcagccttgaatatattaccagctacgtcagatttatcatagatgttcataagaggtccttggagggctttcgccctcacagatatggttctaccttaccaaattcatggaaggcctgagatttcactcgagtgttaatacacatacgaattgatttcagaggttcattatcaccgaataacccacgtctttcgccgtctttagatttccaacgggcttgatttgggaaagcagcatgtagctgttcaagggctctattctgacgagcagtatcacgctgtgtagaacaaccaccaggagactgcactttgccggatttaacgagatacttaaacagagccagatgaggatgacccatgttaattaattttagaaaagcataagcatcttcgttaaggtcaataactccgtaaccaatatcttctgcggtaagtttagtcaaatcatagaaagtattggtgaacccaaaactattctcgcgataatgaccccagcttgatgtgattttgaaaatcggcaagcgagcatgaccgtgataataaccacaatccatagcagtctctacgtatttgaccatatcatcaaatacctcttgactcattgcctcgccggcaccaagtggaacacggcgatcgtcgcgttcacgaatttcagtcagatgaatggtcgtatcatcatcaagcatccaaattcgttgtcctgcatacatttcagtaatcagacggcgagttcctgcaattccatcaacatcatcggggacagtaacgattttagcagcatgaccgtgccaagtttcgtatgcttctttttctgattcacgtactacaagatgcggaacataaccttcaggaaacatagtcagggcagtaactgccccggcacgcttataacttggaattacaaactgaatcatttccactcacctttatagtctttctttgcaatatgagtttcaccagtataagcatagttatctacaagatagaaatgacgctcatacacgtgcaaagacccgacgttccaaataatgtcaccaactgaataatttttacctgatgcattcagaagtttggttaactgttccagaacatagagctgccacgcatagtcattacgatatccaaagacgacatcattagagcgcatgtttacaacagcatgaactttattatcacgaatcagatactgaacattgttagtacacatgaaatcactcatgccatcgcgctcaaaatcatactgcatttgaggtcgtgtataaatcataattccgcggcgagaatcaggattactgataagttcctttgcgcagttagcaaactgcgaatagttttgtgatgaccaaactgcccagccatagttagaattaatctcaccatgtttggatgcaattgctttccaaatagctggggtttcacctggaatatctttaacgaataaactttgagatttataccactcaagttcacgggcaatgtacccatcattaactgcaccaaaaatcaggggctcatctgcaataaatgatgcacctacgatttcaatagtcttcacacccgtcttatcaatcacaaattctttgttgagcaaagcatcagcgaattcttgacggatatcttgtactgtcattggagttacaatcatgagacctcttatttaacttgctggataataattgtattctgctgtgcgttagaagcagaccaaatcagcgcaattaaccaaccgataatggaccaaccgaatactagatttgtgataaagattccaccccgtgatttatgcttacgactgcaagctacaaaggtcggcaaaaaatagatgaagaaaagaatgattaaaccaaatactgcttccatgttaatctcctcagttagacatgcatttgttgtagatgtgattttggagagattttaactgctccatacgttgtttatgctcattataactcaatccgccgttagcaaaatcagttaaacgaatctggtcattcactgctgccgcttgagcagtgcatgtacgttctttttgagttttacgcagacgcttaatttcttccagctcatgcttattctgctcaatcatgtcgagttccatcgcagatagctgacgattaggattagctttttctttcgccaaccgacgctcaaccgcgagcgattcagcagagacctggttgctagcacgatagtatcctacagtaccgccaattgctcgcacctgtccaacagaagaagccgggacgatatcaccttgtggcatttgacaaccagtcagcgtgagagcaacgataacagcaagtaacgatttcattgtaatctcctcagtatgttatttcgagaacaatggtaccacatccttgtggcaaagtaaacaacttttttaaaaatcgaacatgtcaagaagagacgatttctcttcatagtctaaccctgccgcttcagacatacccgtcagaggtttaacaaacgatttttggaacagaacactgtggtcaagccacactagaacttcctgtcggatttcttgtggcagctcagtgcccgatggccatgccatgcatttctcaccgtacgggttaccttcacgcagcgggatgaccatcaccttctcgccttccatgattggtgttataccttcaaagcccgcggtagctcggttatacgctaaagcacctttgacgtgatatggcgtacctttatctggatatcctgcaccatcatcatacttaccgatgttgttggcggtcttaacttctgctattactttatagtcaagttcacgatactcagactcaaactgcttataatattgctgtaaagattcttcaccttcctgcagcatacgccgaatagattcttccaacgcattctgaacagcagttggtgtagaactttgctgagtttccatacccatgattttcagatgcggttctgcatatcgagtaccttccatatcatacacattcagagcatatcgtttcttcgctttccagaatccgccaatgccgtttgaccccaacggaggacaagaaatagcttcacggtccatgaacattaaatgttctttattgttcatgtattcacacatctcacgatatgattggtcaatccaaggttccattttcttcttgccgaattggttcaggaattcgaccaaatcgttagtttctttgaaacgctcaagacctaccttctcgataaccttatcaacacaaacgtaaattgagtcagtatcaccagctactacaaacgaatgtccttcagtaccacataccttgttgagatattcattaactttacgttcaatccattgaattgccatttgaccaaacaacgtgattgctgatgcgttacgcaaatcataataacggaagtaaatgttacccaatgcaccataaagtgagttgatcagaatcttacggtttaactgattagtattacccaagatttcagcatgtttacattcaaacatcagtttgtcaaggcactcttcggtatatgtcagcagttctgctttcatatcatcagagaaatcttcatagacattaacttctgcgaatttatcgatagttccaaacttcttatcattcagaacctttttaatcagttcttgatttcgtttggcacccatcattttatttttccactctttacgctgataaaataccttcgcgatttcaactggaatgacaccatctacatctttacgatacatccaaccattgggtgaacatgaatattcgtcagacggacgtggtgcagtcttgttaatgtactcacccaatggatgaagtttaaactgtccaacgatggtttctggtgaaatattaacttgtcggatgattgacggatacagagatgtcaagtcaaacgacatgatataacgatatgcagcaggaactggttccttaacatacgcaccaggatatgactgtttaacatgagaacgactttgcggaataaccttgtcctgttctttcagactgttaaagatgattgcgtcccatgttttaatcggactcattacaccttgatacggcatcttcgcataataagacatcgagatagccaggtcaataaatccgcgaacagcatcaatcgcttgtactgattcaacgtcgatgatgttatacgaaatataccgttggtggttagtttcacgcaatttattgattggaccgtcatatgctaatttacctttcttggtttcataataagcaatgaaatccaacttatacgtcggttggttcgtgaaactaaacttcttatacaaatccatgtaatcaagaatagtcacacccatgatagaataaatttctttatcaccatacatgtttgtgataatcttagatgaaactttattcagaggagagaaccgtttcatcgcacgctcaccaagaatctgtttcacacgattcatgatgtacggaatatcaaatccttcaatgttccagccagtaaagattgctgggcatttctgttcccaaagattgatgtactcaagcatcatttctttttctgaattgaatggcatatacaccacacgatcaagaatatgttgtggaacttcatcaccgccttcggaatctaaacgagcagcgagtttcttgtcccactcggaaacagaaccataaagagaatgcagtaaatcaaatacgtagaacttatcatcaaccgaatcgtaatgggtgatagcatcaatttcatattctgctttcatcgggtctgggaattgagatgcagtaacctcaatgtcacagtttgcaattcggatgaattttttattatagacgatttctgaaccgtaagtatcactgatataagcaagtttgaaatcatccatacccattgcttccattcccatatcttccatacgacgcatccaatcgcgtgcatctttcatagttgggaatgtattcttcttgcaatacttgccatagatgtctttgtactttgtttcttccatgcaatgactaaacataacaggagaatacggaacacgacgcatgcgttcctcaccagtagaatcgatataacgttctacaatgtcattgcctagagtttcaacgctgatataaaattctttcatgggtttcctttgtttatagaccgagttattagtctttaggtgggataattatactccgatttttataaagtaaaagggccgaagcccttttcttacgcaccgattgtgtacttagattttaaagtccattcatgtttctgtttgaatgtaattactcggaagttattctgcatctgtgcaagagtttgaccacgattaatactcagtagaccccagtcagagagcagttgtgcgattgagtctcgacgaatttcatcttctaagtcaatagtaacagggcgaccatcaagctttaacatctctttaaaatggacgatatagtaacgaccctgtttctgaagaatgtggcagctttgatatagtaccttatctttgttattagcaattcccatacgggtcagagtttctttaactttcaggaagtcttcaggctgtttcagtgtaatttcaatcatctttaccattccaatgctgttttcttaagatttttctgttctttcacgtttttcgtgattgtcttgaccaattcatcagtcacaagacctttcattttcttgagagcaggtttaagcttgtttttagcttccagggtctctctatacatcctagcatcaatcgcattgaccttgtaatatgtcattataacttgaagaatcaatgcatcctggatgttttctgttaacttagcccatttaccataccgacgacctctaggaacagaggccatcatatagttatagtgtgcttggtcagataacccttgaccaacaaggttcataacataaaccgcaggcatacagtcagcgtgctgagaaagagcgttttcaaccatgaattttgaataatccatcgtcgagatattcaaatgctcttgcttttcgttaatagacccaataattgtgaagaattgattttctgctttttctttatatgaatcagataattcctggactttcgtccagtctttacctaaccaagctatttggtgctcattatactgatcatcatcttcaaataaactcatcatttccactgcatctctacaacaagttgaataagcatataaaccaaatgtaattcaatcgaagctgctatgccatgatactggttattttcaccgatgatttcatacattctgataatgcttgggccagtaaccattgtatacagctcagaagaaagtttatctacaaaccaagtatagtctgctgcatattttggagcaagagcacggagttctttgatgttcttagttttaatagcttcgatgacatcttcaattgaaccacggtcattcagaacgatagacaagatacctgcatcaatcacacccttagaagaataatgatcaagcatgttaatggtcttacggaattctggaaaattctttttgaccaaagcagctacaactttcttatcttcaaccaccacgccttcattttcacaaattgcgagacaacgcttgagcatctcgatttgcattggcttaacatcagatggagatggtttaccaaaattaattacacggcaacgagactgaagaggtttaatgataccatcaaggttgtttgcagtaatgataatagtacagtttgtgctatacgcttccatgaatgaacgcagatgtcgttgagattctgcaagacctgcacgatcaaattcgtcaatcacgataattttctgcttgcctgcaatggatgcagaacttgcgaatgcagttaacggtccacgaacgaaatcaattttacaatcagaaccattcacgaacatcatttcagcattaatgtcattacataatgctttagctactgtggtcttaccggtgccaggagaagtactatggagaattaaatgaggaatttttcctttagctactaaagccgaaaaaatttctttatcttcagcaggcaatacacattcagaaatagtacctggacgatatttctgttcccacatgaagtctgcttcgtttactgtcaatttcatttatatttcctcattcagattaaagatggggccgaagccccgaaattattactcaaaatcaaaggtactgtctgcttccattgctactacataagaggctgatgcaccttcaaattttgcggcagtctgtttcttggagccattcatttttgcccacagcatcagcttgtaatcaccaacagtcatcttcatattgctcatgttgatgataaagttaaagttaccttcgccatcataatcaccgagggtcagggaatacttcggacgggtcagtgcagcatcttctactttgttataaccgcgcagaacaattttaccatcaacattggtgatagcaattgtgtcaatctgcatgccacgagatactcgcatcagctgttgcaggtcttcacctttaaaatcgataattacgtttgccaccgggaatgggattggtttagtcgggaacacgattgtgctcgggtcagctgctggccagaagatagttgagcgagcatctttaattgccaggttaccatcttcctgcatgataatatctgcatcatcaccaaccagagacagaatgctcaggaaactgttcaggtcataaattgctacatcagtatcgatagtatcagagattgtggcttcagcataagtcgtaccattaacagcacgagtcatgataaaattgccaggtttcagcatgataccggagttgatggtggagaagtttttcagaatgttcagagtttctttagagaatttcatttcaataccttttaattaagttcaggataattatatcaagctgcgaatgtagcagttaattcttctgcaacaatctgacctgccgcaacgagttgctcatcagcatctacgcagtaatcattttctagacgttcgccaccatgacggtcagtaacaattttagcaccagccttgattgattcgttgtaatgcttacgcatcaattcaatccatttttctgcaacttcgtcgtcaatagatttatagaaagcaaagcgagcttcagaatctttaatcttatctttaatagctgctttagtttcttcagttagagccagaacccaagacttacgaatacgattttggttattcgggttggaatctgcacgtacgtttttaacctggatatctttcacatcaacaaaattaatcattatatttaccttaatcgtaataatcttcaaccatccaaccgggattcctgctggacatgactctattatattcatttcctgtaaaagcatctcgtaacatttcttctgttactaagtgtttttcatcagaaaacaaattagttaacacatatcgctttacttcaggaaaggccagcagatgctggccagttgtaaactcattcattccatcaccgtaaatcgtcctactttcttcatttgaagatgttggccatatgcctgcgggtcgtggtcacggtgagaaataataaacacattggcatctaccatcttattaagaatagcagttattgccttaacaccttctgcgtcggtggccgaatcgtagacttcatcaaggaacagacagtttattttaacaccagaaactttttcagcaatatcacgccatgtgaatagtaatgctatatcaattctggctttttcaccttgactaaacgaggcataactaaactcttctcgtccgcgagatttaatcgtttcagagaactcttcgttcaacgtgaacgaataatcagcttccataatttttaggtagctgttaatttgcttattgaacatcgggatgtacttcttgatgatagctcctttaataccggagtctttcagcatttcagttaaaataccacgacgatatttttccataaccaaattagttttgacgagaataattttatctaattcttcttgtagcagttcaatcttgtcagagttatcaatgaactcctgtgatgctttatcaattgctgctttaatacgacgtgctttatcaactgcagttaaagtcatctgtttcaaattactcatttgatttttgatgtctcttgcacgcgtacgaatagtattatactcgcgagctagttcatccagttcactctggcgcgtctttaactcgccaagaatggtattacattcttcaacatgatgattaatcttagtgattagagtgtcattagaatgcaaatcctgcaagcacgttgggcaatgaccgcctttatcatacaacccaagaacctttgagtatgattcaattttagaacgaatcttaaagattttaccttgaacttcttgaattgactctgctgggtcatcaccaatcacgagttcaagcagttcgctttgaagagtttctaattctgctttatatcctcgtgcctctttcacctgctcatcatacatcgcctgcaggcgagctacgttatcaccagaaagtttcttctgcttttctgcatactcatgatgagttttaatttcattagtcaatgcttcacgctgaacatcattaacctggatttgctgattgatttctcttatctgtgtcttgttcagtttgtccatatcagccaaaagagacacttcaagcaaatcttcaacgagctttcgtctattagcagttgataaccccatgaacggagtatatcctgccgttcctaatacgacaatctgcttaaacgatgtgtatgacatgccgatgagactttcaaagtaggattgaaaatcctttgaacttgcggcttcatcaagcttattgccatctcgtaaaatctcaaagacactcggtttttgcccacgtttaatgtagaaactatgaccgtcatactccatccacagttctactacagagtccttcttattgaaggagttaattaattgacctttcttaatatcacggaacggtttaccaaataaggcaaaagtaatagcttcaagcatagtacttttgccaccaccattcttacctgtgattaaggtcttttggcatttatcaagttgaatgtcaatggccgcttggccaactgacattatattcttatacttgacacgatttagtttaaaagtcttcactgattttgtgcctcaatgtataactgtttagacataacctttaaggctttgatatcatctgcggataggtcttcaagtgcttggatatattcttccattaaatccaataagcttttaacttctacttcttcgccatcttcagactcaaccgagttgtcaactttagaaacagttcttaattcatgtactaccttttcaagttctgattcaaacttaggaaggtcttcatcgaccgcagtgataataatgcgtactgcgagattacgaaactcttcaaagtcaatttttccagtaacaggataaatcagttttctatgccaagtgatttcattagggacgaaatcaaaggttgataattcagtgtcttgaacccagaagccacgtgggtcgttctcgtcacccgctgtaagcgtccaaggcgttccgatgtacttaacgtttgctgcgcttgatatggtgtggaagtgcccagaccatacttgtttgtactttttgaggaaatctggttccagcccatgagacttcattcctttataaaaataaaagccattaagctcccagtgaccaatacagtattcagcagacgattctttgatatgcttcatgatttctgacgtgttctcttcacacatccatggacacaagtcaatcaaagtcccatcaaaatccatagtcacgggcttttcaataacagtaatatgcttatacttaccaagaacttctgttgatgcattaggcgtcaacgtattcttgtagtgcatatcatgatttccgacgatcgtaattaagttaattccttctttctcaagagactccgcaatttcacgagcgaattccattgtcttatgagtgatagctttacgaacgtcaaaaatatcaccgtattgaatgatagttttaattccatgctttttggcataatcaatatgctgcttaattccgtgtcgttgtacatcctgtacccacgggtcatctgcgcggacacctaaatgccaatcgcctgagtgaataattttcatataacctctctagtagagtttaattttatattattccatgaatagcaaaaagggcccgaaggcccattacttattttgtcattaactcaaattgttctttaaagcaatgctcagaatcttggtgttctaccaggaattcaaatgctttatttcgctctttatcatagagcttctggtcagatgacagatgtttcattcgttcaaagacttcatttttattttcatcattcaaccacagaatgccagaatcatgagaagtcaacggctttccatcaacccggaatttcaaagcatcaccagtagctttatggaacacaggaatagttccacaagcgcctagttctaaatgcgtgtattccagcgaacgctcaaggaatttatctggaagacgtgacagctgataaccaaatccagactgagacatacgctcaagcatttcagagttaacatatcggtcaagaacttgaggattcagacctggtccagttttaacctgatgataatgacggcaataatcaatttcatagcgttctttgatgttaataaatgcaggactgcgttctaacccttccaagatagtcgttttgcctgcggggcgcagatgactttcatgaaagtcaaacatcaagaaatagcctttccacgtagtagtacgaccaatccaacgatgaatatcaaaatcaatagcagagaagtctttccaatacttatcacgaattgctttgatgttcatagcaggttgaaagttataaaccggaggagctgagtcagaatcatcaaagaaactcaacccgccgcttggaaaatattcttccattagcacggtattaaaatcgccgtttgagctatgactaaacagtacatcagcacgcttaacggtttcttcaagaccagcatttctacgaagtgacaatgctctatggtcatgttgatatacgactaccctaacttcaggtttaatgttctctatgagcttcttatagttatcaatcgctgcttctggagcattgatagcaggtactgagttaatgataagaatgtcacatgcgttaagcagagataaagtcttatcatagtcatctgcaagagacacaggaatagttacatctttatagctatgtgctctattacgagtaaacgctttatctttagcgtaaatgatatttacttcatggccatgttttactaaccactcacggtgctcgagactgaacttggttacgccgcatccctcaagtccgcgagccattaaaatattaatcttcatatattgacctttgttgttaattttggatattttaccattcccgtaataaagcaaaagggccgaagccctttaaattttcttgtatacaacataacccactgcttcacatatacgcttagcttcttcaaagcgtctaagcatatctaccttagcattatgaatcgcttcataatcgggagcaggtgcttctctccgagcagtatcacatttataacagaagtaactacgctttggtcctgtataacgttctgaacaattactgcaccggcacgtgtaatttccttccggccaatcatgtccaggattagaacccatcaaattcgtcatacatcccaattctcttcactagtaataaaatcagggtgttcatctaaatcaatgaatccccagttctcttcatttaccattcataccaccgtttaacttggaaggtgtcaacccagacaagagagttcttatcaattagcttacatccttcggtagagcctaacacgcgatattgattatctgctacctttactgccatcgtaccagtcgcagtgtttaaagtaaatcctgcgtctttacgaacacgtttaaattttacttgtaccagcatttagaatgtcccaaacagatttacgagaggtattccaacaagtcagaataatctcatcattaaaaggttgttttaaaatagtacgcagtttttcaatagcatacttgtaagcagggaaattattgtctaataccgcgtctccagcatgagctcgtaatcgctcaagttcacgacggtttttacgaacaactttgttggctcgagcaatagcttgttcttctgccgcttccattagtttctgttgcagctcgtcgcgctcttcctgggtaatattgttcatgttattcctttggatggtaatttatttcaaatgtgaattcagtatcagtccaattataactatgttcaattatagcagaatctgacctgaaatcagcgtcatgtggatttttcgggtcaatgtgaatatcaagatcaagcacctcccttaaatacatctttagcaaataagggatagcgtctaggtcttgcacatcttctaaaaacccgtcgaggttaatcttcagcctcatataaaaattccagattaggtccatcgcttgtaggttcgctctttttagcagaccctggcgccttataagcggtggattcatactgcgtcattttatcgtagatgtcctgaataaaggtttcatctgctaacgcaaccatatcatcgtcccgtgaatcatacacgttatggacaaaatagctgtatttctttgccatttctttgcgttcttttttgatacgctgaacgaatgcattgaaacaagcttgggttatatacgcatgcgggttatcatacttagtttcatcgaagttgattaagcctttaattgcggcttcaatcccgtctgaaatcatttcttgcttccaggattgggtgtatcctgaaaagttgaaacgcttactcagaccttccgcgatcagcataatagcaaggccgatcgtatcgttctgttttactactcgagggccgccagcagcttcagactcccggcacttctctttccatgcacagattgatttatacagttccttgttatttacataattactcatattgcctcttcgcttcaattaataatatctattatatcaaatttgggaagcgagaggattaaagcattacttaatcaattcagcgcatgcaattaatttcatcatgatacgatagaaatcgttatatgtaaactcagcagaaacattgaccgagcattcaaaatcttcgaagacacgttccattccgatgtctggaatgtcatctacatcagcgtaccagtacttgccttcctgcacgaatgttatttggtccttttccagatagaatacgccattcaatatttcgtgagtaagagttaactgaattttcataggtcacctttcatgatacgatagcactggaaaagtttttccataatacgtttgaactcaattaaactgatttcaaagtattcggattcatcttcttcatgcatcatgtttaagaatgaagtgtacagactttcataatgtttttcattcagcatagaagcatgagtttcccagtacattaattcgttggagaaccacacgcccatgtaagaatctattacgaattcacccataccttcaacagtgattgagatattatctatttcagccatttcttcaccgtatcgatagcatcttcaaatttagagaatgcatccacagaagtatattcattctcgccagaacgttcatagacccagaatgcatcaaaatcatcttcaataatgaattctccttctggagtttcaatcaagtttctgccgtctttagttttagacacgaaccatccgagtaaaccgatttctgcaatttgttcttctaccatttcagttctctcgctaatagaaaatattccattgaagttcctttattgatgcgatcaacacagaacttctttaatactgattctgatacagtatgaattaaagcagaatcagtaatgatatactcaatttttacaaatgctggtgattttccagcttcatcgtatgctaatcgttgagcgttacgaacatcttcttttgaagcgtttgaaattctgacgctgtcaaacacccaacggctggtaaaaatttctgtgtatagaataactttacgcatcaagatattcctcaagttcttgctcatttaaaccttcttgccacatctctgacggagacggaagttggctgtctagagtggatgaatcaattggaaatactctgataattacgctagtatcttcatcccattgatttgcgagtatccgtttagcttgactaatgtcaggctcagaatgagcccggatatacttaatccttctatgccatacaccggtaggaatagatgcgcacacgatatatgaaatcatttcgctgccttaaccgctttaacatcgcggaagcctttcttacgttgattcttcatcttacgaatagtgctttcagaaatttcaccgatacccggcgtgattggttctacaccaaaggctttaataccaaattcagacagaagataagcaaccactaattcacggatgcgggctttaccgattttttgaccttcttctttcatcgtaccgtgaagctcaacttcccactgatcaagcaaagacggagttacacaacgtccttcttccagcattgcagatactttatcataagcaaaagagttcagtacgtttttgattgcttgggacatattaatttcctcagtaacgattgttttgacagaggagattttaaatcaaatctcctgtagcaaatcaatctttgagagattttaactcttcgagcatatcgtagtattctttactagcaaccggagctacagtacagtggtagctattgaattcatggtatttcacgaagcgttctaggtgccacttaatcagattgttaattcggtgaagtagaaccccatctgaaccaacgtagacaaccacttcaaattgaagcccatcccaaattctggtacggacgatatcacctacagcaaaagttttcatgcgatgtaccaatgttcgttttgccaagactcacccttgtaccagcgagtcatatcatatccattttcgtcacagatgactttgttcttcatcaagaagtattcgtcatcagtaaaatgcacatgctttactttacagcctttactcatagcttctagagcttcttgccaatttaaccagttcatattttcctctcgagttaaacggtatgctgttatccgttgatagggctatagtatcactcatcaactagcttgtaaacaactttgtgaaaggaatttaaaaataaaagagaggtcccataggaacctctaaatgaagggtatagaaatatacataaggtggtcaagatgaccttagaaaggaaccggttaatcttctatgatatctgggtcatgcccagcagcaataagattggttttgaatgttggaatgtcatactgcttaacgttatctataaaaatgacaggataccgaatagcaagcgatggatagcacccgatgcgtttagcaagtgactcaatcaacggacggtcataaaccggttgaccgtcaacctcgttgattacgttatagaactcatacggaagttgcagcttatcgagcaagtcacgaactgctttacatccagggcatctccaaacttcttcagggatgccatagatttctatcatttcatgacctgttggagtttagcagtcagagtgttaactcgtttctgaaattcttcattagataacttttcatctttcttggtaggattaatccaatctgcgatgataataaggacaatgaacggaattgctacgaaagcacctgccgttaatgcaaccaaagcgataacgttagaaataaatttacgaatagcattaatgaatttcataattttccttaaatagtaaagatgaacgctgtcatagccagaaattccggtccaaacagttcagtagccatgtggttcagggtaaacataattttgtaagtcagcatatctatttcctcaatcgtgtgtccaggtagaaccatttcttacccagagtctttggttgtcagaaccacgccagtttttagtagttggcagtgatttctcatatttcccatcaattataacatcgatgtgttgtagcaaatctaaatctttgatatcttcaaacttatatcctgtccacatccagatatctttctccggaaatcttgctttaacccaagaaactaaatttgaaatctcttcccgattctgtggataaagcgggtctccaccggttaaggtaagaccttgaatatacgatttgcttaaatgggatgcaagctctttaacagtattcatagtgaataactggccatttctagcattccaagtagatttattataacacccttcgcatttatgcaaacacccggtgacaaaaagaacgaccctgcatccagggccattcacaaagtcagaagggtagattctgtcgaaattcattgaaccttacctcattacgtgcttctacttctgcatcatatttccagggctcatcagtttgaatagccccagccgataatccactttcggggtcacgggttatagcaattccaagcgggtgcagaacctctttgttgattttccaaatcaatccccattcgctaagttggttccaatcaacttgcttcattggtttctctaacatgttttaccctatgcataatttctttgttcttaccaagattgaacccacgctcagaaggattaccaagatagccacaagtcctacggattgtattcattttctttggatcagtttcaccacaaattgaacacgtgaatccgttttcagtaggtgtcatctcatgagtagaaccacaggaaagacatttatctactggcatgttaacaccaaaataatccaacttctcgatagcatagtcccataccgcttcaagaccttcaaggttgcgcttcatgtcaggaagttcaacataagaaatatgaccacctttagcaatggaatgatatggtgcttcacggtcaatcttttcaaaaggtgacaggttttcttctactgacacatggaagctattagtgtaccagcctttatcagttacgccctttacatcgccaaacttggcttggtcaatcttacagaaacgatagcacagactttcagccggagttgagtacagactaaaggcatagccggtttcttccgtccacttgtttagcttagtgttgatgtacttcaggacgagtttaccgcttcctttaaaagtaagcatatcaaattcgtgaatgccaatatatcctaatgaaattgaactacgtccatttttgaatagctcaagaatttcatcatcaggtttcatacgcacaccaaaagcaccttcctggtaaagaataggagcaactgatgcagtaacgccttcaagggatttaattctagttaaaagggcttctttacaaatatcaaggcgttcatccaatagtttgaacagtttattactgtcatccgaacttttataatttgcatccagagctatcctagggaggttcagtgttactacccctagattattacggccatcaagaacgggtttgccagaagagtctctccaagcaccaaggaaacttctacagcccattggagatacaggagtttctgaaccggtaattgctctattatttcgagcactgatgatatcaggatacatgcgtttagctgcgcattctaatgcaagctgcttaatatcatagttcgggtcttctttacgtagattaatgccttcttctacaaacatcacaagctttggaaagattggagtaattccatcacgtcctaatccacgaatacgattatcaagaatagctcgttgaattaatttttcttcccatgacgtgcccataccaaatgtgatagtcacaaatggagtttggccgtttgaactgaacaaagtattcacttcatattcatatgcctggaaagcatcaaacacgtctttttctgtttttgaaatagcataatcttttactaatgctacttgatatttgcgagcatcacgtacgtgtttagcgaatgtcttctctacataaggagccaatactaaatcgacgttagcaaacgtagttccaccatattggtgagatgctacttgtgcagtgatttgcgccatgatagcagtagctactccaatactcttaggagtttcaatttgagcgttaccaagtttaaagccattctgcaacatacccttcaaatctaccaaacagcagttggtgaaaggcaaagctggactgtagtccatatcatgaaaatggataacaccttctttgtgtgcttccattacagaggcaggaatgacctgattggcgatatgtttagatacgataccagccatcaggtcacgttgggtaggaaaaacacgagaatctttgttagcattctcgtttaaaaggtccttgttggttttattaataagtccctggatttctaattcgatattcattttaaactcttacgaagctgcttcttgtattttgaagcaagttgtgattttccatcactttcctcgtatgtaaacccatgcaattccatttcagcaatcatctcaggcttaccaagacgtgaaaagcgtttagccatatcggcaacatattgcgggtgaatattactgtctttacgattctggcggagatagaccagcaaattctctaaccattcgaggtagtcaatatcttgaccttttaaaccagagcggttgaacttatgcttcatttggccttctgccgcattacacaggttacagagcaagcctctgacctttcctgcattgtcaccttctaacgcatggtcatggtcgaggtgattcttttgaatatcctcatctaaaggacgtttgcagcaaggacataatccgttctgtgcctgatatagtttttctttttcttctttatataacttaccggttaataacatactcttacctcagcgattagataagagtatttatagttaaattaacgagtaactactatagatgttatgattagactcttttatgcagaaagaagtacagaaagcatagatgccttcataatcatccgcattgaactcaatatatgaattagtttcttcatgaagaagactcattttagtccaagccattccattgatgtcatcgtcgtaatagcctccactaaattctactacatcgccaacttcataccaatgactgcgtaaaatttctcttgtaacacgatgaatatcagcgaaatcgagaatttttactgtaatagttttagtaatgcacgatttagacatggcgaactccaagacgttgttcaagtgcgacaatgtaatccgcagctttttgcattaaatcatactcttctgaatcacaattttcctgtccagcaaaggcataaagagctctggtaattggaacgattgcgccttggaaatggttaagtttaatttcagaaatcagaggaacatcttcaccttgaccaatttctttaatttggtgcatcgtatcttcgctgtagaaacaccagaaccaagattcgccgtgtggagttgggtcattaattgtgatgattttatttgtgagcaaatcaattactgctgtaatgccacatgtttcaaggtcatcttcattaactgcattgataacctgaaatttaaatccaggaacaaactggggaaattgttcagttaattcatcatcattttctataacttcaaactgcttaccaataagttccattcactttgtcctcataatcaagtagttcgttaatggtaggttcagaagtattataatcttcttcaggaatagcatcttcctctggctcgacagtttcccaccgagccgcataccaaggttttatgcctttgctgctttgcatggtgccggagcggaatcattaacagaatcgtattcaatacgccattcaacttcagtacgagtaactactttctcgtgacgagtgacgatatctacttcaggaggattataataccaatcggtatgatatgaacctgaacgagactctgataccatgaaatggacgccgcgtgctggataataccaaatctgagaacggctttgatacttatggtcctgtgtccaatctccatcttctactaaaacaaagatttcttcctcttcatcatcaccgttcggtggatattcgaaatcatagttgtcgtcccattcgccagtgacaccagcaatatgtttgatttctttaagcaattcagcgttagtcattttagcctcgcagtttttgtaagtcttcatcgtcaatccagctttctaaaccagatggaagtgagcattcaatttcccataacagttcttcaatagcatggagacgatcaatctcttcagctggaactgttaccattcgtggagtttttaaatcatcaatatcataactcataactcttcctcatgccaagaacaatcaacttcaaaatctggtccgagctcttcatcttcccaacgccaagaccctaatggattaccagcatcgtaatcaacttcaagaccaatataactccactgaacaccatgaatgatatttccttgctttacaaagaattcaccccattggtgcatgaaagcatactgcggatcagatatagctctttcaatcattgctttacgaagattacgttctaaatctacttggtcgccttcaggaaaaacaaactcaattgggtatttcataatttcaccatacactcgccgtatttccatttagacataaccttaactccattagagtaagttacctctacctttgctcggtgattcttaatctgcttaatttcaccggtttctaatccgccatagccgtaataaagagctacaatatcaccctcccgaaggagggttccgcgataatcatgcattgaatttgaatttacggagttcatcaaaaccgccgatatgtgtgccatcaggagcaaaaatctgaggcatagttaatccaacctgcgattcgcgacctagacgacgaagcaaatcactgataactacttcatcaaatacacctttttctggcattacattgatgaatgcatactcttgtttcttaacatcgagcagacgctttgcattatcgcaaaacacacacttatgaatgttgctgtcgtaaccaaaaaccgtgaacatcttcttctatttccttaaatacttgagcttgaacttggttccaatctggatggcatactgctttaacgtaatttgtcataccaagacgcttcattacttcgccatcaattgcagcttgggcaaaatttcttccacgagtcatagctcctttgagtttagaactatcaactatttgaccagtctcattataataaaccgaatacatgagtagcattactcgttcggcttcttccatatatcgtttacgagccattttcagccttagtggttataactaatgttttaccatctaacgcatcgagaatatctttgatgcaattatctggcattggttgaacgctagctaattgcttggcaatatcatcaggaattcccatgcgaggaatatttaatttgctaaaatcaattttatccattagcagttaccgggaagtgttctgccaatttagcagcaatggcagcgttaatttgatcagcgaaattcttattcattgcattaacaatgatttcttgaattcggagattagctctttcaatagacatcttaatacggccttcagcttgcttaacagcgtcatcaatagtttgacgaaccatatcatcaatagcatttttagcgcatgattgggcagcgttacgcatcatctgtgacatttcttctttagcagacatatcattccaaccacgagtatggaacatctgctgaagctgtttcttaacttcagctcgtacatctggaatagttactgttgcaatattaacttcagattgtactgcttgttttagtttattctgggaatcttttaacaccatttctttaacgatgttattgattaccgactgctgaagctgggcacgagcttctgtaccttctggaaataactgtcgtactgcatgtgtatctaatttaatgtcaatcattttacctttttcactccaggaatattagagatagtttcaaatacttcgtcaaagttatctttatcaacggtgactacaatagtgcgagcggtctgtttctttttccaacgtttaaagaaagtggcaagactcaaatcatgggaagtgaagaaatcatcggttttgtaaacatatccgctttcaatttttactaccgcatcaggcgaagggtcttcatattcttctacttcaacatcatcaaagagtattaaagtgtcatcatgataatagccttcccagaaggcttcatcgttataaaattctttccaaagcgcgccagtggttttcatttaatcaccttcttccaagcttcgtgagcagcacacgctaatacttcgtcatcagtcaaattgaacttgccttcattacgacgagcaatcatttcattgaattcagtatcagttctaagcatcatgttaagaactgtaaaatccattgtcgctcgaagatattctttaagctgcatagggtcgatgccactttcgtatgcgtcaagaatcatatctgcaatgatgttatcaaagtttttgtcttttatgaggttattagcatactcgacaaaaaacttagtattagcaccagtaatagttttagtaatcattttaattttctctcaaatttatgcttacaagtccggcatttcattttcagaatatcggttgtccaatcaacaagctgtacttgaatactaccacatttttcacaaggcacaacttgtttagctgcagcttctcgacggtctaccatttcaagacaggcatcccaatcaattttaaattcaggtacaggtggatactcaaactcaatttcaaggtcgttatcatcaacgaccatgtcttcttttaattgatttttcacagtaagctccgggcatactcgagagattcataccgctctttgtactcattaagcgatttgactaaatccgccatcatcaattcatgcttacttaattcagcttcttttgtatcaataaaccgcttaactgattccatttcagctgtaatactgtttttggcaatttcaacatgatttactggtgttaacggaagaggcttaacaacattgagatacatatgcgctacatcttcatcaataacctgtgtgctcaatgttttaggaaaaatcttaaatgggtccaaatgtacttcaagaacagatgagttttcaccctgctgtttacagcatgattttttaactacatccatatggtctaaagcagtacgaacttgcgctaaaagcgcccgggccggatactttccgctggacaaatggctgttaatatgaattcgtacagttacattgtcaagttcttcggcacgaataaatgaaacacccttaggatttctagaactagtagaagatacctggtatttcacacggtcatcgcctttaagtaagcaaattgaacgattaagaatacgacgcaggtttgcattaaattcagagcagaagatttgggcagcgctgcggtcgtgtctttcttcagttttaaacgcccctgccgcaaagctataacgctgaccataaattttagcattgccgatagcaaactttttgagctgtttctctgctgacattgcacctaaccagcgagaacgacgaatgttttctacaacaaaactgacatagtttgcttcgtgtgctgccatgctatttagcacacgacgagctacgttaccagcaattgctacgttataagcagctggatttaaatcatgtaaagctgccaaaacctttacgtgcttctcacgctttgacaagccctttccattatgcttatcaaattcaccggctacaaacatctttaattcattcttattcattatcttttcctctattttggactgggctcaaagagtatctcaaaatctccctgaacccattatacaacaattattcctcaagcattataactttgcttgggcgcttatagaaagcatgagttttatcatctttcgctaattcaaatgtagcagtaaactgtactttgcctctgtattcaaacggaatactttttggaagggagccgtaaaccgtagctccattctcaagtacaaccatcatcttacattgtacgccgtaatagtcttcataaacttttactgacgttacggtaccggagacagtcactcgtccttctggtgcatcccctttattcttattcagctcattgaatatattatcaaagacctcttttgaatgttcctggatagcctctaagatgctcttatgggctctaacttctgccataacaacatccgttccgtcttgcaatttccactctttatatggaacgcgtacttcaagaggataaccatactcacgaagttctttatactcttcttgagttaagcggagtttccaccaaccgtggtcacctgtatactcaggcttatccagtgaatcaaattctgtaacatacggcaagtaactgcctgcgtgataagcttcaacttcacctaattcattttcccaaagataaccatcaaagggagcatgaggacgatcatctttgccccaagtaggagctacaactttatcaaagtattcacgaccgaaacgggtcttcgcccatccagcattcaactcctcggcgcgtttttcaactttcgctcggtgtgcttggcgggctacacgattttcttcaacaagtgcagagataatctcggttaaagttttcattttattctccagtttggttgacgagaccatcttatcaacagcctcgccgaaagtaaactactttgtgaaaaattttctccaaagcagaactgcatctctacgagatacttctactgctcctagagcaactgcttgcttgcgacgaacatcgcgcaaatcatagtgtggaactcgcttatcctggaaccaagaacgtttcattccgatggcttctgccatagcgtgtaactcatcaaggttgtcgctaaacatatgacagttctttacttgatgacctctcattttccaaccatgattcatcaagacatctacgtatactgtcatttctgattctcgatgtaggtttcaatgatgaactgtgctaaacacagaagattatcttctgaaggagaatctactaaattctcaaccatttcagaaatagttccaaaagcttcttcagtattgaacatttcttgaagttcgttccaagtaggtgctttcatttcaatctcctcattagttaacgaagctatcttatcatggcttttctaagatgtaaacaacaaaagggcccgaaggcccttaaaaagatcggaaatcactgttaaaccatggcgactggtgctgtcgctgcttaagcaatttcacttgatgtttcctattgtcttctataagcatcttagaggcttttagctcttcagccaataataactgtttacggtccatcaggatgaggttctgggtcttctgagcaagtgtctgaatacctttgagaccttccacagattcctccatccctcgtttatacttggttcgggcagcatttaactgcccttcgtaatacgcatgtatagacactatagtactaaacacattttacctcaataacatctaagataatatcttcaacgtcttgctcagggaatgccacgccattggtctgcccatgctgaaatactgcttggtacgctgacggcgcagaaattcgggttgaacgttctttattgtcatagcatttgccatcaataaagcgtttaaatttaacttcataggtttttaacattattacaccttagcataattgacgatttgttcacgatcagcgggccaatttaaatcagaacgtttcttgtttgaccacgcaatattttcttcagcccaatgaagtttagccgatacgctcttttgtacgtctctgatggcttcttcaagataaatgcctaaatctctcgggttagttccttgagttttaaatgcattgagcaaaatatttcttacaacttctttaaattgattttcaacttccgggtgaataaattcacgatatccgctgcacggatatccaaaagcatctaccatacgagcagtactaaattctttgttcataatccgagcgcctcgcgttcatcaggatttaatttagccaaagcggcttctttaattttttccaaccgtttacgcttagcttcaggtgtttcttcctgaacactaatagcagcgcttttaggaaaagtccatgattcgccattttcatcggtgaatgtaattagttccgttggcttacgattaactgtaccatctgagccccaccaagactgccccttaactgcttcttcggcaacgcaatatgaaccataataaccaaacaactcactacggcgatcgtctggagagacatacgctgcataggcttcactttctgtcattacccatttcattttagcacctcataacgaataagttcaatacggtttttaagctcttggtatgatttacgccaaggcttataataggcatttaaatcttggtgttgtttatgcatttcgtctaaatgctttactgcatcctgcacatttgcaaggaaagtatcaaatactttattagcgtattctttcctgagctcaatgaacggaggagcacgaaatacgtttaccattacacgtagttcatgataagaagaatggacttcagctaatacatttttcttatcgccaaagttaaacttataaagtttttcacagattgcttcacaggctttctctgctttacccttgggtttacctgcaaagatatgaccaggcggatatactttaatatcgtttaaccaacattcaatatctttaatagctgctaaactcattgtacccacgctccattttcatcaatgtaattaatccactcgttaatagtccaggaagaggtatcacctttaggagtatcaacgatatacattccgcctttaaacaaaacacgttttacatcattagaaattaaagtagccattatattttcctcagttagggaggatttctcctcccattaaaattatttcagcattgttacttcagcaatttcacgccagtttttacggtcagtcgcgacgaaatcaccaatataaagagcagtacggagagatacgttacgcagacgatttacgttatctttcataaattccaaaacttcaataacttcagaatttcttaacccacggttctgtaacatagaagtagtcattattacatcttgaacacgaaccataatctcttcattagtgtgaacaccaaggtcaagataaactgaacgtgataccaaggcttgaagatgcggagcaagtttagaaccgcgctctaattcacggtcaatatcaacgttagtgataaagaccacagtaccttcaaactcaaactcattaggaattcctttatcttccaagaaagaagatgcagtgctccagcatactttacgtttctcccctgaatccaaagcagctttcagaaggttcaaaatatccatatcagagaatacatccacatcatcaatcagaagaactgaatttgcttcacgtgattcccaaagacggcagtataaaccaattcctgagattttgccgttcactgatttgtaatcaatagcgttagtatcatgagcatgttgtaatgctttatccaaagagtaagtcttaccgatacctgctgctccggagataatcagagaacgaatattcccgtggattaagccgttagtcattaatcccatgacgttaaagcgtttcttgatacgctctttcatttcatcaacggattcaacaacttcaattttagcagctactccgtcaattgtgatatcatctttgaatacccaaacaccgcgctttttgccattcagttcaacaaagactttaccatcaccctggcgagaatcttcagcacttaagctatccgggaaccactcaccgagtaactcataagtacctgaaatctctttgccgaagtaaatccctttcttgatggtgatagttgacattttattctccgttactctgttttgttttgatggagctatagtatcaccagctcgcgagcttgtaaactacttttttcattcttttgaaacaaaaagaggagcccgaaggctcctcagttatgcgtgcttgttgatagcattttctgctatacgttttggaagtttacctgcccagcggaagaacatgataatcgctccggcaataaacgcagggaaccaaaagatgagataaaaccaatactctcctgctttctcgatggttccatttttgattagatgcttacagacagaccaacccacgacaaagtaaattattgcaacaacgattggcactactacgctccacagtaaaatcatatttcagcccaataaagtgagaaccggagctcttctccggcccatgacataaatcggtggatttgttttcgagttggtcgagcagagaatttagcattttctctacgaccagtctctctgcaaactgcttccaaataccaccgtctacctttatgaggtcttccgtaattcaagaagaccttcattgtatcatttgtagtaagaattgtggttttcaagataaaccttctcgacgaaatcgtcccagaacttcatgtctactttcttaggcattccgttcttttcagcagtatgagctagaatttctacttcatctactacagactcgagaagctcctgtacttctttgaacggtaactcacctgctttgaccatcttgaccattttagcatgggtcagagggaattgaaggtcaccagtcatatagatttcctgaagctgcagacctgcacgaagagcatgactcagtgctttccagtcaacgccttcgttagcttctgccttacgagcacgttcaccatattcagcatcaagtttctcaagagaatacttcatctctttgatagtgatagtcgtctggaatttacgacccagaacgttataaaacttctgctcgcctgatttgtggtcaacgaaggtggtccatttgaggaattcacctagaggaagtttctctgcgatatcctgtactttccaacgctcattgatacccttctgctgaggacgatcgtcatatttccattcaggaacatctctgataacatccaggactttatgtaaatctgctaaacgagaacccttaacgccatacttacctgcttgcttacggacatatccaagataagccttcatgtcagtggtatagaaacgagctcggttgtcttgaatgaatttccatacttcaggaaggtcagatgcaactaccaattccggtggagtatgcagcatatccaacgcgacagtttcaccgtcagcagcgagcttgaagaaatactttaagctgaacaactcatggtcaatatcgtctttggtatttttggttgcgctgttgttagtattacgattggtgtggttcatcgcctgacacattagaatatcacgcggatgaggtacaaagatttctttaaaatccacatctgactcgggagttgaagtaccatacagatgtgaaccaaaataagattttacgattgttttcataagtaaatatgattccctttagcgaatttaactaatgcattagaacgcttggctgcttcttctgctcgagttttatctgtagttctttttgatgtacggtaaacattaccaattttttgactggtgtaataatacaccacttcgtgggtatggtactcttgtccatcaggatgctgttcacgacaggtttcttcacgcagtgtggtttcatacataggaactaatgcccaatcaattcctgtgctaatgattgccacctgaatgtcaagtctgttccagcgaaatgcattgatatatcctaggacccgtgattccgggtccatcattgcgaatttaatgttttcggctgaagctaacggcatctgtttcacaatgctcatactaagttttttcttagtagttacgatttcaatttccatgacccgccctcataatgtatgtctaaatcaatgttatctttgccgctgtacttgccagtcaaaggaataaatttaaccgtaaccttttcgccgtcatcaaaagtaaattcggcaatagggtatgtagaaattataccacgttcggttttagcacgaaatacggcccgaaggccgttcacaatataaacttgatcattcttcactaggttcacctactgtaacatcaagcatagatttaacgagcgagatgtcatttgtactaaacacgtgagcttttcctttatcgttctggcaaaacatgcttccatctgctgcaattgctagtacttcatagcagttattagttgtagagaatttatcacccactacaagaggaacattaactttacacttctcataaactgtgtatttaaggctgctgagattaattaccgacttggaaccaccgggtaaaagtttacagatataaaatccatcatctgaagactcttttaggtaatcatcgatatacattccacggtaaccatctttaggatatactacagtagttgtttctcggctaccataatcgtaatatactacgattttgctgtctttacttttaaagaaaatcgataccgtatgcgctgagctgcatttgaagatagaaataaattcaacttcaagctcaaatcgattgctttggttatcaaacccaatttctactttatcaccaacctttaagggtttttcaataaggctttcttcaaatttcgtgcgaataaaacgtttcatttatcaccttctacataatcaatcattgggcagactttccgcttacgggcttttaaatactggacaaataccgatggttcggcttctgcaggaagaccagcttttactcgagcaagttttttggtatactgtttctgattgcggtagtgtttaaatttttctaaaccaaaaataaatccaaacgctatagctgcaaataaaagcacaaatgctgctataactactgcgccaactggtactgctataacatttaaccaaagcgcagataaactaatacctatccaagcgagaattcctgtatccgccacaatcggccaaccgaacatccatgcaacagaaccgatgaatgtaataatcgccgaagaaaacacaacatgaagaactgtcgtccagaagtatccacatagagtttttggcattttccacatgctgccagatttaaaccacaggttcattttgaaatgccaagagtttttattaatattcattatcagtccttcatagttggaatcatagttacaagatatttgaccagttcaatagcgtcgcttttatcaatagctacacaatctccgtcacgttcaatttcgatgatagtattatgttcatacgtgtggaataccgtaagatacaaatcaataacatgcgggctttcatcttcaattactgcatcgcctttacgggattttccgtcccatactaatttactcgccatcttttgcctctatcaagaattgaattaatgaatcaatttgtttagtatcaagatgaattatatcattgccttgttttagcacgatacgactcaactttttagtgaaatatgaattcacaacctttacacgcacatcactgtacggattatctaaattggtactatcaagaatactttccataattacctcaattgtgaatcttttgaaccacgacgattataagcagaagtcattacaatgtcccactttccttgacattctacacaccgttgacagcctttaaccaacagacgacgagctactgggatttcctcatcacaatcaacacagaactcttcggattcccgctgttcttggagttgtttctgaagacgggcccattcaatcccgtctgctattgtagcttcgcgagttgcaaatccgtcatctgatgggccccatccattcatttcaaactctccagaatcatttgcaccaaattatatgtaaacatcggatgctggtattgtaccacaatgtagatgataagtaaaacgtttctcattcttcgccatcatcaaagtcgtagtaatcataatcacaactatcaagataagaatccataaattcttgttgacggcggaaatcttcagaaggggtcagtctgtctgcatatgcttgatcatctggatcgctgaacttgtcttcctgaagttctttaatgaactgttcagcttcttcacgcgtccaaaacccacgattaagattatgaaccgaacgcttttcacctggcttgaatacgcccatatcatgagcagaacgctcagttgaataactttcagtttgaccagcatagttttcatattcacaaatcacccggaagaaaggagattttcgcgaatatacaccgcgaagaccgagttcaacatcatacgtgcctgaagcaacaatgtaacgcgttatttcgccgcttttagtttctgtgcgattaacaccacacacgtgataaaagatttttccaggttgaagctcggtggttaacttaatcataatgtttttctcgtttggttgttgatatgtctatagtatcatgtaatgaagggaagtaaacaactttttgaaaagaaaatgcctcccgaaggaggcggagggtattactgcaatgataacaaatacttagtcttgtagcatagacctgtaatgtcatccagaacactttggagggcggcaggaactgacttgtagataccatcggccttagccagaatgaggtctagcatttcaatggtgtcctttggcagctctttctgcgatggtaaagccggtgtataactcttacctgagaatcctaaccactgctcaccaaaagcatctatcaaatctggaatctcgttaaagaaaacttcatacgctttatgtctggcatacgatttggtatcaaaatgcgctgaatgaaaatacgcctgagacgccataagtaaaccgatgaattcatcttgtggagtaagtttaccgtcctttacaaaatcattgaatttcattatcgagttgtatcctcatgcggttagcatattcttcacctgctgaacgtcctaaagaatcgcaatctttagaacaagactcactcttccatttactttgtataaaagaatagaactgttcagactcttgcttactaggctccttaaatttagcataaacttgtagagctccctcaacatacgagttataatccgaaatgtcgttgtgtgatgcagctgggagtgaaatcccgcagcccaacaccagggctaagcaaatgtgattaaaggccatacggcctcctattatttttgtccagtattacgtttgtgctgaagtacagccttaacttctttgaggtatttgtccagcttacgtttacgggtataatctgcttttgaactgtgctgacgaatttcttcctgaaggtgcgaaataccatgcccaatctcacgacgaagttcgtccagttgttctacagtaagattacgaagttgcttttcacttaaatgctgcatatacacctcatcagttagtaatagtatttatataagtatgtgttacttaatcccaaagccattcgcagatgccttgctcaatggttctagcaccagcttcgtcccagttatattcttcgtcatacttcaatgcgcgtttaatttcggctttatgaaatagacgtgggatcggcatagcataacgggtccaacgtagagttttccagaatccatcgcgctttgatttagcaatcagtttcttggcctctagcggtctttcccgattttcagaaatacgcagttcaacatatttctgttgggtttctttatctttctgagttttaacgtattcgttatagcttttaatataagcaaattcgttattattctgatcgttccatttggaagattttactacatgccagcctttacggcgaattgttctagacattattacctcgttaagttaaagtacctcaacgatagtaaaatcctgatttaaaaaatttaatattcatgaatagatgaccttacatttacatttaggacattcaggttctttatttttaagacgcttggtagctgtctttggagcagtgttgtaatcatatacatgaagacaacggtagcacatcacatattttttcatattaaaccatcaacgaaagcaatattacgtacagcaagaatccaactacgaatcctagtactataccacccgctatagcaaataagctactcatgtttaatataacacccattcatattagcaataaagtctttaccctgtgccaatactttacattcggaatcaagacgattttgaagttcttctcgtctatcgctttgaatagatgctgctacacccatccaaatgaatagcatacttaaaactagcatcaggagagtattatacgttcttggcttcatcataagcacctaccagttcgcaccagtgtttacgacaaagagaaacgtatttgtcttcaccaccaagttctactacttcaccatcggtaatagcatttccgttttcgtcaatacgagctaccattgtagccttacgtccacagtggcaaacgcccttgagctcaacaagtttatcggctacagaaagaagagctttagaaccttcgaataactcgccgcgaaaatcagtgcgaagcccatatgccattactggaacatcatacaagtcaacgattttacatagctgaagaacatgttcagcagtcaagaattgtgcttcatctacaaatacacaatgaatatcacgttgtgtttgtgcccacttgaaaaactcaaggatatcaatagattcgtctactgtattagcttcatgacgaagaccaatacgagaagtaacttccgttgccgaatcccgagtatcaatagcaggtttcagaatgagagttcccatgccgcgttctttatagttatgggctgctgtaagaaggttagctgatttgcctgcattcatactcgcgtagttgaaataaagctgtgccattaaagtgtctccataaaatcagaaatagcattcttagaacgaatgagttcatcgtattcttctggtagaccatttccgtaaatggcactaatagctactacttgctcggcacctgcataatcgtcaatcaactgccacagtttatttttttgctctttagtaatcatctatttacctctaacaagacgtatttagcttttagcctcttcatattctaccactgtaatgtcaatatcaggggttgctaaattaataagtttctcaattagttcccaatcaccgccagcaataccagcaccaatctttggaatgtatagaggacgattataaacaatacgaccagaatttagttcatggaatgcattaaaaattgcgccgtaatcaacatttggacctggagcatactgagtatacaaattatagcaatatgcagtgccattcttgtgaatggctcgagtatgagttccaagcttggctaaattattgtcataataacggtcttcatcgatgtcaatatcgagaattggaggatatgctttagcaagttgtcctgctacaccagcacccattgtagtaaagcaattacatccatgagcaatatcgcattcatgcttcatgaataattctacaatattacccttaatatatccagtaatcatttattcacctatggaattttatatgttgcatattcattaagattattgtatactcttaaaaatatagcattgttacaattaaggatagggttcagcactccttgttctttaggatgcattactccgtcaatagaaacgccatcgctctgcattccacatccgcgagcattatattcgacaagtggaactattacctggtcatctttatcttggtaattataaaatgacattagcaattttctactgctaggcacaaatgctatttcaatattgttcttgaatggaccgttgctttctattttagtcccctgcgccgctagtacaggttcaggatagcctgggagcttttcccaggcattaactgaaaatgcgcagcataataaaatagctgcttttttcattttgatgatagtcctgacatataacgagccattaattggtcacgatacattaaacatatattttcgttaggagcattgacacataaatctttcatgctcttagccttacgatttattagtgttgtccactgggccgggctacgtgaatcttttactccatcgctgaatgctgaatctaattcaagcgctaatatatcaacacattcagagttcgtattgcaaaatgttttagcgatacgaagtgaatctgtcattgaattttcagcattagcagagaatgccagtaccaatccaagaagcgcggcgtactttaccattattccacctttatatgtagcattttatgtttctttaagaaattagctttctctaggacatctgacgcataagagtttccccttttgacattccatcctgcattataactagcaagagcttttcgcatattgccgttatgtatatttaaccaatatgaaagctcaatatatgcccattccgcggaattctgtctagatttaagcatttttcttatttcagaatcactaaggtttttgccttctaatttagctctggctttaaccgtaggcaagtaattttgaaataccccataagaatgatgcccctttcctgcttttaaattggctcctgccgaagattctttccatgatatagcagccattatatatcctaagccgttattatcatatcggttatgcggagatttttcctttccggatttttgatattgctcaccaaaattatatgcgtaatgtaagttgtcaagttgaacattactgaaagttggctcagacccaaaggccgttgaacataaggccattagaccgataagcgcttttttcatgtttacctcaattaatgtgtataacttttgtgctgattttacctttcaaacgtttatcattaacgaatgccatacgacactttatactaggtccttttcctggtcttggaatatccatggtaaaccctagccacagatttccatccgtaatttctaaccgcattggcttatactcgatgttttcatcaatgtcttttgggtcaattggaagccaaggcattgctaagaattcattaatttctttaagatgattaggaattttggaaagaacagagaatacatactcttcatcaatttcacgttgaatagcacggtccaacaaatgatcagagtacttagtgaagaaaggctctttaccctcggctttcgcccgggcacgaacagataaattcaaagagcgaaaagcttcctcaaacttacgacgcagtttagttctgcgaatgaatacttctgggttagttgacatagttcattctcctttgtttgtagggccatagtatcatggcccgtaaggaaagtaaactactttttaatatttttcttctggacagaacactgcccggcaagcccacatagaagcttccttcagtttctgttttgctgtacgaatctgggcaatacgttcgtatgcttcatcgagtacctgcttgggttcattggctgactcttggtagttgattaatgcctcttcttcaagagcagtaaagataagaccaagacgggtttcagcgtctttgatagcattcactttaccaattttttcattggtatgtggcttgtatcctttaatatcttcgattgacattatagtgcctctgtgaaagtacgagcgataacgtcgcgttgctgttccggagtcagagagttgaagcgtaccgcgtagccggaaacacgaatggtcagctgcggatatttttccggatgctcaaccgcgtccagcagggtttcgcgacgcagcacgttaacgttcaggtgctgaccgccttcaacttttaccgttggctggtattcaatttctacttcacgcgccttgtagccataaaaagtttcagcatccgtaatagtatcttctttaagaacttttgaaacgattactcgtgcgtcatcaccatcttcgatgtaaatggtgcctttaagttcaccttcaagaatttgatatgctttcatatttcctcttaattagattctttattccaaccacgcatgtacgcggtaattacgtccatagtattccactcagtagaatggaacttggatgcagcctgcaagtacgagattttaccttctggcattaattttacccgtgctaaacgttcagaaatagcagcgtctttccatgtagcaaaacccgttggtccttttaattcttctttaagacgaataacttctgcttctaattcagattctcgccataagcgttctctggcatcattagcataaagtatttcttcatcagtttctttatcgtactctacaatttcaataggctcatcaactccatatccacgagtgcctatatacgttgtagcttcttcccactgttttgtggcttcattccaagttccattctgatgagcttcataaaaatcttgctcaccagaattactgaaccaatcacagaagctttcaactaaatgtggaggacactttataacaatttcagccattgcattgttttctcttgaatgcgttggtcatatgtgattaagcttgaactaatcacgcctttgagcttgccagatataaactcaattctaaaattaggatagcgattcatccacttcgtgttaggagcattagaaatgaattctgcacctttaaacggaccagacagaaacttgtagcgcttgtactcaagcaggtttccagccgtaaccattgttattaattgcttcatatcggaaaatcctgtattttccattactgtaatcatatcaacaatttctgtctgtgtcatcattgcattcctatcacgaaaaataaaggtaaggtatcattaggcatagaccatctgatagcttcctggtacatatcatagaacttcatcatatcgggaactttcattggttcttcaatgataattaatgctcttccaaactttcttcctctaaacttataagaggaatcattggatagaaattccctgattgtcatcggaacaattgatttagctatctcgttagccggtaatttattaattaaatgcgatgaattatattctcgtagaataccttccatcagttcagatgattgtgtgtatcgagtagataagattataaccgaaccatcttcaagcaaccaatcggtagcgaattggcataaggctgcggtctttccggtttgtcttccaccgtctagacgaagggtaccgtactctcgcataaggcaagacggttcataaaaactgtagttgggattattcaatcgtctgtctgcagcgtctctgaaagcatgcatcagggtcaaataaatgggagttaagtgtttcattttagattccagttaaaggggccattccttggcacatgtttaatccatcgacacactatgtaaaccccttaccgcacttgggctcgaccttattacaggtaggaaaagctacttcactcagaggactcgacgttcatgaggagaggtcgtgttcggctttattaggaaattgcttacttaattgatttagcgtaacgaatagcgccgcgatcgtttacgaatgcaattttaccattacgcatgtacatggtaacagtacgttggtaaccgttagaagttttgccagactgataacctactaatgcaaagttatcttcaccaggtttgttctgcttagacttaatacgctcatgaccaaatgccattaaggagcgtgcatcgccagatgctactgctttgcgagaagactcatcttcaatagaagaggtgaaatcatcgaatgaatcaaacttagcatggctcttattatataacttgccgtctactacgtagttatatccaacaacgtccatttcaatttctgtaccatcttctagcgtggctgtcatcttctgaccttttttaaatttcagaagattacttccaacagattcagtcattacgccaactgttgctaaacgggattcatttaaaaattcttgataagttttcatttattttccttgataagcggcccaagttccggtccgcatagtttcaattacacgacgagcacgattaggtgtctgacgataccaacgtgaatttgccagttctttggcagcagcatcccattttttagcagctaagagcttcatggaagcagggaatccagcgacaccacctacacccatttggaataccatgttaattagagctgctctacgaacatcatctaatatattatataccgggcttaatgtagcattagccacaatgcccttaattgctttttcaacatcctttgcaaaaattacttctgcctcagcctgggtaatttggccaccagtagaacgacctacaagcttgtccaggttagaaatagccaaagattttgacgggtctttagtcagtaagtggccaataccaatagtccaatacccttcggtatctttataaattttgctatcgtatccttcatcaatacgcagcatgccaaaaatatccataaggacctcctattaattataggagtatttatttggccctgcacttggctatgaataattcaaggctacacttctcgtatggtgtccatttacctttccaccacacataatctcttctatcgtcctcgggcaattcactaaatcccggatatagctgttctgctatataatatgctgattttgtatactcgccgtcaccgaagacataccgtgacttcattagtgtacgtgacaacttatctcgaggatgaaatatgctaatccatcttccgtcacgaacaaatcgtagttcatgcttataaatgtgtggaatgcctaattcaacagcttcttccatagtaacctcactgggctgtgctatacatctgtgtcatgattttatacaaacttggtcccatcacatatttccattgagaaggtttaattaaagcaaatgcgtcgatttccgggaaagaaattccattttcatctttatggtaagctgtgcaacagcaattcttaaacacttctgggctcacagggagcatatatccaaacaaatggatatccttattgctggcataatcatgtcgtccgaggtcatataagaggtcctggtcaaacccagtaaaccctgtttcttcctggcattcgcgaatagcagcttcttttggtgtttcaccaggctcaacatgtcctttcggaatatcccatctagagcctctgccctggacatatgtatttgtcatacgacccatgaaaagccgtttgtcatcggtaaagaataagattcctgcactgagctctttcattggcattcattccaactttcttcaagaatatcttccatggcagtatagaccatagactctagtacaccatcacaattatatgaaccctctaccgagaaatcacagataggtccattaataccaagcagttcttctttaagtgaaatctcgataccgctcagtgattcattatcgctgtaacacagaaggcgagtatcaccattttcaaattttacatgcactgcaacagccattatttcatctccttaatccaggataaagtttcattacgagaatcatctttagatttttctttctttactttgggcttatcaaatacgccccgctgtcgctgggaaacgaattgcaaccaacgagcaagcattgcaaaccaggttccaacccctgacatccaacctagatagtacagcgtatcaccaaatactggtgaaaagaagtagaacccccagaatatcccaacaccaacaaatgttgagaaggaaaacaggataagcagaaataggaagaaatacaagaaatcatcatctttaatcattccacgataacaagttttaatcattttctgcagctcctaatccaggtgttgaaatcttctttttctttccacttcttgtatttcatacggtaagctaaaaatgtgcagcaattaatcaacgcgataattagcatccacatgaggctgaatgcgaaaacacctaaaaataaaagcataatcataaactctgagacgttcaatccaaagaatgtccctccaacaattacaaaagcacaatataaaatccatgtcacgattccaaaagctggcgccagcccatcttggttccaaaacccgtcaggtttacattcattcattttcttctcacctctttaataaactcaaacgactttttgcggttccattcaagagttaaattcttgcactgttctttccattcagctttacgcttataattattgcgagaccatttaacccatcgggaacattcaattaatcccatgatgagcaaactagttccccaccatgcaagcagaattccgaataacactgccggtgtaatatcagttaaatgcatgatatcaatcgcggcaaaggtacacattgcgccgacagttgcaccaataccaggaacaagggcataatcaatctgatcaaatttatagacataattataaacgggaggttcacttggcagatataagttactcatttctgcaccctctcacggcagtatttgataaattcatcaatgattaattgtttgcctaccatgttgttagagtcaaacatacccatgacttttggtggtaattcattaacacagtaatttaaataattgctataatcatcctgagatgtcacgtatttaaccagattaataccgagacgataactagttttattatagataatctcgataactactgtatatgttgtggagctagaagtaaaatatccatcggcattagtacgagctgatgttagatttgatggagaatcgttgaaagaataaattccgtaccgaagtgcaaagatatctacaagcttaactccgtcggaaatagacgaaatattagaaattaagtttttcagcttggaatagtctttaagaacgatagcccgcggtaaaactgtggtgttatacccgttatagcgagttttccaattttcaggccgagtatcagaataagcaaatttctcaagaatatcagtgatttcttttgggaatcctgctgcaattaattctttaatttgaggtgttgccattggaatatctccagcgcattcatataacattttattatccaagttaggggcccgaaggccccgataaaattacttcagactttccagatattcctggacatcagcagtggtggtttcaataccaggctgagtaccgctgaaggtttcaactttcatcatgatgtcttgtacatctactttagcgagttccgcgatttcaatcacgtcatcagcagaggtaatacccagagcagaagcattacgggtctcacggatgtattcgagtttcactgccaaatcaagacgttggtcatcaagcttaactacggtttcttcaatttgggcccgcatttctttatattcggcagctttatcacgtaaagccttagcagtacgacgatacagaagacccagtttagcatgggtttctacattcataccttctgccatcaagcgacgaatttcgcgctctttggaagcacctgcctggtctttttcgtcagcaagtttcagcagacgcttttcttcatttaccgatttaacatgcgtggtacgcagtttagtgatttcatcaataatacgatttgccgcagtggtatactggtcttcaacagaagtgttctgtgcaacaaaggtaccgaatttagaacggatgaattcaacaagttttttcagaatagacattttatttcctttcaatagttatggtggttttattcgtacggattaatccaatcataaacatatggtttaatgattagaccctgttcatttttgctgcgctcgaatatctcgatgtaatcagtaacgtatgactctaacccgagaataagaacagtttctttgccttcttctactgttgccttaattaggcgctcgatagctattttagcttcaagacgtatatcagcaagagtttttggaactatatttgctgtatccattactatttcctcagtaggtggggagttcattataactccccaaaattattagcagttaattaccgcttcaattcgtttggttaaagcactagcagtttttgcgaatttaatttgaacagtttcggtagcagcttcttcatggtaaactcgaacgtagtactcttcaacagcaggccaatctttgcgaacatgcttaatcaaatctttcagttcacgagtttctgctacgttgaacactgcgtgttcatgttcacctttaatccaaatcgcgcgataacgatcaggagtaccgtaattgttataaccacgttcaatttggataaagttgaatttagacattttattctccgttactctgctttgttttgatggagctatagtaaccgagttgatagaggaagtaaacaactttgtgcaaaaattttagggcatctggaggaactttctggaagttagaatggatttatacagccggggatacaaaaatgccctagatgaattctagggctgtaggattacattttattatacattgtacgataattctgtctgacgactgagttcaacaaggtgatgattcagtttagctaaaagcgttttcacttcaccgatatgctgagtttcacgtgcagaaggtttagcaccttgggattcacgatacttccacagattatcgaaatagaattgaactgccttataaagaggaccattatctcttactagcggaagagctttatcgatagctttaaacagttcacctgaaccaatgatgtctccatggtctccactaattttaaggccaggaatatttttaggtttcgctttaaccggagccggttttgcggccggtgcttgtgccggagaagctccacgtgcaggtgtagtaacctttccgcctaaactttcaaaggcagctgctaccttagcatagtctttaggatcgctaatcccaataccataaatcttttccacagaagccgcaaatttgctaaaatcatggcgttcaccacgtggaaccaataccagagcgtcacgccatttcgatttagtcatgcggccaggagctgcttcaaaaagctcttcttcggttaaaaaatctttaaatttcattgcaaaaaaatccttagtgtcgattaaattactatttatactaaaaagccccgtccgaagacagggctctaataatcgacagcatcacccactggcagatgacctgcgaaattcatttctttggactcggaggcatcagtctcatccaaagaagtatagcgtcaggaggttatgcttgcgacagtgaacaaccgactagcggcaatggacgaaccattctcttctatctgacgactcaacgagggtatacgcaagtttcccttcgaattacattacatcgtattcttcaactagatactgataataggaatcgtttgcttcaagttcttccgcatatgatgttgcttcggatttagtgtgaaaaatcttaagaggcaaagaatattcttcatagccatattcacagttccagttattttttactacagcatatactttcatattttcctcattaatttttggtatgggtaggaatcgaacctacaagccattcagcaccagggcctcacgctctacctatttgagctatcacataccagaatttggtgccgattgcaggagtcgaacccgcggcatcttcattacaagtgaagcgctctaccaactgagctaaatcggcatatttggtgaagaattacctacgtcactaggttggctgttctgtccacttaaggcttgcagcaggaacaccatggcttttcaccattgatcctctcacgactgagacattcttcataatttggtgcaccgagagggattcgaaccctcaatcctcgcggcgggagattttaagtctcctgtgtataccagttccaccatcgatgcgaaatggtcgaggcagaaggattcgaaccttcgacctgcggattagaagtccgctgctctatccagctgagctatgccccgagattgttcaggcaggacttgaacctgcacgactgattccgtcagcgatttaccaccgtcgccagcatatgatgcaatatgcgagctcaaaaggtgtccgtcaccatgtctaccgatttcaacactgaacaagataattatattactgattatttatagcatttcttaaacgataaagttgattacagaattcgcgttcagtcaaaatcgtttcagaaattttatttttacccatactgtgagtgagcgtagcattccgggtagcagccaaagcttttctgaatccttcatttttactaagtgcatcgtatgctcctgttagtaaattctgatacgcttctgaggcacggtgaataggaacacctttccaataaagtgtttgagttggccaccaccgtttctttttacctttgaacttagccgatttaccaactaatgtacatacatgtgcttgcatttcaggcgaagaaaatttgagggactgcaagaatccctccattgaggcacattctacgccatcatagataaatttatgaggagcaaaattactcaaagcacatgatggatatgaactacctgaaccaatatccattacttttccttcacgtatttcaaccaatcaacttttaatgggctttctttctgcttatacgtaattccaatatggaatgcaaccggagcatcaggaatacgaatttcttctttaatgtcaaagatttctactttctcaaatactcgcatgaaatcatagtcatattcaattggattacctagccaagcctgaatagcatacataacttcatttgaacaagaataatgattatctaaataagcatcaaactcttcgtctgagcaatcatatgcaggaacatcaacaccaaagaatttcttggaaaattcaggagttacatacttctgttcagtatgaagcttttcaagaattgcttcatggttgtaatcattatttccaaggtattcaccgcggcgaccattagaagagaaccattcaagaacgtgaattacttgattaatctcttctttttctaagccataaaccatttgggtagaataccgatcggcatcattttcccaagtggtaattgccattgctaagcctttaggaataacttgtccaaatttaatatgcatttcaatttcctcagttgataatttggtgaccctggcaaagactcgaacatgcaaccaatcccttatgaggggaacgctctaccaattgagctacagggcctttatagaaatcttatgacttttataaaagccctccgaagagggcgccttgtcgggctatccacctgctaggcagaattactcacacataaaatcagctacttcccagaagtcattttcaactgctactttaactaccggagaaatttcagacgttttaatagaaacaattacatcacctgcgacagtttctaccagaccaacgattttctcgctgcgagcaacaaatttactcaccggatggaatttgccggtagcagcgaacatagcttcttggtcaacaatcagtgcgatacgtttcattctttttccttgtttgttttgatgtagtaataataacaggttattcttgtagcattaaatctcgaaaatcgttccgttttcccacattgttgcgaacataggagaaaccttaacgaatgatttgcttcgcattgcaacgtagtcgttatctactttagccaatcctgaagcaatatcagtaatacgaccgcagcgcatagaaccacgaccacctttattatatgtacgttctccgtagaaaacgatatcgccaacttgtacgtctcgacctttagaatctttcatcatatttcgcctgataaattcgtttaaaatcagtaattagctcttctacatttgaagcattagtaaacggaataacttgacgcagtttacttactttacagccagaatgataagcaataacttcttgaatatcacgctcactgaagtactcatatttgattaatgcttcgtatctgcatttaatccagacccacatacctttgcgttcatcaaaagtatatgcaaaatcagcatgaagcattaaatcacgttcagatttacataatcctaaagcaaaattagttggacgattccattgtaatttcaccgtaatagcatttactttattcgcaacaccaataaaaatattcattctatttccttcgcttgtttttggccttcttgtcgtgcacgagaacgtcctgctttatgcagtgattcgtaatatgctcggcgtctatcaatgttttctgtacgatatgctttcccgaaatgggatgttttgaagccgtaatatttcataatataattctcaatggcaagcgattggacggtatgcccggcctcgaaccgagtcacattgactttgcagaatccatgtgtttaatatatcacccatactcgatagcatatctgaacgagactgcaatcccgctactcagcttacgccatcttgtattgtgtcataccgttaatttggtctccatagaatgactcgaacattcgacctctccatcccaaatggagcgctctaccagactgagctatacggagtaatttggagcatccaaagggaatcgaacccttatcaagtgagtggaagtcacctataatagccgttatacgatggatgcaaatttggcaggccctgaaggaatcgaaccctcatcactgggtttggagcccagcataatagccgttatactaagaacctgttatttggtgggagtaactggactcgaaccagtcaccgctcgattatcggtcgagagctctaccaaatgagctatactcccatggaaagctaatcatctgattgttgatgtaccactgctatgggcagcgtttaactttcataaatttggcggagagtaaaggagttgaaccctcaccgtttccgatggcccggatttcaagtccggtttgctaccactagcgctactctccattaattggtgaaggaagtgtcatatagacacaattcgcttagcgacagccacagcgttttgcggaccgtgtatttttccaccattccttcattgttggggtgaccgatgggagttgaacccatgactacgagaatcacaatctcgagttctaccaactgaactacggccacatcaatattcactccatccatcatgaggacttcatacgaaattaagagaagaatgatcagttcaacccctgtagacgcgttgaatgaatattaatttggctggactatctggattcgaaccagagataccggagtcaaaggccggtgacttaaccgcttgtctatagtccaattatttatttactaattttcttcctttataccatccttctggtataggggaatcttttgaaatctttttagcttctattccattattaatccacattgtgccaaattgtgaattttttgaaccggattgagctagtttcagtttatcagaaatttttcgtttagtttcagaagagtgtgttttacctaaaaacggatttccatttttagctatattagctttaactgcgtctgcaatgcgggaacgtgcatctggtgtaattccagatttaatcttatccgaaaaattcagtttaaatttagaatcatttctaattttattactggttgaatttcctccaagtattcctcttgctttcatttttgacggagtccaatatgttgagttaacatagtcaaatccaccttcgccaccaagttttaaattatatacgtttcctaataaaaattctggtgtaactatttcagattcctttaaatacatctcctcagatgattcacaataatgaataacttccttggtaaagttctcaattccgtattttagaattgcctttttaattaatacacctgaacccatgtagccatcattgatgtcatcagttttatgggctccaacataatatttaccatttacgttattggttattttataaatcaaatagtacataaattattctccataccaactatgtgataattatatcacatggtacggataaagtaaacaaaagaggcggaggcaggactcgaacctgcgcgtgtcgggatatgagcccaacattctaccaactgaagttaccccgcatttatccgggttcttgaagtactaacaagtagcttgatgtagaacacgctaaagatataatcttacgaatatagagcttattccgtgggaacaaacagcttcgtcctcggcattatcttacaggactcaaactcatcttcaagaactgccacgttcttatttggcggacctaacggggatcgaacccgtgctctctcccgtgacaggggagtattttaaccaactaaactataggtccataattcgctttcagagatactctggcacgatgccgaagcaaaggggaacagaactctcatcaccttggtaccagatgaatcttgtttagcactctgttctaagatgtatccctgaaagcgaactttcaacgccgtaagaaattataagcacgtagttatcgttgagggaactcgtacacagggaattctatgccgacgatttatcagaacgtcttctgacttcttcatttggcgggccgtgcaggtatcgaacctgcctagtcatttctgacacggattaacagtccgtcgcttaccctctcagccaacgacccgaattggtgggacaccgaagatttgaacttcggacacccggattaaaagtccggtgctctaaccaactgagctagtatccctaaatttggtggggagtgatggagtcgaaccacccgagccttttgagcaacagatttacagtctgtcccgctacccctacggtctaacgccccaatggatatttttatttatactgccctgaaattaatcagagcagttgatagattaataataacaaagaaaacctaaagcatattacacaatcggtgagctctttgatttaaccaggaataccctatgcggtgaatccatatgagagagcaatacccggtgctcaggaattggacttgtatggaacggaaccacacgataacctttaggcgtaaatcctagcaaaataccaacgcttgctgcagaaagtgacccgccgcaatagtatgataccaaatcaccaggctggatttcattgtcaagagaatcagttttgacatgcttaggcgtaactaaatcattaggaattggaacgccttgtgcatcatagtattcatgggcaagaagcttataattctcttgatagaaagtattaaacgcagctctgatattcatcacaatttcctcacaattaatctttgtatgcttcagttgaacctttagcaacggtctcaaatcgggaattcagtatctcaaaatagtcttgatacgttccctggagggcttcatagcattcttctaccgtagagtagacacctctgatttggtcagagccaggagcaggataataattagaccaagttaaaagtgcgtacattacttacgtttccagctgtagtgagccaaaataagaagcactgcaatagcaagtagtgatgaatgcagtgctgccagtagtgcacctagtcctacacccaaagtaacataatcatacttagttacttcttcacggtttaaatcatagtttttgatgaaccactgcttaatctttttcatgtgctattttatccattatgaaagaaatgatacccattagaaatgcaacacttaacactgatactgtttcaggaagagacataaaggctgcacctataatgccaaaacctaatgctcccatgcagattgttgatgcaacatttctaattaattcacaacgtttcattttattctcctcaagttgatagggttatagtatcactactacaacccgttgtaaacaactttattcagcgccagcggcttttaaaagctttttaagattagcagaacctcgggctgaaaaagttaccttaccatctttttcaccgatgctgccagtcaatttagaaagtttatcactaggaacttttttaaaatcggctaatgtcccgtcaacggtttttgtaacaatcggcagttcatcatcctgtcttttagcttctgtaataaattcttggtacgttttcatgttgcttccgttttgttagtttgtttttgatggagctatagtatcaccactaggaccggttgtaaacaactttgtgaaataaatttctatttcaaatcttctgaccagttcagttttagtggctcttggtactctctatcaagcactacaggtacttgaacttcaccctcgaagtgagctggaccgacattgtagctgagagtaatgtgcggtgagtaatctgggaaatcgtgagttgctcccagagctcttgcatattggtgacggaattttaagtattctgaatctagtttaagaactagtgtacgtccgtcttgcgtgtcccatacttcaagtttacctgatgtagcaacttcaaaacttcctgaagcgcaaacgtatggaacatgaactcttgaatagcatatcgtcgtatgaatcttatgacgaggtacaggattagggaccttcaactcacgctgaaggtcctcaatagcatcaagagttttctcagagaatttagcagctacatatagaccagtgctaaaatcactgaagttcattaggcatcagcttcttcagtagtttcttctgcgaactgtgcttcgatttttgcaaccaggtcatcaagtttaacctgaccgtcttcactgatttcaacgccggacacagcaatcagtttctgtagtacttcttcatactgtgcacgcagagcggacagaccttggatggtttcagacaggtcaaatacacgaactttcaaagtatcgacttgggcttgcagttgttcagtagtcatttttgaattcctaatatagtgttgatttttgaataaagttcttctagagaaccgtcgttagttattacgatatcgccttcgcgaatcggaagtccacgctctgtgacgtgagtatcttttttagaaccttcttgctcaggacgaactacatgaataactgtagcacccatcgccctggctacatcaagttcatggtcttggcgggtatctgggacaatgaaataatcataatcaccaaaagtatcagccataaccaaagtgaatcgtttcacccaatacatgcgatcgagcttatcacagacaatgtcagtcccaagggtctgcatgagacgacgaattgaccatggctcaacaggtttatttattacaacttgacggatgacttccatcgtatcgccgtcaagaattttacgcttgctatcataaaccaccccaggtaaaggcaaatcatgatggacatattcaatagcattcgccataatacgaatcacgtctttagtagacagatttaaatcctgctcacgatcgtaatcaataccttcaatcattgaccgagtaatgcgaggaaactgacgtgatgtatcgcgataccactcagtaagcattgcatcagccaacgcatctttaattggacctgctaactgatgctttgttgcgttatagttatccataatgtagtcagcagttgtatctttgccactacgttttttaccaatcaaaaataaaagcttcaaattattacctcatagaaggatgcattcccataactttctgttgatactgggattcgcgagtatcattgacagaaggtctaccagtaattattataccatctttttcaacttcaatgtatttgtactgcaaagttgctacacataccattgctgggtcggattcttcggttaaagaatactcaatttcagataaatcactcacccaacctccgatgtagcggacagttaatactatatcatgtttatcgttatcaagaacatgcattaaaactgcaccaggaaatccttcaccgccgttattccatccagacttgtctcggtcaatgtagttttgacagcttaacatccatttgtacatttgtacccatgaatcaagattttcatctactaaaaatctaacaggaacagcgtcaaactcaaaagtagacccaggcaatttagcacgatgcatgccttgaggcgaacctacagtatcagtagcaggaatatgaattccaggaactacagctgtttgaagattagctttaaacgcttgggtgaggcccccatcagggacctctaatataaagttagttgtgttagtttgattaaacagtccagtagacattatgatttccatacagaagtagcagagtagcgtttgcctttcgacatgaactgctgcagtggtaacatgactacattcgcccaatcagccggttttatctcaattaaagcaccctttatattaccaggaatatatgctttaatcattttgtcagcgccagcaaatcctttaacttggctccagtttatctttaatctggtcttattagatatcactggcgtattagcatactgtttaagaagttcttctaaaaactgctgacgagcctttggcggaatgtagtgaaggtttaacccatacatcaatgtggttgtaccttgctttccaagaccaagataaactatcaaaggaaatttatcccagaatggaagagtgtctttgtgcttagcgtcatacatgtaagcatatagctttccaggttgaggcttggttacagaatgaccacgtatatttttctttatagtttctgcaaaccatttagcagatttattgtttactgctgcgccttcattacgaattttatctttgatagagcttcgaaatgaatttaccatcacaagagcacgctcttgtttggtcattttgttagcaggttttttctcaatttctgctactttaattgccgttttaattcttgatgcatgacgagccattgctttactgaacgtagcaggatttattcctttgctttcagcgaatgatttagacgtcatgccttttttacgagcagcagagtattcaactcctaatgctacccattgattttcactacgggatttagctttaggcgattctgcagcttcagtgataaattcaaatatagccatcagcctttccatcctaattttttaagtgaatcttcggtaattaacctaaattctatacccattttactggcagtagcttgagctgctttccacttatcaacgtttacagaccaagtgtaaatttcatcaatgtaccgtttcttcgctgatgtcgtcaactttgtgggtttgaccggaggtctagtttctttctttggcttaacttcaaaaaagaactgttgaccattagaaaacttagcccagaaatccatgaaataccggcgtttctttccatctgcattactaaagtatggaattaccacgcactctgaattccattggactacgtctgggtgattatctaaccaccgcatcatgaaattgctcccaagtagatcgatatgtgatcttacgagggtcccccttatatttacttatgttttttggtaaaaattttccgctataagccattaggcttctccttacatttatcaaaatgccagcacttcattccacgaggttttcctgatttaccacagtgaggacatgttactataggctgcaattctgaaacagctctaagctttgctcgtgtttcttctgatctcttctttccggtgttagctaaatttaatttagtttggtgctctttagttctatttttggctgcagtagacatatttttcttcatggtatcactttttgaaatacctgtcatagaaatactgcgcttttcatttgattctagcgtctgagactttccagtaagagctgcagacagtttagctgaccactcctttgaccttggacttcgcttctttcctgttaatacggcagagttagcaatagaaacccttttgcgaatccattcatatgatttgttatttcttcctgctaatttagaagacattatatgaactgcatatgataacttatgattatttggataaatcttagctaaaagctgatgcgccacataatgctcagctgctgttaagtccacaaggttatctttatcatcacttccacccatgcatcgtggcacaatgtgatgccgttctttgtacccttctaaattgcgggatttgcctcttgcaattagttggtcataaattttacggtaattcatgctattctcctaagtagttagtagggtaataatatcataaaccactcgtcatgtacactacaactttataaatactgttattaatatttataagaggataaactatgctcttctcattttttagtccgatagattattctgcaaagaccgtaaaaggtgctaaggcaaaagctatcccaaccgctgacatatttcgtaattatcgcaaatatttcgacactgtagcagaaaactatcttttacaaacatattacataagtggagctcctagaccagaagaattagcatatattctttatggaaatagtcagttgtactggattcttttaatgtgtaataacgtatatgacccgtttagagattggattaaaacccaggatgcatgctatcaatttgcacaacaaaaatatgcagatgtaggtggagaccaaatactctatcacgtggatgcaaacggcaatcgttattataacctcgagcaatatcctgaaaattcaggcatttggtatgataaaggggactttaatcatcagtaccctcaatatactggggctttagctggtgttgacatttatgaagactctattatagaaaatgaaaaactgcgccaaataaacattatcaatcctagtgatattgaagcatttctttctgatattatacgagaaatggaaaaggctcctgacagtgaatatgaatcaggtcgatataaatcccagaccacaattggagaagttgtatgattgaaatgaatgattcgttgaaatggtttaccggtgttgttgaagacagacaagacccgttgaaacaaggaagagtgcgagtacgtgtttatgggcttcacccatttgaaaaggtgcaaggagctataacaggtcttcctactgaagaccttccctggatgtcagtgattcagcctaccaactcagctgggatttctggagttggctcatctataaccggaatggtagaaggaacatcagtgtttgggttatggcttgatgaattcaaaacagcaggactagtaataggaacatattctgcgcatagaaaaacgaagccaaactacacggaaggcttttctgatcctacaggccaatatcctagacaggtcgggtcagataccaacccactagttcaaggcgatgaaactgggtatagtgctataccaaatatcattcaggacagaaatttagacattggcattaatcctgatgatgctgacttaagtgatattcctgaagacccaaatcctgcaattacaataacagatatgcttaatagggatgaaggtcttagattgaaggtctattgggacacagaaggatatcctactataggtattgggcatcttatcatggcgcaaaaagtacgtgatatgtctgtcattaataaaactttatctaatcaggttggtcgtactgttacgggaaatcccggtatcattacaatggacgaagcagtcgcgttatttaagcaagaccgcgataaaatgctttctgatattaaaacgaattcacgtgtaggacctgtatatgctaaagtcaacaaatcaaggcaaatggctttagaaaatatgagttttcaaatgggtgtaggtggtttagcaaaatttggtaaaatgcttgatgccatgctcattggtgattggaaaaccgcttatacagaagcaagaaactctgtttggtttaatcagacaaaaggtcgtgcttctcgtgtttccatgattattctaacgggtaatatggaatcatatggagttcctgctccaaagccagaaggaaaaaacctgtctgctgcttacgtagaaccaaagtctggaggtaatcctgaagacccatggactccggaagattcaagaattcttttcaaagaacctgagtcttcatataatggtcagtatccatatgttcacacaatggaaacagaatcaggtcatatccaagagtttgatgatacacctggctatgaacgctatcgtattgttcacccaacaggttcatacgaagaagtagctcccgatggacgccgtaccagaaaaactgtagccgatttatatgacatgactcagggtgatggaaatattttaatctctggggataagaaggttaacgttggagggaacgagacctattataacatgtataatcgtcgacagcaaattgatggcgataacacgctttatgtacgtggaaatgaaactaaaactattgaaggcgatggtactatttttgtcaagggtaacattaagatagtcgttgaaggaaatgctgatatccaagtcaacggtgatgccactactaaagtagatggcaaccacgacgtaaccgtcggtggtaacttaacttggcaagtagcaggtactgtgaattggaatgttggcggggcttggactgagacaatggcttctatgagctcaatcgcccaaggtcaatacactgttgatggttcacgaattgatgtaggttaatcatggctgatatacttcctattaataccacgttacgcgaagtaatagaaggtgaatacgttgagcagtactttactgctcaattatctaccaacgaaacattaaaatcaataaatattatcgactatcaaccagtatctgatatctctgtgtctgaaacctattataaaggtaattataactcagtttttacttttggaaacgatgtgcttaaataccgtgaaggcgatgagctgaagtccgcttcagcgtgggaggatttacctaatcccaaaactgctgatttatacctgtggaaagcccccagaacactagagaagacatttacctatacagttgagataatatatacagtgacagaagaatcgtctggaggttcatccggaggttctagtgctccaatcataacagaacataaaaagcaaaagatttactctcaaacagttaaaggcaactggagtagatggggcgaccagcttcgtgcttatgtatatgcggggaactaaatggctggactatcatttaataaatgcttaactgccgggcatagtgcgtatcctccgacagaagtaaatgctacacaaagtaaagtattcactggtggaatagcggtattagttgatggcgactcaattaccccacacaccaagacggttgaccctcatgatacgcatggaggagttgttcaacctcgcacatccaaggtatttgtaacaggcaaaaaagctgttcaaatggccgatccaatttcttgcggcgacactgtcgcgcaatcaagctcaaaggtattcatacactaatggctattaaagaacctttaaattatcagttaacgcgtactgcaaacgctatcccagacgcatttactggagcaacattcgacgaaattaaaaatcagcttattaactggcttagtggtcaaaaagagttccaagattttgattttgcgggttcgcgcttaaatgtgctattagatttattagcatataacacgctttacatacagcaatttagtaatactgctttatacgaaagctttattggaacagctaacttgagaagttccgttgttcaagcagctcagcaaaacgggtatttgccaagttccaaatcagcggctactgcatctattatgcttgaggtaactcatccaaatccagagccagcaataaaaatacctcgtggaaccaagtttttagcatatgcacgagattcatcagtagacccatacaactttgttgttaccgaaaatgttattgctttaagagatacttcagcaccagaaggagttaataggtatcttcctattgtcaatttggcacaaggacgtattattcgtactcaattgtcatatgacccgaagaaacctattgttattcgtgatcagtcgattgaccgtaagcaggttaagctgtgggttgatggcgctgaatggactaactggacagacaggtcaatggttcatgcttcatccatttcaacaatttattatatgcgtgaaactgtcgacggaaataccgaattcttctttggtgaaggcgtggcagaagcctctgtagcaggaggagttcttgaaagtaatttcattggtggattaaaacctactaagggcgcgcaggtagttattgaatatattcgtactgatggtgaatctgcgaatggcgcaactgatttcagctatgctgatactctgcaatatatcgtagtaaacaaaatcattgaaaactggtcagattctcctgattatgttggagctgatggcggtggtgaacctgaagacatcgagcgtattcgtgagctcgcccagattaagcgcgaatctcagatgcgatgcgtgtctaaaactgactatgaatcattcgttagttcacgctttggttctatcgtacaagcagtacaatgctttactgatcaggacaaacccggatatgcatttatcgcaattaaaccaaaatctgggttgcagttaactgctgttcaacgagaagacattcaggattatctaaaacctttctgtcttgct

SEQ ID NO: 16 - DNA, 167537 bp, unidentified
  source 1..167537: mol_type = genomic DNA
gttgggatattagcattcaagttaactttttctacacaacgctgaagttcattcagtactttaaacttgttcattacagttccttaatagagcggatgatggtttcaatgttttcagcagtacgggcgatatctaagtaagtattgcctgttgcagctacacggcaagacattccaaggtcagtgaagtgtttctgatgctcttcagaaatcttgtaaccgaagatgcggaaagtacctttgttgttaacttcaagactacgaataccgaaggtacgtttttccagaactgcgatatagttactgcggtaaacagtcagttctttcaaaggcaagatatcttccatctcgctaagaatgctcatcatcaggtctttgtgctcattcatatcttcagtcagaggacgagctttacgagtattgcgtttcttaagaagttcaggcttgttctcttctgcatagataactgccgctttagagatgatgtcctgtgcttcaccagtgatgattaaaccgtcaccagatttctcgatgagacctttcttaatcagaacaccgatgtttgagttaacagaacctgcgttcatggtttcttcaaggatttcacgcagttcagcagaagtgatgaaatcctttttagctacctgaaccaagatagcagcagttttttcgttcagagcatcttcggaagctttgatgatgtaagttactttagacattgtgattctccattctgttttgttcaatttgtttggtatgagactataataacatctgctaaccagcttgtaaacaactttgtgaaaataatttggggcattctaaggagggattttggagggatatagatttatatggaaggacctggagatgacctccaggttccctagattaactgaggagcaataaaactagacctaatactgcaattacagaacctataattaaataaaattctatcatagttcttccaggtctttcagatactcagcctcaggagttgtcttttcccagtacttaacctcttgggcaagacgttttgcttcctgagcgagtttctttgcttcatcatcagtgatgtgatagatgttcattgaaacaagtttttcagaatgttctttgaatagttcattctgttcaatttctttagtcaactgcttacgagttttgccttggataacgatgttacctgcgataacctctttgataaattgagcttttgcctgagcaagattaaatgcctgcttagtttcagcgattttatgctcgattcgtttggcagtgaatgtcttacggacttctacgaaatgacgaattaactcaccggaagttttgaacttatcgttcagcttaccattctcatcgatgaccacaatgtattgactcattttctcaatgagtttaaaatccttcatgattttagcatgacgctgctcagggtcttcgcttaaagcatagtctttacggaatttcaccttaaagccaaaaccagtcttagaacagtcatcatcataagtgatgtatcctgcatcttccagaggatcgagtactttctctacataagaagcacgctcaaacttgtatggaatttcgcttatatagattgagttccgtgaagtttctttatacacgccgtgcagctcaacagaaccgtcttctgtttgaacgatttttccgttaaatttaggaaactgtacttcaggttccatcatttcgccacgaagtgctgctttagtgcattccaaaacagattcaaaactatgcggaagaatagaagttgaatatcctgttgcaataccacgaacgccattcagaagaacagtcggaattaccggcagataatatgctggcggaacatgttctttatctttatgtgctggagcgatttctgtatctttgtagattttacggaagttgtcagaaatccggcagaaaatataacgacttgccgcagcagattgaaccagacgcgaaccgaagttgccttgcccatctaacagaggatagttgttattccatgtgtttgccatcaatgcaccagcatcttgagcagaggtttcaccatgatgatatcctaaatcagctacaccaccggcgacagacgcaagcttatggaatttttctttattaccgcgagctaaatcaagagcccgagcaataacaaaccgttgtacaggtttaaacccatcaatcaagttcggaatagcacggttttctacagtgtaaatcgcatactcttttgcttcattatcaatgatagatttcaaatcgcgatgacgaagatttgatgccttagccaaatcatcgatagaacctgcttgttttaatagagtgtcaaaaatatccattgtacctaccaaattagtgagccgatttgtactataacatcggaaatgaaaagcacaatataaatcattccgtaaatcattccatagtacaaaaccaaaagaatgatggaaataactacagcagaaactaggagtttcttaatcatttgtaaactcctgcaattttacaaatgcgctcaaacataataaatgctgcggtgaacgcaatgcttccaattactttagtggtaggcacgaggccataccacatgaatgttcctgagcaaatcattagggccatcagaaacacatagcccatcacgaagaaggttctcattagtatttctgcaaagtaaagatgaagttatcattcagaatacgattcagctcagagtaggtctgcgcgtcacttgaatgctgacgagtaaacgccaatgcaagctgacctttgccataaccagtggtgagtggtttcattttattagcaggaatccagaacacaccgtaggtcatgcaattcgagcgcagagtacgacccaactgagaacgtccagaacggatatgagaaagaacactttcaaatcctgcctttgaacgctgtttagctacaaagaaacgagcagatgcaccaatataacctgctttgccatcattgaacatcaaaaaataaaatccttcgcgctcagtaatttcacgagatggagcacctgctgcccaatcaccgttacgaatagaaccgatcagttctgcgccagcgttatcgagatcagcaaaagtcataatattacgcatgttaatttcctcagttgattaaagtttattctccgataaggggccgaagccccttctactaccaaaaatatactactgccgttacaccaccaacccaaaacacaagaagacctaaagcaagcagacgatacacgatgtgtcgtttcatttttgaccttcccatacggtttctactaaagatttaaggccatcggtctgaataatatcaaccgcttgaatagcaaaataaattccgaacccgaatatagcaacaattcccaacgctaccgcaacaataacagacagaacaacagttctcattaagttaaagcgacgatcaaaactattacgaatcattatattttcctcagatgaaagcattaatccaaacgttaactaaatcccatgcgaaaacaccaatgaaagtaacgataaggcagaatactacaaagatgttcttcagaatcgtaagtaactttttcattttgttctccagtttagctaacaagactatagtatcactggagaacaagaaagtaaactattaaatgcacaaattacgaattttttcttccagagctttgactttctctatgtgctcatcacgagcagcggcagctccattaggatacaacccgccatacgttgaatcaccgttatcacaagcaatgatagtataatgccaattcatagattcaagaatcttatactctttcaaaagctcagctttaatagaagcatttccgcgtttggctcgaagtgattttagctctaagtaactcatgttttactcccgttcagtttgtaaggccatagtatcatggccaatcccggaagtaaacaactttttaaaatttatgcatgatgtacccgccagcaccaactcgcgaaggttttacgacttccatgagctgttcgataccgccactgaacatcggtgtgtactgtatgacattctgggacacttcttctgcaacgaatataattatacagtctgcgactttatgtttaaacatgggccctagatttattccacttccattagggaatagaccgtctttaccagtcgtaacattaatccatggcttatgatttgctcggtcatgaacaaagtgtgttttaacttcaaccctaactccttgatagtacgggtgggctagtacgtcccatgcccattcgtatggatcgttgttattatggtcaacaacttgatcgttcacgtatccatcgagaaaatctgctaccacatactctgccggtatagcaattctgcatcgtttaagaacgtcaattctatcttgagatggatcgatatctaagctatatctggcagtatcaatgatttttacttttgcttcaccccttaacttattcaaatctagggtaaatgtccggagttggttcaatctctgcagggctttgttcatcaatgccataaattcctctgatatgtaattcaccaaaataaacacgatcgtcgtggttacaagtgtctggttccacaacaaaatcatcaccaagttctacgagttcatcacagtgcaaccaagcatagtgaacatcaccttcatgtttaactacatgatgacaaaacactgtagcagcatgatgagtaccacgaagattaacaactttagaatgagatacattaaatggattaatcatgtttcacccataataaaagaggagcccgaaggctccttataattagcgaagttctgaaccccaacgatcagttacatcttctaatactacataaccacatgtacgcattttagcatcgttgtaatcaaccgggatagatactacatcacgcggatgaactttaactgaaacaatacggtcagaaccactaccgaagtgaccgatgtaagatttagagcagacatgcagacctgcggaacaagtacgctgatcgtcttcatctacctggttacgcggcattgtaacagttttacccggagagttatcaaacgtgtttgaagcacagtccatataagtggaacgaactactttccaaccaatgaagtgaccatcatcagtgatgtcgatatcgtttgcattcaggaaatcaaacagacgataaactgcacgacgagacgggttcagcatcaggttttccaggaaaggcagataacgtttaaagtcttcgccatcttccatggctcgaactatacgctcagtcagaccagatttcagttcaatatctttatagaacagcgtaccatcttcaattcggacgttaccctgaacgaatttcttgatgccttgttccaggttaatgtggtcaatagcaccagcgatatcgccatctacaagtttctgcagtgcagatttaaatccaggatgttggctatcagcattataagtagtacggccttcagtaattgaaatgaatttggaacttgctgcccatttaaattcacgctcaacaggagcttctactttagcaggaacagctgccgcggcagctcgagcttcacgctctttaaacacacgccgaatagtgtcacgggaaacaccataattctcggcgagctctttcttagtgtacagaccgtttttgaagtttttaacgattgcatctttttggatttcagacagacaggtaacagccatttattcacctttattttcagaattttgagtagaagctccatcaaggagctccatgatttttacgatatcatcgacgagtttgctgtcagtccgccaagtatccaagacacttgcgatgacaggataatcatctttaaactgttcaatctttttatagaagattgtctcagcatcaccagacagtttattataaattttattacataaagctaaatcatcgttttcatctttgattttactggtacggcaaaccttagcgattttgtttagttttgtcaggaacggatttttcattccagacgcagtaaacttactcgacaagaaattcaatttatcgtaatgcgcaatatttccacagatacggtttccagtagcatttgatggcatgtactggtcataatctaccttatcaatacacttgatgtattggtcgataataaatcggtcaaatgaaagcaatccatcagcttttgcagcggctttcatagcacccggacgaattgcatagaatttcttaattccacacgcttctgccagagaccgcatatctgtgatgctcatattccaccaccaaacattatctgggaaagtgtggatttcatcacgattgcgaccgattgcataaccttcaagctcagcaatttcagatgatactaaagtctgacggtcttcttcccagtacccgtctttatcaatccaatgcagagaaacattaggagatttcggacgtttctcttttggaccagtgtcgtaatcaggaagagcttttctctgggcttcaagttcagacacacggaatactacaacttcatcagtatccatgattttcttcagctcatcaatgacatgtaattcatcttcattgtctttgattacagtaatgtgtgcccagattggaactaacccagatttacacagagcacgaaccgtagcaatacgcttacccgctttatcgtcaataagaacgaacgctttagttctatcaaccccgcaaatatcagaaatgtttacttggttatgacgatgccaagaactgcttgacactttacgacgagcaggttcatcgcatgaaacataaactgatacttcgttatctacatagtatgaacgaattttatcaagattatacttcgcaacaacctgcttgatatcacgatttccaatagtaacaccacggttttgaagaatagtacgctctttagaactcagcttattgaactcacgcaggaattcacggtcagattcatacgcttcaaacgctttaatatctgcggtaattacctcttcttcaagagcattcacacgcttctggatattagcaattgtttcttcgtcaagagaaagctcttcacgagatggagtaatgtctaattcgccaagagggaaatgaacataaaccttgccataacgattaagcagccaatctgccttaacatctacaccgctaatcggatatacgatttttccataaactgcatacagaccataactttcgtaagagctattaacgctgaaccagtcggtcttatctaccgggaaatattcaatttcgcgacgaagagaatctaccttcggaggaacagcaccaaacgtacgcaaaatatatgcgatttcatagtgccaggtatcaatatcttctactttaaccggaactgtaatttcaagaccagtttcttcgtcttctttcatatcatcgacaaacatcggacgaatagtaggttcacctcggtttttcatgacagtataacctgtagctttaccatcatgataagacactacgttaaatgtactcgtatagcttaatggtgatttagaaccaagaccaagagcaccgatgaaatcattactattattctttgtggattcaaagaacgttttgtacatcgtcatcatgtcattatgattaagacctggaccataatcacgaattacaaatcgtgggtcaagacgagttggtgctttgatgtaaaatggacgattttcattaccattcagtttatgagcatcatcgcagttagtagaaagttcacgaacaacagcacgaactttatacttatagagtttgtttgacaagatgtcaaaagctttacccgaggccttaatagtaaacgttgaatcatcagcgtcagaagaaccaatgattacttcatcatcacatttaattttcattttattcctatcaattatgtcgtttaatgatttctgctacttcaaggagctcttcagcagtagcggtgttagttgtaaaaattttattatggatttctttgaagcgttctttgaattcctcagctgcttggatgtcaaagaaccgctggatgatacgatattcacgatatatagcatcgttgaataattcttctgatgggatgtaactgcgtttcataatattttcctcagtgatttagggaaattatatcactataactttaagcaagaatcctagaatcatctccaagcacttcttgattaaagccatataaatccattcttataaagaaaaagggacccggaggtcccttagattaccacaccctactaactcgaccataaacctcatgtttagaaccatcaatgttttcaacccagatggttacccaagttccgggcagaggtttcttttcagcgaacagatatccatagtcgcctgagatcaaagtaatccaataacgttgcatgttaattccttctaagtaagggcaatagtacccttactatttattctttattcactcatccatgtcttacgtggtgcagcatcattacccataattaattcaaacagttctttccagttttcaggaagagtgactacatcataaaccgggtcttgaataacacgttcgtattcatcttcttcaagagaaccaagacctttaatataacgaagtttccaacctttgaaatcatctttatggtcttcatattcaccaagagaatagaaccaacgttgttctttacctttggtgagaataataaccggagttttcacaaagcggattcgaccttgttcaaataattctggccaattactaaagaacgccaaaagacttgggaaaattgaaccaacaccatcaacgtctgcatcagtcatgatagcaatatttcggtagttagtattttcagcaggctcaccaatcgtcaaaccggtgattgcacaaatgtcaaatacttccttgttcttcatagcatctgcggcagacattccccatgtattcatgaatttaccacgtagaggatatccaccatgaagttcacggtcacgtgttgtgagcagataaccaatcgcagaatcaccctcggttaagaataaagtggtgtcagcatctttgccatatttgttggctttgatgtgcttagctactttagctttctgcgctttcttggcggctttagtttctgcagctttctctgcagcaagtttacgagctaacattgcctcgataataggcatatgaatatcttcggatttcataatagcgttagcaagtttcttataatcaatatcaatatggctacgaatttctccccaaggagaagtcagacgctctttagtctgagaatcaaatcgcatgttagacatatcacgaataaacatgatgacagtcagacattctttaattcgcgctttattaacttctagtttgtacttacgctttaatgctggaataagttcattgctcagttcatcaagaactaggtcaacgtgagtaccaccgtttttggtgtgaatgttattaacatatgaaagttgacggaacccgtcatccgaacgaccaatggcaatagcacaagtatcagaatcctgcactacagcattttcgtcatacatgtgggcgtaagctttaaacttgccttgaacccgtttacccatgaatttaaattcaatatcaggataaactactgctaacgtcatcagacgatcgtgaatgattgattggtcaacatcagttaagccatcagattcaaagtgggtgaaatctgggataaatgacacgacagtaccagtcttgtctttaataaattctttatctttagctggatgttcttcccaagaaacattctctgcgccatttgaacagcggacaacgatttcattttttccatcacaggttgcacccacaaatgtcacagaaaaaatattcgttaacgcagaaccaacaccgttcataccaccggttttacgctcagcatcatcaccaaagttaccacccgcacgaggacgagtccatgcagctactggtcctggaatagtttctccttcaggtgttactacaggagcctgcggaagaccacgaccattatctgttacaataattttgttgcctttgacatcaactgaaatcttattcgcgtgtttgaaattagtacgaatagcttcatcaacagagttatcaatgatttcatcaatcagtttgataataccaggaacatactttactgattggaatttaccaaaaagaaaacggtcatgcgcttcaaacgcagaactaccaatgtacattccgctacgcttaatgatatgttctcggtcactcagaattttaatttcgttcttaatcattacatttcctcggttagtgaaggaattatatcaactattaattatagcaagtaattcttctttgatatacatcaatttaccaagaacctcatggcctcctttaaccgctttatactcgggatatcgtggccgctgtcgttcaaacatagtccattgagcatcactaacgttagcgtatgcatatcgagaatttccgtagtactgttcaatccggtactcgttgttttcattaagtgaaatccactcttcacagacttcataatatttctgcatccaaatagtacgaccattcacgtcattaattggccaccaagcaaacctgtattttccaatagcccgctctaccatttttaactgtcgtttagcacgcctttgcgcagttgtcattccaataatcataatattctcctctggccaacaagactataataccaaaacacggtgtccatgtaaacaactaaatgacccgaaggtcatttattcataacgaattgtgctgttcttaagaaaaagccctgagcacactgttccgttaacaggttttcctgttggcccaatagccgtaaagcctgtgtgctgaaaatcatcctctgagcaagaaaagaacttatatccagtgattttgatatcagtaaatcccgcgttatctaacacgcgagttgcgttatcagcgtcagtgcatccaatcatcatgaaggcaagcgctgtaattaaaatctttttcattttaatttaaccctataagttatattacctactttaataacccggatttctccgggtttcatggtaatgcgtgctttagttcccatcaataatcaccactctttaatccatcgtagtgaactgccggagcagaaaccacccgcttcatttgaccttcacacttagggttaaagcagttaacagtatagtcacgatgggaaattttacgcataatttctatcttttttccacagacttcacacttgtaatcatacattggcattaacagcatccttccatttttgtgttttgaccatgatttgctcattcagtgcacgagtaaccatcatggagatttcatcatctgatacatgggtatcatttttatggcgatttctgaaatgcagccaaagtgcatccactacacagttaataacatctgcgcactcgccttcaaattcttctttctgccgccatggacgattaatccaatcacacatttctccagtttctgaagaaagttgcagcatgacattcccaatgctacggttgggaataggataagataattttgatgcttcaaaaataggagctaaatttaacattgatatgcactctgcagtgctgcaatagcagcgattgcttgaccacgattatgaatagaaagattcataaccaaatcggttggaattacattcgcggaagttccaacttcagtaaagtatttgaattcgctatcaaaaattacaaggtcttcaccaccaacttcatcacattctgtgccattagcccacgtaattccggatactctgttattttggtggtcaactttagtaacagtaaaactcccgccattttcatggagttcatacacaaagtcttcattaaactcataacgtgaagaaaattcttcttccgcttcatcattgacgaatttgtactgtacgccttctttaaaattcattacacaatctccatgtattctgggccatcaactgtgattacacgagcaaaggtacgaactgggacgatatcaccatggttcgcgaatacatacaaccaggtccaatgctcttctttaccgaaggttttctctttctgaacgacaattaagtcaggattgaacagaatgtcttcaaaagcttcggcagtaatttttacggtgttttcagttttcatgttattctcctcagtagttgataagataatagtaccacatccttgtggcaaagtaaacaactttttatactaaaccttgacgctgtgattccgtcggctctacatcggctttaggcagaaccgcatagttaccttgaaatactacatttactaaagttttaccgtcttcttcccactcatcagtgacaagaacatttttatgcagcgacagattagtggctgaattagtagaactcaccgattgggtaataacattgtccagcgaattcacgtgtacccacttgcgcagatagctttcactagattcaacgaattttttcaagcagtggatgtaatcaccaaaatcttcacggtaaatcttatacccagatttaccgtcattacgattaactactttaacgattacaccattgtgaccaacccacttaccaccaattactttaacgttttcacctacaactaaacctttcatcgtgtttctctcagtttgttaatgtagagccattatataacggctctttcataaagtaaatagttatcggtgagaaatttcacacccaacatctactccgaacatataccctgcatcccagcccttagccatcaaagccttggccaccagaaccatcgttggagagatttccgggaggatttcccggttgaaccactcttcgaagttttcatcgaactcaaactcttccattagccacgccccttaggtaaactcagtggatcggtatcttctggacttggtgcttcgcttaggcctagagcataacgttgagcatatttaagcattagaatatccttagcgcagtcatggatactatcatgcgcgataaacccgtcgagcgtaccctttggaagaggggtagttgtcagaccacgagtcagaagcagtgattcaatcgcggtacgaatatcacgctgattccagaacttacacggctcttctttaaatgtatcaatttcttcttcggaaattccttgggctcgttgaacatcgcgaagacaatcaacaaaaatcggaaagtcaaagctctgtccacgacaccagccaaaggaatcccatgggtgaattccattatcaatcagatattgctgagcttctttaattccagcaattactgataaatcgtctggcgttgaggccaggttagcccgagcttcagctgattgtttcttccaccactcaagagtagacttaccaaacaaccgatgacctttctgggatttaaggtcaaacttaatacgatgaccacgtttaaccaattcatcgaagctttccaaaacttcggggtcagaatcaaaggtgattagagcaaggtcaatcacagaagagcttgacacatttccgaatgtttcaaaatcaataataaagtctttagccattttgagcctctagcataaatttaatttcgcgtaactggcaaccaatatattcgctcagatacacctttgggtcatatcctgtgaaccaagtaatagcattagcattatctgctatatcacgaagctcattcagaactgtatcaattttaatgttaatagcacgcttaacattgtctggtgcttcaaacttagattcttgtaagccaacaatcattgtttgaaggtcttctaatttcaattcaaacatattacctcacacataaaacacatcatatcgaccacgagtagtaccaacatataataactgctgtgcgagagaagcatctgccatgtgaatgcatggagtataaatgaagcttctgtcaattgagatgccctgggccttatggaaagtcgaagccggtaatgctttcactttatggaacttacgcttagcatcccagaactcagaccagggtgctttaccgcctttattccagttcttatatgtatctgcagtttttgccaagaaaaattgaaacttattcatttcttcttcggatgagatgacacagattttctctctagcgtactcttcatcgtcgccataggtttcaatatctaatacccaatgacgaaccagatattcacctggaacacctctggcacctaaaaatgacgtggtttcagttgcatctaatatgcgaacaaactgaccattattgaaaagaatttcgctgaatttcttcccttcaaatttaagttccttggtaagaggttcttgcataacaacaatctcacctactacgaatggtcgttcagtttcatagattcttcgcctgattatttcattcagtttatccacagatttattagtgaacgcaagcattcggttttcaaataaatcttctggtgttttaactaaattaaaataatttagcataaaatctttaagggcagttccttttgtaaaaccacggacgccatgaccatcaactacacagtcacgaatccacccaccgtttctgatttcagtagcgacttcaatgattggggcattactccgcatcacctcggtcaaatgaagttgtaagaaatctttatgagtgaagaatggactcagtgcaggttcattacttccaggttctaccggacgtatctgagccttatcaccaatggcaatgacaatacaccaggcaggaatagttgccatcaaaatcttaaacaacttacggtcatacattgaagcttcatcgcagatgagaactcgaatagatgccatatccggaactttcttttgttcaaacagaacgttttcttcatatgtcgtcgggttgattttcagaagactatgaatagtactggcctgcattccgctgagcttagataaaacctttttggccccatgcgtaggtgctgccaacgcaatgccagagataccctgagaaatcaaagcgtcaatgataaatttggttaaagttgttttacctgtaccagcaggtccattaatcgtaatgtgttgacctttagctccttgtttgaccatttcaatgactttattaaaaatcgctttttgactttcttttaattggtcaaacgtaatcatgccacttttaccctcactacatgtagatttttaatttttgctttgagtttttcgcgctcaacatcgctaagtggctcatacactagctcagttgttttccaccaaagcattcctttggttttgcttttcccagtaaaattaccttttgctagtttgtctgttaaaaccgacattgtacgaatccgtgctttattagccgattcttcattagtgaagaccacacatcgttctccatcgtacatatcagttgtgactggatggtcaaatccgtctttatccttatacgctactacatatccatagtgttgcattacattttacctctcaaaagttggaagaaggacgcagtcaatggaagaccttttttcaattttaacttatctagcattgagcatttttctaaccgacgaagtgagttaacaattaaccgtattgattgtacacggatttcagcatctgacggacgattcggaactgatgctaaaacagcagataacttacgctcaactttagctaattcagacttaccaccactgatacgagttctcaatgcattaataagttctaaatctgccgaggttgcagttccattcttttctttttgcataaattgagaaagatgattttcgcgattacgtaagttagttttaattgatgttatagttttttcatactcacgaatcttttccaaacgagaagcttctttatcacttgttggcttaacagaatctgaagaacgaactatgcgtgctgcgatttcattcgcttttcgttcaaggccttcaatcgtattatttccacgcaaagtattatacttttgcttgacaggaatgttattccctactacatatcccaagtcattattccagcgttcaagcgtcatgctatcaggatgatttcctttaacagttccaaacttttcgcctgagtatgcgcaatgtgtctgctgcatgatgttaaacagatattctggggtgagattgaactccttgtgccgacgttgagcagaacctaaagttgtaattaaacgagtataaactttagcggtttcagcagtaaatttcatcatgttttcctcaaaaatgctttcgtcttacggacggtataatgggtctaggtccctagttctagataatcactagttgactaagctatagtaacactaaagtagtccataagtaaaccagatttttcaactttgttatgacccaccactttgaacttagttcccatcggtagcatcctttcttgttctttatcaatcatctcgatgtcagcgcttctgcgctgagcaatgttatcaatcacatcatttggtcgcatgaattcagaatctggtgcagtaattaaaagcgatttcatgttggtatgataatcaaatgattgctgacaattattgacttcaatgactacaaaggtcgagtaatgccatttgcctgcaaattctcgggcaatcgtttcatctgttgtgaatgatgctacctttccgaagtcaaatttctctcctttaataagagcgtcataaaaggctttagcctcgcggcatgatagacctctatagagaatgtcactgttatcaatttgatgacgtctaacgatagagtcaagtttcttatgaaattcttcgccaatcttattgttcatgcactgccacagaattgactgttctttgcagtcaaaacgattggctaatgcttcccatacgcttaaatcatataaaggtaatcctttgctttctcgcgcgaagttaagaacatcaatggagcgaatgggttcttcgataggaataacctttgataattttactgaaatagatgggtttaatgaaatagccatgatattctccatttttggttacgagaggtatcatatcatggctttttagaagagtaaactactttgtgaaattattttgcccacggagaccagggcggcgggtcagaccagattgaagctagttcatctagaagagcttctggggctttaataccatacttctgtataattatacggtattcgtctttgatgtccttagaaatcactggatgaacctgaacctcttcctgaggctcttccatcatttcaaacaaatccatcacatgaaccactccatccgacgatattgactgttactattattatatgcatcagcagctttttgaagcaaatcgctcggagtaaatctggcgaaatcagcttgcataaatgaccatactaactgagtaaatactataaaagcgtcttcattgtcaatgacgatacttttgccgttaacgattttatcatttgcatattcaaacagatcggtctcatgatatgcattggtatatcctttaaggtgtaaagcacctaaaatattaattggacttcctggcatgtgtgaaacatcaaaagtatgggctgttttgacaagtccatatttactattaggacaccacccgcgtgcttcaaatttattgaccagttctttaaactcgtcataagaataattgtaaattgctacagtgaatactttatcagaatcaaaaccttcttttagtttgcgctgtaaacttactttatagatttttgcgtcggccacacatagctccttcagtcatgttgttgtcttcaaaccacttatcatttgctttaattaaagcaggcgcagcttttagtaataacgctgcagctcttacacctctgtaccaacaatcaaaatgagacttctttaatggtgattgataccagggcttagtataacatatcattttgttctcctcagttagtaggaataatatactattcccaatatagcataaaaggactcccgaaggagtccttaattttatacttcgctgtcagccggaacagcttcaaacattttcgcgttggtggttgcccaagttgcagcatcatcaactactgttgaataagcggctttttcggatgggaaaatctgatactgtgcattagcaatgcgatgtgagtcagaatataccttaaaagctacagatacttcagtacctttaacctcgccatcagcagtggtatggtcaaaagttttgatatttacgtaagccattttaatctcctatttagtttacaggagtatttatatagctgctgtaagcgtctttaatatttctttatcaatttctcgagtgatttcttctcgaagggccaatactaaggcccgttctttttgttttctgataatttttaaacgacgcttagatattcttttagccatcagtaaccactgtcttgacgagcaaagttctcggcgtttttcagataatacagcttaaagatttcttcagaatccagaccaagcgccataaacatattcagaacaaagtgcaggatatcaatcatttcaaatttgatttcaagctggtctttatcagacaggtctttgatataagtttcctgcatcttgacgtggtcagctttccatggtttccacacagcactagctgccttttcaccgttactcataccgccaagagacgtcagcaattcgcggaattcgtcatcaatgtaatctttttgattacgcagccactgtacgatatcaccagcttgagccaattcatcaggatgcatgttagtaccaggcttgtcatttgcaagacgaacctgaagagatttttgcatatcaagcattacttgcagagggtcaccaccaactttgcgtacgatacctgcgtatcgggcttcagctttatctgcaccagcgatcagttgactacattcgttgaaatgtggcatgttatttttcctttcttatgaagttttctatcatacgtctatagcagatattaggataacctgccttgacagctattttattaaattttgtgcgcttaggtctattattataaacccacaactcgtaaagcgaatcatacgagttccatatctcaccacgtcttggattcggtaaaccgtatctaggagaatttttaccactaaaccttccaatacgagcattgctcatgttagctttagcttcttccgaaataactttgcctttgtgagaagctcgcattttagccttagtttcttctggtgtttttaacccttttatccatgatggctttccaaaccttggattattttcacccgagaaaagaacagagttttggattttaagggtttctattaatctacttgttaatttaacacctttattatatcgcattaaatttacagcataatgcaatcctttcacatttggatatattttagttaataatctatgagctataaaatgctcgcgcgcagttaactcaacaagattgtttttgtcatctgctcctcccatacatctaggaattatatgatggcgttctttatatccatcaagatgccggcatttagcctttgtaactaaagctgagtaaattttttggtaattcacagatatcctttcaattagataaatattatatcacttaacataaatagcaggaggattcatgtctgaagtgaaacaagaatgtaaagacaaaggaggatttggaagatatctttacgtcggaatcgccactgctgctttagctgcatggaattatgtggtagttccattagctagcacacacggtctagttcttcctccaatgccgttagaaaaagttgtgtcgtttattatgaccggaggattgctttaatttaaggggctttggcccctatatcttcgcgtatttgtcaaggcgcaatttagccattaaaccttgcgatatattttgattaatataatccgttatttcagaagcagttgccccctctttcataatcatatcatttatatctttgcttttccaaggcgacttatcccagaaaactaccttttcacccgcgtctactaaacgcttcatacgcttaatcgtatcaggatgacgaggttcatggtccataatccatgctcggttatcatgacatggaacttgagctaaatctaaagacccaccggtaattgcaatagcattatcaatgaacagcgaatctattggtccttccatgacgaatacgagttttgactcatcaatagtgtcgagaccataaattttggtcgcgtgttcgtgggctttgattgtgatgtatttttgtggagcattctttcgtagtgctcgtccttgaaacgactcaatctctcctttcttgttgaagataggaataaccaaacgtggttcgttcgtctcattcttataggttcctggattaacggagttaacaagagaaggccattggttagtaaaccataaccttttccaagaagtgcttggaatacatctggcagtcacgtatttaactatcggatgttccttaggaagtctatctaatcgctcgcagaaattaagtttttctattacggggagttttgcattaattttctcagacggttctacagcctttggcttatcaaagacctgctcctttcttttctcaagaagatactctcgatagaggtcgggttcattatctttaagatactgcgatagccacttgttatactcgcagttgaagcaatgacagcgtaatccttgacctgcatcaaaaatccagaatcgtgctttattgatatctttctgtgagtcaccacaaattgggcaacggcagtttaacttgaatgttgaagatgtagtaacgtgtctaaatttaggtaggtgagatattgcgcgaattgcatactcgttatcaacccaagacataatatttcctctggccttaaactaataaggccattttatcactttttcttggcagcgtctttatccgcttttcgtttctttggaagagtttcgggtcctttattgacgatgtccccggaagttgtacctgatgcaatattctgtggattgccgcccgcatcacctgcgaccatctcagtaacaaactctttgtatgttttcatagagcctcctactatttattcatgcgtaatacgtaagcatttatatgtaggatacagcgtcggagacattgattttggattgtctttgataagcataaactgcttgcctgtatcttcacacttttgcttaatcacggcttcatctttaccagtgaatgccatcttttcagtagacattccacctgaaccagtagatagcgccattattaaaacgtatgtaatcatcctaaaatccacttaacaatgttgaagttatcaaactgggcatcacagtaaagaacataattcaacttaagtgctgcgccgtcgtctttaagttctgcttgcacttctgtttgtttgctcgggtctacgttttccacaatatgaccaacatctgcacgaatctgctgagctacttcagactcatcagcagtcattgaccactcgcataagtctttgtcatagttggccatggcaggaactgcagagcaacttgatactgcgaacactaaagcaagtacaatctttttcattttggtttcctcaagcagcttgtacgttaagagcagaaatcaggcgataatcaccgtttgcgtatactaacattgacacattgccatcagtgtttttgaatggctcaacaactactaaaactgtatcgccttcatctaatgcttttcgtactacgccatcacaacgcagattagcatgtggagatttaactactttgcttccaactaccataccgcaatgcggtacagtttccgctgattcatctttactcttaaagactacgtctaatgctttttcaattgtccacatgatgttttcctctactcgttttgtttcagtaaggccatagtatcatggcctttggagaaagtaaactaccttttgaacaattttttcaacaaaatgtcagaggtcagattcttggtaggtaggtatgtagcagagttaacccagatgccatcgctgttatacaccttgacctctccatagtcgcatacagataggtctgctttgttatatgcctcaatgcctcgatgaatggtatctgtggctgttacaacaaaagagtgacctgactggtcacggaccgcgctaaacacaaaaatcatagaattccttagaattttaactcttctgccagagcatcaagcttagaacgtgatactcgttcttgacgattagattcggctacacggttctgtgcaccggcaccttctcggacggtattgcttggattaggcttagttgggtcgttttgctgctcaatttctacccaacgctgattagccttatgtacacccatagagaacttattgttgatgttcttatcaccgtaacgtgatttaatctgcttaattaattgttgcttcatctgagcaagttcaggggtttcaatcacagccaacataaagtctgctgtagcaggtagaccagcagattctgcaatatcactcatgtccatatcagaagcatcccacgctgaacgacctacctgagctgcggtccaaagaacagtttcagattctacagccaatgcacgaagttcttctgcaatagctttaactaacgtgtaactgttttcagtatattgacgaatacggcaagaagcacaaataccaagatagtcaatgatgataacagtcggtttaaagttcttcttgagtttcaactcattcagaagagctcggaatgtattagcgttagcaccgccagtcggatactgtttaatgattaaacgaccaagagtactagaactacgccatttttccattttgcctttatattcggcgtatgatacacagccatcatcaatatcgtcaagtgatacatcaagcaaattagcgtcaatgcgtttagcacaaacttcttcggccatttccatggaaatataaaggacattatgccccatctgaagatagtctgcagccaatgaacacaatcctaacgatttaccaacgttgacgccagccatcaatacgttcagcgtaccagtctcggcaccacctttagtaattttgttcagaatgctaagtttaaacggaactttacgagctttattctggtatgataaccaacgagcttcataatcttccatccaatcatgaccaatatagctatcaaacgatactgataacgcttcgcgcatgatatcaggaatagctcccatatcaggaagacgcttatctcgcttatttggctcaagctgggcattagcctgaatttcaataattcgagacgtagcgttatacatagccttttcttgaacgtacttttcagtttccttaactaaccaattcaaatcttcaggagcatcagataacttatcaataagtttctttgcgccttcatgttccgtttcagttatagacgaattatccagtgctacacataacgcagtctttgaaggaattgctgtgtattcattaacgtgtttcttaattatgttaaacaccgtctgagcaggtccttgctcgaagtactctttgtccatatatggccaaaccttcgtaaagaaagcctggttgtaaatcagattagctaagattgtttctaccactttaacctcttaaaagattttccataatgattttttcttggtctttaatgcactctggatttgttgtttaacacaagcttccacatgaggataaagttcatccttatgagcttcagatggtgtactgaactcaatagttacttcccccgaaggagaaatatttaatttatgaacataaaccaagtgtgattgaccatttaattttatcacaatttcttggataacagtcttcatagcttcttggattatttcatggcttttcttgaacactcgttcttgacgctcgaagtctccctcttccgagggagattcttgttcaaatttctcgagttcagattctaaatcaaactcagtcttcattcatgaagttctctaattcatcttcaacttcagcagctgatactgaaccactctcaggaagtttaacaccatcaaccttagttgaaacttttgagttaatcatttctgctaccgcttcatcaaccgcagcgtttgaatcaatagcacccaactgataacgggctttgatagcgtcacggaatggctcatgcttaaacagaggaccccaaaattccgtactgctcgtatcttttgcccgccaggatttttcttcacgaatcatctcaccggtttcaacatccaggaattctcgtgcataccatccgtttttcggtttaaccacaaatccgatatccagagccatatcaagcagaccactgtatggatcgataccgccatcgaatttaacatcgatgaagaacttacttttctctttgacagtacgcgatttctcagcgttcaggacaaactgatatccttcaagctcagtaccatctttaatttgacgtttaccgatgatgaacacagtatccgcagaatacataggacctgtaccaccagtcattaccgtcttactgaacatctcgatagtctcgattgtgtggttaaccgcgacacaaggaatgttcttaatagagaagtaaggagttacgatacggaagagagacttcagacttttcgcacgagtcatatctgcaacagatttctcgttcagagcatcttcggtttcctttttagacgccatgttaccaatagagtcgataaacacgatgactttttcaccacgctcaatagcttcaagctggttaaccatatcgatttttaattgttcaaccgactgaaccggtgtatgaattacgcggtcagggtcaacacccatagatttcagataagctggagtgataccaaattctgaatcatagaacaaacagactgcatcaggatacttattaagataagcactaaccattgtcagagacatgttagatttgaagtgtttagatggacctgcgaagatagtcaacccggactgcataccaccatccaacgctccactgattgcgatattaagcatcggaattttagttctaactacatctttctcgttaaagaattttgatttagtcagttctgctgtcattttagaagtggatgctttaatcaggcgagattttaagtcagacattcattatattccataagtctccattatatttttctcacaggttaaaggatagagtaattatattactttgttcttgaagctattatcagaagttccatttcttcttggtgttataaaccactgtttccatatctatttcatagtgtattttacatccaacgcacatgccatgccaccagcaatgcattccatctgagccagtagttccttcatgaacaaactcatcagatttacatacgaagcatctgaattcttcagccttgaatatattaccagctacgtcagatttatcatagatgttcataagaggtccttggagggctttcgccctcacagatatggttctaccttaccaaattcatggaaggcctgagatttcactcgagtgttaatacacatacgaattgatttcagaggttcattatcaccgaataacccacgtctttcgccgtctttagatttccaacgggcttgatttgggaaagcagcatgtagctgttcaagggctctattctgacgagcagtatcacgctgtgtagaacaaccaccaggagactgcactttgccggatttaacgagatacttaaacagagccagatgaggatgacccatgttaattaattttagaaaagcataagcatcttcgttaaggtcaataactccgtaaccaatatcttctgcggtaagtttagtcaaatcatagaaagtattggtgaacccaaaactattctcgcgataatgaccccagcttgatgtgattttgaaaatcggcaagcgagcatgaccgtgataataaccacaatccatagcagtctctacgtatttgaccatatcatcaaatacctcttgactcattgcctcgccggcaccaagtggaacacggcgatcgtcgcgttcacgaatttcagtcagatgaatggtcgtatcatcatcaagcatccaaattcgttgtcctgcatacatttcagtaatcagacggcgagttcctgcaattccatcaacatcatcggggacagtaacgattttagcagcatgaccgtgccaagtttcgtatgcttctttttctgattcacgtactacaagatgcggaacataaccttcaggaaacatagtcagggcagtaactgccccggcacgcttataacttggaattacaaactgaatcatttccactcacctttatagtctttctttgcaatatgagtttcaccagtataagcatagttatctacaagatagaaatgacgctcatacacgtgcaaagacccgacgttccaaataatgtcaccaactgaataatttttacctgatgcattcagaagtttggttaactgttccagaacatagagctgccacgcatagtcattacgatatccaaagacgacatcattagagcgcatgtttacaacagcatgaactttattatcacgaatcagatactgaacattgttagtacacatgaaatcactcatgccatcgcgctcaaaatcatactgcatttgaggtcgtgtataaatcataattccgcggcgagaatcaggattactgataagttcctttgcgcagttagcaaactgcgaatagttttgtgatgaccaaactgcccagccatagttagaattaatctcaccatgtttggatgcaattgctttccaaatagctggggtttcacctggaatatctttaacgaataaactttgagatttataccactcaagttcacgggcaatgtacccatcattaactgcaccaaaaatcaggggctcatctgcaataaatgatgcacctacgatttcaatagtcttcacacccgtcttatcaatcacaaattctttgttgagcaaagcatcagcgaattcttgacggatatcttgtactgtcattggagttacaatcatgagacctcttatttaacttgctggataataattgtattctgctgtgcgttagaagcagaccaaatcagcgcaattaaccaaccgataatggaccaaccgaatactagatttgtgataaagattccaccccgtgatttatgcttacgactgcaagctacaaaggtcggcaaaaaatagatgaagaaaagaatgattaaaccaaatactgcttccatgttaatctcctcagttagacatgcatttgttgtagatgtgattttggagagattttaactgctccatacgttgtttatgctcattataactcaatccgccgttagcaaaatcagttaaacgaatctggtcattcactgctgccgcttgagcagtgcatgtacgttctttttgagttttacgcagacgcttaatttcttccagctcatgcttattctgctcaatcatgtcgagttccatcgcagatagctgacgattaggattagctttttctttcgccaaccgacgctcaaccgcgagcgattcagcagagacctggttgctagcacgatagtatcctacagtaccgccaattgctcgcacctgtccaacagaagaagccgggacgatatcaccttgtggcatttgacaaccagtcagcgtgagagcaacgataacagcaagtaacgatttcattgtaatctcctcagtatgttatttcgagaacaatggtaccacatccttgtggcaaagtaaacaacttttttaaaaatcgaacatgtcaagaagagacgatttctcttcatagtctaaccctgccgcttcagacatacccgtcagaggtttaacaaacgatttttggaacagaacactgtggtcaagccacactagaacttcctgtcggatttcttgtggcagctcagtgcccgatggccatgccatgcatttctcaccgtacgggttaccttcacgcagcgggatgaccatcaccttctcgccttccatgattggtgttataccttcaaagcccgcggtagctcggttatacgctaaagcacctttgacgtgatatggcgtacctttatctggatatcctgcaccatcatcatacttaccgatgttgttggcggtcttaacttctgctattactttatagtcaagttcacgatactcagactcaaactgcttataatattgctgtaaagattcttcaccttcctgcagcatacgccgaatagattcttccaacgcattctgaacagcagttggtgtagaactttgctgagtttccatacccatgattttcagatgcggttctgcatatcgagtaccttccatatcatacacattcagagcatatcgtttcttcgctttccagaatccgccaatgccgtttgaccccaacggaggacaagaaatagcttcacggtccatgaacattaaatgttctttattgttcatgtattcacacatctcacgatatgattggtcaatccaaggttccattttcttcttgccgaattggttcaggaattcgaccaaatcgttagtttctttgaaacgctcaagacctaccttctcgataaccttatcaacacaaacgtaaattgagtcagtatcaccagctactacaaacgaatgtccttcagtaccacataccttgttgagatattcattaactttacgttcaatccattgaattgccatttgaccaaacaacgtgattgctgatgcgttacgcaaatcataataacggaagtaaatgttacccaatgcaccataaagtgagttgatcagaatcttacggtttaactgattagtattacccaagatttcagcatgtttacattcaaacatcagtttgtcaaggcactcttcggtatatgtcagcagttctgctttcatatcatcagagaaatcttcatagacattaacttctgcgaatttatcgatagttccaaacttcttatcattcagaacctttttaatcagttcttgatttcgtttggcacccatcattttatttttccactctttacgctgataaaataccttcgcgatttcaactggaatgacaccatctacatctttacgatacatccaaccattgggtgaacatgaatattcgtcagacggacgtggtgcagtcttgttaatgtactcacccaatggatgaagtttaaactgtccaacgatggtttctggtgaaatattaacttgtcggatgattgacggatacagagatgtcaagtcaaacgacatgatataacgatatgcagcaggaactggttccttaacatacgcaccaggatatgactgtttaacatgagaacgactttgcggaataaccttgtcctgttctttcagactgttaaagatgattgcgtcccatgttttaatcggactcattacaccttgatacggcatcttcgcataataagacatcgagatagccaggtcaataaatccgcgaacagcatcaatcgcttgtactgattcaacgtcgatgatgttatacgaaatataccgttggtggttagtttcacgcaatttattgattggaccgtcatatgctaatttacctttcttggtttcataataagcaatgaaatccaacttatacgtcggttggttcgtgaaactaaacttcttatacaaatccatgtaatcaagaatagtcacacccatgatagaataaatttctttatcaccatacatgtttgtgataatcttagatgaaactttattcagaggagagaaccgtttcatcgcacgctcaccaagaatctgtttcacacgattcatgatgtacggaatatcaaatccttcaatgttccagccagtaaagattgctgggcatttctgttcccaaagattgatgtactcaagcatcatttctttttctgaattgaatggcatatacaccacacgatcaagaatatgttgtggaacttcatcaccgccttcggaatctaaacgagcagcgagtttcttgtcccactcggaaacagaaccataaagagaatgcagtaaatcaaatacgtagaacttatcatcaaccgaatcgtaatgggtgatagcatcaatttcatattctgctttcatcgggtctgggaattgagatgcagtaacctcaatgtcacagtttgcaattcggatgaattttttattatagacgatttctgaaccgtaagtatcactgatataagcaagtttgaaatcatccatacccattgcttccattcccatatcttccatacgacgcatccaatcgcgtgcatctttcatagttgggaatgtattcttcttgcaatacttgccatagatgtctttgtactttgtttcttccatgcaatgactaaacataacaggagaatacggaacacgacgcatgcgttcctcaccagtagaatcgatataacgttctacaatgtcattgcctagagtttcaacgctgatataaaattctttcatgggtttcctttgtttatagaccgagttattagtctttaggtgggataattatactccgatttttataaagtaaaagggccgaagcccttttcttacgcaccgattgtgtacttagattttaaagtccattcatgtttctgtttgaatgtaattactcggaagttattctgcatctgtgcaagagtttgaccacgattaatactcagtagaccccagtcagagagcagttgtgcgattgagtctcgacgaatttcatcttctaagtcaatagtaacagggcgaccatcaagctttaacatctctttaaaatggacgatatagtaacgaccctgtttctgaagaatgtggcagctttgatatagtaccttatctttgttattagcaattcccatacgggtcagagtttctttaactttcaggaagtcttcaggctgtttcagtgtaatttcaatcatctttaccattccaatgctgttttcttaagatttttctgttctttcacgtttttcgtgattgtcttgaccaattcatcagtcacaagacctttcattttcttgagagcaggtttaagcttgtttttagcttccagggtctctctatacatcctagcatcaatcgcattgaccttgtaatatgtcattataacttgaagaatcaatgcatcctggatgttttctgttaacttagcccatttaccataccgacgacctctaggaacagaggccatcatatagttatagtgtgcttggtcagataacccttgaccaacaaggttcataacataaaccgcaggcatacagtcagcgtgctgagaaagagcgttttcaaccatgaattttgaataatccatcgtcgagatattcaaatgctcttgcttttcgttaatagacccaataattgtgaagaattgattttctgctttttctttatatgaatcagataattcctggactttcgtccagtctttacctaaccaagctatttggtgctcattatactgatcatcatcttcaaataaactcatcatttccactgcatctctacaacaagttgaataagcatataaaccaaatgtaattcaatcgaagctgctatgccatgatactggttattttcaccgatgatttcatacattctgataatgcttgggccagtaaccattgtatacagctcagaagaaagtttatctacaaaccaagtatagtctgctgcatattttggagcaagagcacggagttctttgatgttcttagttttaatagcttcgatgacatcttcaattgaaccacggtcattcagaacgatagacaagatacctgcatcaatcacacccttagaagaataatgatcaagcatgttaatggtcttacggaattctggaaaattctttttgaccaaagcagctacaactttcttatcttcaaccaccacgccttcattttcacaaattgcgagacaacgcttgagcatctcgatttgcattggcttaacatcagatggagatggtttaccaaaattaattacacggcaacgagactgaagaggtttaatgataccatcaaggttgtttgcagtaatgataatagtacagtttgtgctatacgcttccatgaatgaacgcagatgtcgttgagattctgcaagacctgcacgatcaaattcgtcaatcacgataattttctgcttgcctgcaatggatgcagaacttgcgaatgcagttaacggtccacgaacgaaatcaattttacaatcagaaccattcacgaacatcatttcagcattaatgtcattacataatgctttagctactgtggtcttaccggtgccaggagaagtactatggagaattaaatgaggaatttttcctttagctactaaagccgaaaaaatttctttatcttcagcaggcaatacacattcagaaatagtacctggacgatatttctgttcccacatgaagtctgcttcgtttactgtcaatttcatttatatttcctcattcagattaaagatggggccgaagccccgaaattattactcaaaatcaaaggtactgtctgcttccattgctactacataagaggctgatgcaccttcaaattttgcggcagtctgtttcttggagccattcatttttgcccacagcatcagcttgtaatcaccaacagtcatcttcatattgctcatgttgatgataaagttaaagttaccttcgccatcataatcaccgagggtcagggaatacttcggacgggtcagtgcagcatcttctactttgttataaccgcgcagaacaattttaccatcaacattggtgatagcaattgtgtcaatctgcatgccacgagatactcgcatcagctgttgcaggtcttcacctttaaaatcgataattacgtttgccaccgggaatgggattggtttagtcgggaacacgattgtgctcgggtcagctgctggccagaagatagttgagcgagcatctttaattgccaggttaccatcttcctgcatgataatatctgcatcatcaccaaccagagacagaatgctcaggaaactgttcaggtcataaattgctacatcagtatcgatagtatcagagattgtggcttcagcataagtcgtaccattaacagcacgagtcatgataaaattgccaggtttcagcatgataccggagttgatggtggagaagtttttcagaatgttcagagtttctttagagaatttcatttcaataccttttaattaagttcaggataattatatcaagctgcgaatgtagcagttaattcttctgcaacaatctgacctgccgcaacgagttgctcatcagcatctacgcagtaatcattttctagacgttcgccaccatgacggtcagtaacaattttagcaccagccttgattgattcgttgtaatgcttacgcatcaattcaatccatttttctgcaacttcgtcgtcaatagatttatagaaagcaaagcgagcttcagaatctttaatcttatctttaatagctgctttagtttcttcagttagagccagaacccaagacttacgaatacgattttggttattcgggttggaatctgcacgtacgtttttaacctggatatctttcacatcaacaaaattaatcattatatttaccttaatcgtaataatcttcaaccatccaaccgggattcctgctggacatgactctattatattcatttcctgtaaaagcatctcgtaacatttcttctgttactaagtgtttttcatcagaaaacaaattagttaacacatatcgctttacttcaggaaaggccagcagatgctggccagttgtaaactcattcattccatcaccgtaaatcgtcctactttcttcatttgaagatgttggccatatgcctgcgggtcgtggtcacggtgagaaataataaacacattggcatctaccatcttattaagaatagcagttattgccttaacaccttctgcgtcggtggccgaatcgtagacttcatcaaggaacagacagtttattttaacaccagaaactttttcagcaatatcacgccatgtgaatagtaatgctatatcaattctggctttttcaccttgactaaacgaggcataactaaactcttctcgtccgcgagatttaatcgtttcagagaactcttcgttcaacgtgaacgaataatcagcttccataatttttaggtagctgttaatttgcttattgaacatcgggatgtacttcttgatgatagctcctttaataccggagtctttcagcatttcagttaaaataccacgacgatatttttccataaccaaattagttttgacgagaataattttatctaattcttcttgtagcagttcaatcttgtcagagttatcaatgaactcctgtgatgctttatcaattgctgctttaatacgacgtgctttatcaactgcagttaaagtcatctgtttcaaattactcatttgatttttgatgtctcttgcacgcgtacgaatagtattatactcgcgagctagttcatccagttcactctggcgcgtctttaactcgccaagaatggtattacattcttcaacatgatgattaatcttagtgattagagtgtcattagaatgcaaatcctgcaagcacgttgggcaatgaccgcctttatcatacaacccaagaacctttgagtatgattcaattttagaacgaatcttaaagattttaccttgaacttcttgaattgactctgctgggtcatcaccaatcacgagttcaagcagttcgctttgaagagtttctaattctgctttatatcctcgtgcctctttcacctgctcatcatacatcgcctgcaggcgagctacgttatcaccagaaagtttcttctgcttttctgcatactcatgatgagttttaatttcattagtcaatgcttcacgctgaacatcattaacctggatttgctgattgatttctcttatctgtgtcttgttcagtttgtccatatcagccaaaagagacacttcaagcaaatcttcaacgagctttcgtctattagcagttgataaccccatgaacggagtatatcctgccgttcctaatacgacaatctgcttaaacgatgtgtatgacatgccgatgagactttcaaagtaggattgaaaatcctttgaacttgcggcttcatcaagcttattgccatctcgtaaaatctcaaagacactcggtttttgcccacgtttaatgtagaaactatgaccgtcatactccatccacagttctactacagagtccttcttattgaaggagttaattaattgacctttcttaatatcacggaacggtttaccaaataaggcaaaagtaatagcttcaagcatagtacttttgccaccaccattcttacctgtgattaaggtcttttggcatttatcaagttgaatgtcaatggccgcttggccaactgacattatattcttatacttgacacgatttagtttaaaagtcttcactgattttgtgcctcaatgtataactgtttagacataacctttaaggctttgatatcatctgcggataggtcttcaagtgcttggatatattcttccattaaatccaataagcttttaacttctacttcttcgccatcttcagactcaaccgagttgtcaactttagaaacagttcttaattcatgtactaccttttcaagttctgattcaaacttaggaaggtcttcatcgaccgcagtgataataatgcgtactgcgagattacgaaactcttcaaagtcaatttttccagtaacaggataaatcagttttctatgccaagtgatttcattagggacgaaatcaaaggttgataattcagtgtcttgaacccagaagccacgtgggtcgttctcgtcacccgctgtaagcgtccaaggcgttccgatgtacttaacgtttgctgcgcttgatatggtgtggaagtgcccagaccatacttgtttgtactttttgaggaaatctggttccagcccatgagacttcattcctttataaaaataaaagccattaagctcccagtgaccaatacagtattcagcagacgattctttgatatgcttcatgatttctgacgtgttctcttcacacatccatggacacaagtcaatcaaagtcccatcaaaatccatagtcacgggcttttcaataacagtaatatgcttatacttaccaagaacttctgttgatgcattaggcgtcaacgtattcttgtagtgcatatcatgatttccgacgatcgtaattaagttaattccttctttctcaagagactccgcaatttcacgagcgaattccattgtcttatgagtgatagctttacgaacgtcaaaaatatcaccgtattgaatgatagttttaattccatgctttttggcataatcaatatgctgcttaattccgtgtcgttgtacatcctgtacccacgggtcatctgcgcggacacctaaatgccaatcgcctgagtgaataattttcatataacctctctagtagagtttaattttatattattccatgaatagcaaaaagggcccgaaggcccattacttattttgtcattaactcaaattgttctttaaagcaatgctcagaatcttggtgttctaccaggaattcaaatgctttatttcgctctttatcatagagcttctggtcagatgacagatgtttcattcgttcaaagacttcatttttattttcatcattcaaccacagaatgccagaatcatgagaagtcaacggctttccatcaacccggaatttcaaagcatcaccagtagctttatggaacacaggaatagttccacaagcgcctagttctaaatgcgtgtattccagcgaacgctcaaggaatttatctggaagacgtgacagctgataaccaaatccagactgagacatacgctcaagcatttcagagttaacatatcggtcaagaacttgaggattcagacctggtccagttttaacctgatgataatgacggcaataatcaatttcatagcgttctttgatgttaataaatgcaggactgcgttctaacccttccaagatagtcgttttgcctgcggggcgcagatgactttcatgaaagtcaaacatcaagaaatagcctttccacgtagtagtacgaccaatccaacgatgaatatcaaaatcaatagcagagaagtctttccaatacttatcacgaattgctttgatgttcatagcaggttgaaagttataaaccggaggagctgagtcagaatcatcaaagaaactcaacccgccgcttggaaaatattcttccattagcacggtattaaaatcgccgtttgagctatgactaaacagtacatcagcacgcttaacggtttcttcaagaccagcatttctacgaagtgacaatgctctatggtcatgttgatatacgactaccctaacttcaggtttaatgttctctatgagcttcttatagttatcaatcgctgcttctggagcattgatagcaggtactgagttaatgataagaatgtcacatgcgttaagcagagataaagtcttatcatagtcatctgcaagagacacaggaatagttacatctttatagctatgtgctctattacgagtaaacgctttatctttagcgtaaatgatatttacttcatggccatgttttactaaccactcacggtgctcgagactgaacttggttacgccgcatccctcaagtccgcgagccattaaaatattaatcttcatatattgacctttgttgttaattttggatattttaccattcccgtaataaagcaaaagggccgaagccctttaaattttcttgtatacaacataacccactgcttcacatatacgcttagcttcttcaaagcgtctaagcatatctaccttagcattatgaatcgcttcataatcgggagcaggtgcttctctccgagcagtatcacatttataacagaagtaactacgctttggtcctgtataacgttctgaacaattactgcaccggcacgtgtaatttccttccggccaatcatgtccaggattagaacccatcaaattcgtcatacatcccaattctcttcactagtaataaaatcagggtgttcatctaaatcaatgaatccccagttctcttcatttaccattcataccaccgtttaacttggaaggtgtcaacccagacaagagagttcttatcaattagcttacatccttcggtagagcctaacacgcgatattgattatctgctacctttactgccatcgtaccagtcgcagtgtttaaagtaaatcctgcgtctttacgaacacgtttaaattttacttgtaccagcatttagaatgtcccaaacagatttacgagaggtattccaacaagtcagaataatctcatcattaaaaggttgttttaaaatagtacgcagtttttcaatagcatacttgtaagcagggaaattattgtctaataccgcgtctccagcatgagctcgtaatcgctcaagttcacgacggtttttacgaacaactttgttggctcgagcaatagcttgttcttctgccgcttccattagtttctgttgcagctcgtcgcgctcttcctgggtaatattgttcatgttattcctttggatggtaatttatttcaaatgtgaattcagtatcagtccaattataactatgttcaattatagcagaatctgacctgaaatcagcgtcatgtggatttttcgggtcaatgtgaatatcaagatcaagcacctcccttaaatacatctttagcaaataagggatagcgtctaggtcttgcacatcttctaaaaacccgtcgaggttaatcttcagcctcatataaaaattccagattaggtccatcgcttgtaggttcgctctttttagcagaccctggcgccttataagcggtggattcatactgcgtcattttatcgtagatgtcctgaataaaggtttcatctgctaacgcaaccatatcatcgtcccgtgaatcatacacgttatggacaaaatagctgtatttctttgccatttctttgcgttcttttttgatacgctgaacgaatgcattgaaacaagcttgggttatatacgcatgcgggttatcatacttagtttcatcgaagttgattaagcctttaattgcggcttcaatcccgtctgaaatcatttcttgcttccaggattgggtgtatcctgaaaagttgaaacgcttactcagaccttccgcgatcagcataatagcaaggccgatcgtatcgttctgttttactactcgagggccgccagcagcttcagactcccggcacttctctttccatgcacagattgatttatacagttccttgttatttacataattactcatattgcctcttcgcttcaattaataatatctattatatcaaatttgggaagcgagaggattaaagcattacttaatcaattcagcgcatgcaattaatttcatcatgatacgatagaaatcgttatatgtaaactcagcagaaacattgaccgagcattcaaaatcttcgaagacacgttccattccgatgtctggaatgtcatctacatcagcgtaccagtacttgccttcctgcacgaatgttatttggtccttttccagatagaatacgccattcaatatttcgtgagtaagagttaactgaattttcataggtcacctttcatgatacgatagcactggaaaagtttttccataatacgtttgaactcaattaaactgatttcaaagtattcggattcatcttcttcatgcatcatgtttaagaatgaagtgtacagactttcataatgtttttcattcagcatagaagcatgagtttcccagtacattaattcgttggagaaccacacgcccatgtaagaatctattacgaattcacccataccttcaacagtgattgagatattatctatttcagccatttcttcaccgtatcgatagcatcttcaaatttagagaatgcatccacagaagtatattcattctcgccagaacgttcatagacccagaatgcatcaaaatcatcttcaataatgaattctccttctggagtttcaatcaagtttctgccgtctttagttttagacacgaaccatccgagtaaaccgatttctgcaatttgttcttctaccatttcagttctctcgctaatagaaaatattccattgaagttcctttattgatgcgatcaacacagaacttctttaatactgattctgatacagtatgaattaaagcagaatcagtaatgatatactcaatttttacaaatgctggtgattttccagcttcatcgtatgctaatcgttgagcgttacgaacatcttcttttgaagcgtttgaaattctgacgctgtcaaacacccaacggctggtaaaaatttctgtgtatagaataactttacgcatcaagatattcctcaagttcttgctcatttaaaccttcttgccacatctctgacggagacggaagttggctgtctagagtggatgaatcaattggaaatactctgataattacgctagtatcttcatcccattgatttgcgagtatccgtttagcttgactaatgtcaggctcagaatgagcccggatatacttaatccttctatgccatacaccggtaggaatagatgcgcacacgatatatgaaatcatttcgctgccttaaccgctttaacatcgcggaagcctttcttacgttgattcttcatcttacgaatagtgctttcagaaatttcaccgatacccggcgtgattggttctacaccaaaggctttaataccaaattcagacagaagataagcaaccactaattcacggatgcgggctttaccgattttttgaccttcttctttcatcgtaccgtgaagctcaacttcccactgatcaagcaaagacggagttacacaacgtccttcttccagcattgcagatactttatcataagcaaaagagttcagtacgtttttgattgcttgggacatattaatttcctcagtaacgattgttttgacagaggagattttaaatcaaatctcctgtagcaaatcaatctttgagagattttaactcttcgagcatatcgtagtattctttactagcaaccggagctacagtacagtggtagctattgaattcatggtatttcacgaagcgttctaggtgccacttaatcagattgttaattcggtgaagtagaaccccatctgaaccaacgtagacaaccacttcaaattgaagcccatcccaaattctggtacggacgatatcacctacagcaaaagttttcatgcgatgtaccaatgttcgttttgccaagactcacccttgtaccagcgagtcatatcatatccattttcgtcacagatgactttgttcttcatcaagaagtattcgtcatcagtaaaatgcacatgctttactttacagcctttactcatagcttctagagcttcttgccaatttaaccagttcatattttcctctcgagttaaacggtatgctgttatccgttgatagggctatagtatcactcatcaactagcttgtaaacaactttgtgaaaggaatttaaaaataaaagagaggtcccataggaacctctaaatgaagggtatagaaatatacataaggtggtcaagatgaccttagaaaggaaccggttaatcttctatgatatctgggtcatgcccagcagcaataagattggttttgaatgttggaatgtcatactgcttaacgttatctataaaaatgacaggataccgaatagcaagcgatggatagcacccgatgcgtttagcaagtgactcaatcaacggacggtcataaaccggttgaccgtcaacctcgttgattacgttatagaactcatacggaagttgcagcttatcgagcaagtcacgaactgctttacatccagggcatctccaaacttcttcagggatgccatagatttctatcatttcatgacctgttggagtttagcagtcagagtgttaactcgtttctgaaattcttcattagataacttttcatctttcttggtaggattaatccaatctgcgatgataataaggacaatgaacggaattgctacgaaagcacctgccgttaatgcaaccaaagcgataacgttagaaataaatttacgaatagcattaatgaatttcataattttccttaaatagtaaagatgaacgctgtcatagccagaaattccggtccaaacagttcagtagccatgtggttcagggtaaacataattttgtaagtcagcatatctatttcctcaatcgtgtgtccaggtagaaccatttcttacccagagtctttggttgtcagaaccacgccagtttttagtagttggcagtgatttctcatatttcccatcaattataacatcgatgtgttgtagcaaatctaaatctttgatatcttcaaacttatatcctgtccacatccagatatctttctccggaaatcttgctttaacccaagaaactaaatttgaaatctcttcccgattctgtggataaagcgggtctccaccggttaaggtaagaccttgaatatacgatttgcttaaatgggatgcaagctctttaacagtattcatagtgaataactggccatttctagcattccaagtagatttattataacacccttcgcatttatgcaaacacccggtgacaaaaagaacgaccctgcatccagggccattcacaaagtcagaagggtagattctgtcgaaattcattgaaccttacctcattacgtgcttctacttctgcatcatatttccagggctcatcagtttgaatagccccagccgataatccactttcggggtcacgggttatagcaattccaagcgggtgcagaacctctttgttgattttccaaatcaatccccattcgctaagttggttccaatcaacttgcttcattggtttctctaacatgttttaccctatgcataatttctttgttcttaccaagattgaacccacgctcagaaggattaccaagatagccacaagtcctacggattgtattcattttctttggatcagtttcaccacaaattgaacacgtgaatccgttttcagtaggtgtcatctcatgagtagaaccacaggaaagacatttatctactggcatgttaacaccaaaataatccaacttctcgatagcatagtcccataccgcttcaagaccttcaaggttgcgcttcatgtcaggaagttcaacataagaaatatgaccacctttagcaatggaatgatatggtgcttcacggtcaatcttttcaaaaggtgacaggttttcttctactgacacatggaagctattagtgtaccagcctttatcagttacgccctttacatcgccaaacttggcttggtcaatcttacagaaacgatagcacagactttcagccggagttgagtacagactaaaggcatagccggtttcttccgtccacttgtttagcttagtgttgatgtacttcaggacgagtttaccgcttcctttaaaagtaagcatatcaaattcgtgaatgccaatatatcctaatgaaattgaactacgtccatttttgaatagctcaagaatttcatcatcaggtttcatacgcacaccaaaagcaccttcctggtaaagaataggagcaactgatgcagtaacgccttcaagggatttaattctagttaaaagggcttctttacaaatatcaaggcgttcatccaatagtttgaacagtttattactgtcatccgaacttttataatttgcatccagagctatcctagggaggttcagtgttactacccctagattattacggccatcaagaacgggtttgccagaagagtctctccaagcaccaaggaaacttctacagcccattggagatacaggagtttctgaaccggtaattgctctattatttcgagcactgatgatatcaggatacatgcgtttagctgcgcattctaatgcaagctgcttaatatcatagttcgggtcttctttacgtagattaatgccttcttctacaaacatcacaagctttggaaagattggagtaattccatcacgtcctaatccacgaatacgattatcaagaatagctcgttgaattaatttttcttcccatgacgtgcccataccaaatgtgatagtcacaaatggagtttggccgtttgaactgaacaaagtattcacttcatattcatatgcctggaaagcatcaaacacgtctttttctgtttttgaaatagcataatcttttactaatgctacttgatatttgcgagcatcacgtacgtgtttagcgaatgtcttctctacataaggagccaatactaaatcgacgttagcaaacgtagttccaccatattggtgagatgctacttgtgcagtgatttgcgccatgatagcagtagctactccaatactcttaggagtttcaatttgagcgttaccaagtttaaagccattctgcaacatacccttcaaatctaccaaacagcagttggtgaaaggcaaagctggactgtagtccatatcatgaaaatggataacaccttctttgtgtgcttccattacagaggcaggaatgacctgattggcgatatgtttagatacgataccagccatcaggtcacgttgggtaggaaaaacacgagaatctttgttagcattctcgtttaaaaggtccttgttggttttattaataagtccctggatttctaattcgatattcattttaaactcttacgaagctgcttcttgtattttgaagcaagttgtgattttccatcactttcctcgtatgtaaacccatgcaattccatttcagcaatcatctcaggcttaccaagacgtgaaaagcgtttagccatatcggcaacatattgcgggtgaatattactgtctttacgattctggcggagatagaccagcaaattctctaaccattcgaggtagtcaatatcttgaccttttaaaccagagcggttgaacttatgcttcatttggccttctgccgcattacacaggttacagagcaagcctctgacctttcctgcattgtcaccttctaacgcatggtcatggtcgaggtgattcttttgaatatcctcatctaaaggacgtttgcagcaaggacataatccgttctgtgcctgatatagtttttctttttcttctttatataacttaccggttaataacatactcttacctcagcgattagataagagtatttatagttaaattaacgagtaactactatagatgttatgattagactcttttatgcagaaagaagtacagaaagcatagatgccttcataatcatccgcattgaactcaatatatgaattagtttcttcatgaagaagactcattttagtccaagccattccattgatgtcatcgtcgtaatagcctccactaaattctactacatcgccaacttcataccaatgactgcgtaaaatttctcttgtaacacgatgaatatcagcgaaatcgagaatttttactgtaatagttttagtaatgcacgatttagacatggcgaactccaagacgttgttcaagtgcgacaatgtaatccgcagctttttgcattaaatcatactcttctgaatcacaattttcctgtccagcaaaggcataaagagctctggtaattggaacgattgcgccttggaaatggttaagtttaatttcagaaatcagaggaacatcttcaccttgaccaatttctttaatttggtgcatcgtatcttcgctgtagaaacaccagaaccaagattcgccgtgtggagttgggtcattaattgtgatgattttatttgtgagcaaatcaattactgctgtaatgccacatgtttcaaggtcatcttcattaactgcattgataacctgaaatttaaatccaggaacaaactggggaaattgttcagttaattcatcatcattttctataacttcaaactgcttaccaataagttccattcactttgtcctcataatcaagtagttcgttaatggtaggttcagaagtattataatcttcttcaggaatagcatcttcctctggctcgacagtttcccaccgagccgcataccaaggttttatgcctttgctgctttgcatggtgccggagcggaatcattaacagaatcgtattcaatacgccattcaacttcagtacgagtaactactttctcgtgacgagtgacgatatctacttcaggaggattataataccaatcggtatgatatgaacctgaacgagactctgataccatgaaatggacgccgcgtgctggataataccaaatctgagaacggctttgatacttatggtcctgtgtccaatctccatcttctactaaaacaaagatttcttcctcttcatcatcaccgttcggtggatattcgaaatcatagttgtcgtcccattcgccagtgacaccagcaatatgtttgatttctttaagcaattcagcgttagtcattttagcctcgcagtttttgtaagtcttcatcgtcaatccagctttctaaaccagatggaagtgagcattcaatttcccataacagttcttcaatagcatggagacgatcaatctcttcagctggaactgttaccattcgtggagtttttaaatcatcaatatcataactcataactcttcctcatgccaagaacaatcaacttcaaaatctggtccgagctcttcatcttcccaacgccaagaccctaatggattaccagcatcgtaatcaacttcaagaccaatataactccactgaacaccatgaatgatatttccttgctttacaaagaattcaccccattggtgcatgaaagcatactgcggatcagatatagctctttcaatcattgctttacgaagattacgttctaaatctacttggtcgccttcaggaaaaacaaactcaattgggtatttcataatttcaccatacactcgccgtatttccatttagacataaccttaactccattagagtaagttacctctacctttgctcggtgattcttaatctgcttaatttcaccggtttctaatccgccatagccgtaataaagagctacaatatcaccctcccgaaggagggttccgcgataatcatgcattgaatttgaatttacggagttcatcaaaaccgccgatatgtgtgccatcaggagcaaaaatctgaggcatagttaatccaacctgcgattcgcgacctagacgacgaagcaaatcactgataactacttcatcaaatacacctttttctggcattacattgatgaatgcatactcttgtttcttaacatcgagcagacgctttgcattatcgcaaaacacacacttatgaatgttgctgtcgtaaccaaaaaccgtgaacatcttcttctatttccttaaatacttgagcttgaacttggttccaatctggatggcatactgctttaacgtaatttgtcataccaagacgcttcattacttcgccatcaattgcagcttgggcaaaatttcttccacgagtcatagctcctttgagtttagaactatcaactatttgaccagtctcattataataaaccgaatacatgagtagcattactcgttcggcttcttccatatatcgtttacgagccattttcagccttagtggttataactaatgttttaccatctaacgcatcgagaatatctttgatgcaattatctggcattggttgaacgctagctaattgcttggcaatatcatcaggaattcccatgcgaggaatatttaatttgctaaaatcaattttatccattagcagttaccgggaagtgttctgccaatttagcagcaatggcagcgttaatttgatcagcgaaattcttattcattgcattaacaatgatttcttgaattcggagattagctctttcaatagacatcttaatacggccttcagcttgcttaacagcgtcatcaatagtttgacgaaccatatcatcaatagcatttttagcgcatgattgggcagcgttacgcatcatctgtgacatttcttctttagcagacatatcattccaaccacgagtatggaacatctgctgaagctgtttcttaacttcagctcgtacatctggaatagttactgttgcaatattaacttcagattgtactgcttgttttagtttattctgggaatcttttaacaccatttctttaacgatgttattgattaccgactgctgaagctgggcacgagcttctgtaccttctggaaataactgtcgtactgcatgtgtatctaatttaatgtcaatcattttacctttttcactccaggaatattagagatagtttcaaatacttcgtcaaagttatctttatcaacggtgactacaatagtgcgagcggtctgtttctttttccaacgtttaaagaaagtggcaagactcaaatcatgggaagtgaagaaatcatcggttttgtaaacatatccgctttcaatttttactaccgcatcaggcgaagggtcttcatattcttctacttcaacatcatcaaagagtattaaagtgtcatcatgataatagccttcccagaaggcttcatcgttataaaattctttccaaagcgcgccagtggttttcatttaatcaccttcttccaagcttcgtgagcagcacacgctaatacttcgtcatcagtcaaattgaacttgccttcattacgacgagcaatcatttcattgaattcagtatcagttctaagcatcatgttaagaactgtaaaatccattgtcgctcgaagatattctttaagctgcatagggtcgatgccactttcgtatgcgtcaagaatcatatctgcaatgatgttatcaaagtttttgtcttttatgaggttattagcatactcgacaaaaaacttagtattagcaccagtaatagttttagtaatcattttaattttctctcaaatttatgcttacaagtccggcatttcattttcagaatatcggttgtccaatcaacaagctgtacttgaatactaccacatttttcacaaggcacaacttgtttagctgcagcttctcgacggtctaccatttcaagacaggcatcccaatcaattttaaattcaggtacaggtggatactcaaactcaatttcaaggtcgttatcatcaacgaccatgtcttcttttaattgatttttcacagtaagctccgggcatactcgagagattcataccgctctttgtactcattaagcgatttgactaaatccgccatcatcaattcatgcttacttaattcagcttcttttgtatcaataaaccgcttaactgattccatttcagctgtaatactgtttttggcaatttcaacatgatttactggtgttaacggaagaggcttaacaacattgagatacatatgcgctacatcttcatcaataacctgtgtgctcaatgttttaggaaaaatcttaaatgggtccaaatgtacttcaagaacagatgagttttcaccctgctgtttacagcatgattttttaactacatccatatggtctaaagcagtacgaacttgcgctaaaagcgcccgggccggatactttccgctggacaaatggctgttaatatgaattcgtacagttacattgtcaagttcttcggcacgaataaatgaaacacccttaggatttctagaactagtagaagatacctggtatttcacacggtcatcgcctttaagtaagcaaattgaacgattaagaatacgacgcaggtttgcattaaattcagagcagaagatttgggcagcgctgcggtcgtgtctttcttcagttttaaacgcccctgccgcaaagctataacgctgaccataaattttagcattgccgatagcaaactttttgagctgtttctctgctgacattgcacctaaccagcgagaacgacgaatgttttctacaacaaaactgacatagtttgcttcgtgtgctgccatgctatttagcacacgacgagctacgttaccagcaattgctacgttataagcagctggatttaaatcatgtaaagctgccaaaacctttacgtgcttctcacgctttgacaagccctttccattatgcttatcaaattcaccggctacaaacatctttaattcattcttattcattatcttttcctctattttggactgggctcaaagagtatctcaaaatctccctgaacccattatacaacaattattcctcaagcattataactttgcttgggcgcttatagaaagcatgagttttatcatctttcgctaattcaaatgtagcagtaaactgtactttgcctctgtattcaaacggaatactttttggaagggagccgtaaaccgtagctccattctcaagtacaaccatcatcttacattgtacgccgtaatagtcttcataaacttttactgacgttacggtaccggagacagtcactcgtccttctggtgcatcccctttattcttattcagctcattgaatatattatcaaagacctcttttgaatgttcctggatagcctctaagatgctcttatgggctctaacttctgccataacaacatccgttccgtcttgcaatttccactctttatatggaacgcgtacttcaagaggataaccatactcacgaagttctttatactcttcttgagttaagcggagtttccaccaaccgtggtcacctgtatactcaggcttatccagtgaatcaaattctgtaacatacggcaagtaactgcctgcgtgataagcttcaacttcacctaattcattttcccaaagataaccatcaaagggagcatgaggacgatcatctttgccccaagtaggagctacaactttatcaaagtattcacgaccgaaacgggtcttcgcccatccagcattcaactcctcggcgcgtttttcaactttcgctcggtgtgcttggcgggctacacgattttcttcaacaagtgcagagataatctcggttaaagttttcattttattctccagtttggttgacgagaccatcttatcaacagcctcgccgaaagtaaactactttgtgaaaaattttctccaaagcagaactgcatctctacgagatacttctactgctcctagagcaactgcttgcttgcgacgaacatcgcgcaaatcatagtgtggaactcgcttatcctggaaccaagaacgtttcattccgatggcttctgccatagcgtgtaactcatcaaggttgtcgctaaacatatgacagttctttacttgatgacctctcattttccaaccatgattcatcaagacatctacgtatactgtcatttctgattctcgatgtaggtttcaatgatgaactgtgctaaacacagaagattatcttctgaaggagaatctactaaattctcaaccatttcagaaatagttccaaaagcttcttcagtattgaacatttcttgaagttcgttccaagtaggtgctttcatttcaatctcctcattagttaacgaagctatcttatcatggcttttctaagatgtaaacaacaaaagggcccgaaggcccttaaaaagatcggaaatcactgttaaaccatggcgactggtgctgtcgctgcttaagcaatttcacttgatgtttcctattgtcttctataagcatcttagaggcttttagctcttcagccaataataactgtttacggtccatcaggatgaggttctgggtcttctgagcaagtgtctgaatacctttgagaccttccacagattcctccatccctcgtttatacttggttcgggcagcatttaactgcccttcgtaatacgcatgtatagacactatagtactaaacacattttacctcaataacatctaagataatatcttcaacgtcttgctcagggaatgccacgccattggtctgcccatgctgaaatactgcttggtacgctgacggcgcagaaattcgggttgaacgttctttattgtcatagcatttgccatcaataaagcgtttaaatttaacttcataggtttttaacattattacaccttagcataattgacgatttgttcacgatcagcgggccaatttaaatcagaacgtttcttgtttgaccacgcaatattttcttcagcccaatgaagtttagccgatacgctcttttgtacgtctctgatggcttcttcaagataaatgcctaaatctctcgggttagttccttgagttttaaatgcattgagcaaaatatttcttacaacttctttaaattgattttcaacttccgggtgaataaattcacgatatccgctgcacggatatccaaaagcatctaccatacgagcagtactaaattctttgttcataatccgagcgcctcgcgttcatcaggatttaatttagccaaagcggcttctttaattttttccaaccgtttacgcttagcttcaggtgtttcttcctgaacactaatagcagcgcttttaggaaaagtccatgattcgccattttcatcggtgaatgtaattagttccgttggcttacgattaactgtaccatctgagccccaccaagactgccccttaactgcttcttcggcaacgcaatatgaaccataataaccaaacaactcactacggcgatcgtctggagagacatacgctgcataggcttcactttctgtcattacccatttcattttagcacctcataacgaataagttcaatacggtttttaagctcttggtatgatttacgccaaggcttataataggcatttaaatcttggtgttgtttatgcatttcgtctaaatgctttactgcatcctgcacatttgcaaggaaagtatcaaatactttattagcgtattctttcctgagctcaatgaacggaggagcacgaaatacgtttaccattacacgtagttcatgataagaagaatggacttcagctaatacatttttcttatcgccaaagttaaacttataaagtttttcacagattgcttcacaggctttctctgctttacccttgggtttacctgcaaagatatgaccaggcggatatactttaatatcgtttaaccaacattcaatatctttaatagctgctaaactcattgtacccacgctccattttcatcaatgtaattaatccactcgttaatagtccaggaagaggtatcacctttaggagtatcaacgatatacattccgcctttaaacaaaacacgttttacatcattagaaattaaagtagccattatattttcctcagttagggaggatttctcctcccattaaaattatttcagcattgttacttcagcaatttcacgccagtttttacggtcagtcgcgacgaaatcaccaatataaagagcagtacggagagatacgttacgcagacgatttacgttatctttcataaattccaaaacttcaataacttcagaatttcttaacccacggttctgtaacatagaagtagtcattattacatcttgaacacgaaccataatctcttcattagtgtgaacaccaaggtcaagataaactgaacgtgataccaaggcttgaagatgcggagcaagtttagaaccgcgctctaattcacggtcaatatcaacgttagtgataaagaccacagtaccttcaaactcaaactcattaggaattcctttatcttccaagaaagaagatgcagtgctccagcatactttacgtttctcccctgaatccaaagcagctttcagaaggttcaaaatatccatatcagagaatacatccacatcatcaatcagaagaactgaatttgcttcacgtgattcccaaagacggcagtataaaccaattcctgagattttgccgttcactgatttgtaatcaatagcgttagtatcatgagcatgttgtaatgctttatccaaagagtaagtcttaccgatacctgctgctccggagataatcagagaacgaatattcccgtggattaagccgttagtcattaatcccatgacgttaaagcgtttcttgatacgctctttcatttcatcaacggattcaacaacttcaattttagcagctactccgtcaattgtgatatcatctttgaatacccaaacaccgcgctttttgccattcagttcaacaaagactttaccatcaccctggcgagaatcttcagcacttaagctatccgggaaccactcaccgagtaactcataagtacctgaaatctctttgccgaagtaaatccctttcttgatggtgatagttgacattttattctccgttactctgttttgttttgatggagctatagtatcaccagctcgcgagcttgtaaactacttttttcattcttttgaaacaaaaagaggagcccgaaggctcctcagttatgcgtgcttgttgatagcattttctgctatacgttttggaagtttacctgcccagcggaagaacatgataatcgctccggcaataaacgcagggaaccaaaagatgagataaaaccaatactctcctgctttctcgatggttccatttttgattagatgcttacagacagaccaacccacgacaaagtaaattattgcaacaacgattggcactactacgctccacagtaaaatcatatttcagcccaataaagtgagaaccggagctcttctccggcccatgacataaatcggtggatttgttttcgagttggtcgagcagagaatttagcattttctctacgaccagtctctctgcaaactgcttccaaataccaccgtctacctttatgaggtcttccgtaattcaagaagaccttcattgtatcatttgtagtaagaattgtggttttcaagataaaccttctcgacgaaatcgtcccagaacttcatgtctactttcttaggcattccgttcttttcagcagtatgagctagaatttctacttcatctactacagactcgagaagctcctgtacttctttgaacggtaactcacctgctttgaccatcttgaccattttagcatgggtcagagggaattgaaggtcaccagtcatatagatttcctgaagctgcagacctgcacgaagagcatgactcagtgctttccagtcaacgccttcgttagcttctgccttacgagcacgttcaccatattcagcatcaagtttctcaagagaatacttcatctctttgatagtgatagtcgtctggaatttacgacccagaacgttataaaacttctgctcgcctgatttgtggtcaacgaaggtggtccatttgaggaattcacctagaggaagtttctctgcgatatcctgtactttccaacgctcattgatacccttctgctgaggacgatcgtcatatttccattcaggaacatctctgataacatccaggactttatgtaaatctgctaaacgagaacccttaacgccatacttacctgcttgcttacggacatatccaagataagccttcatgtcagtggtatagaaacgagctcggttgtcttgaatgaatttccatacttcaggaaggtcagatgcaactaccaattccggtggagtatgcagcatatccaacgcgacagtttcaccgtcagcagcgagcttgaagaaatactttaagctgaacaactcatggtcaatatcgtctttggtatttttggttgcgctgttgttagtattacgattggtgtggttcatcgcctgacacattagaatatcacgcggatgaggtacaaagatttctttaaaatccacatctgactcgggagttgaagtaccatacagatgtgaaccaaaataagattttacgattgttttcataagtaaatatgattccctttagcgaatttaactaatgcattagaacgcttggctgcttcttctgctcgagttttatctgtagttctttttgatgtacggtaaacattaccaattttttgactggtgtaataatacaccacttcgtgggtatggtactcttgtccatcaggatgctgttcacgacaggtttcttcacgcagtgtggtttcatacataggaactaatgcccaatcaattcctgtgctaatgattgccacctgaatgtcaagtctgttccagcgaaatgcattgatatatcctaggacccgtgattccgggtccatcattgcgaatttaatgttttcggctgaagctaacggcatctgtttcacaatgctcatactaagttttttcttagtagttacgatttcaatttccatgacccgccctcataatgtatgtctaaatcaatgttatctttgccgctgtacttgccagtcaaaggaataaatttaaccgtaaccttttcgccgtcatcaaaagtaaattcggcaatagggtatgtagaaattataccacgttcggttttagcacgaaatacggcccgaaggccgttcacaatataaacttgatcattcttcactaggttcacctactgtaacatcaagcatagatttaacgagcgagatgtcatttgtactaaacacgtgagcttttcctttatcgttctggcaaaacatgcttccatctgctgcaattgctagtacttcatagcagttattagttgtagagaatttatcacccactacaagaggaacattaactttacacttctcataaactgtgtatttaaggctgctgagattaattaccgacttggaaccaccgggtaaaagtttacagatataaaatccatcatctgaagactcttttaggtaatcatcgatatacattccacggtaaccatctttaggatatactacagtagttgtttctcggctaccataatcgtaatatactacgattttgctgtctttacttttaaagaaaatcgataccgtatgcgctgagctgcatttgaagatagaaataaattcaacttcaagctcaaatcgattgctttggttatcaaacccaatttctactttatcaccaacctttaagggtttttcaataaggctttcttcaaatttcgtgcgaataaaacgtttcatttatcaccttctacataatcaatcattgggcagactttccgcttacgggcttttaaatactggacaaataccgatggttcggcttctgcaggaagaccagcttttactcgagcaagttttttggtatactgtttctgattgcggtagtgtttaaatttttctaaaccaaaaataaatccaaacgctatagctgcaaataaaagcacaaatgctgctataactactgcgccaactggtactgctataacatttaaccaaagcgcagataaactaatacctatccaagcgagaattcctgtatccgccacaatcggccaaccgaacatccatgcaacagaaccgatgaatgtaataatcgccgaagaaaacacaacatgaagaactgtcgtccagaagtatccacatagagtttttggcattttccacatgctgccagatttaaaccacaggttcattttgaaatgccaagagtttttattaatattcattatcagtccttcatagttggaatcatagttacaagatatttgaccagttcaatagcgtcgcttttatcaatagctacacaatctccgtcacgttcaatttcgatgatagtattatgttcatacgtgtggaataccgtaagatacaaatcaataacatgcgggctttcatcttcaattactgcatcgcctttacgggattttccgtcccatactaatttactcgccatcttttgcctctatcaagaattgaattaatgaatcaatttgtttagtatcaagatgaattatatcattgccttgttttagcacgatacgactcaactttttagtgaaatatgaattcacaacctttacacgcacatcactgtacggattatctaaattggtactatcaagaatactttccataattacctcaattgtgaatcttttgaaccacgacgattataagcagaagtcattacaatgtcccactttccttgacattctacacaccgttgacagcctttaaccaacagacgacgagctactgggatttcctcatcacaatcaacacagaactcttcggattcccgctgttcttggagttgtttctgaagacgggcccattcaatcccgtctgctattgtagcttcgcgagttgcaaatccgtcatctgatgggccccatccattcatttcaaactctccagaatcatttgcaccaaattatatgtaaacatcggatgctggtattgtaccacaatgtagatgataagtaaaacgtttctcattcttcgccatcatcaaagtcgtagtaatcataatcacaactatcaagataagaatccataaattcttgttgacggcggaaatcttcagaaggggtcagtctgtctgcatatgcttgatcatctggatcgctgaacttgtcttcctgaagttctttaatgaactgttcagcttcttcacgcgtccaaaacccacgattaagattatgaaccgaacgcttttcacctggcttgaatacgcccatatcatgagcagaacgctcagttgaataactttcagtttgaccagcatagttttcatattcacaaatcacccggaagaaaggagattttcgcgaatatacaccgcgaagaccgagttcaacatcatacgtgcctgaagcaacaatgtaacgcgttatttcgccgcttttagtttctgtgcgattaacaccacacacgtgataaaagatttttccaggttgaagctcggtggttaacttaatcataatgtttttctcgtttggttgttgatatgtctatagtatcatgtaatgaagggaagtaaacaactttttgaaaagaaaatgcctcccgaaggaggcggagggtattactgcaatgataacaaatacttagtcttgtagcatagacctgtaatgtcatccagaacactttggagggcggcaggaactgacttgtagataccatcggccttagccagaatgaggtctagcatttcaatggtgtcctttggcagctctttctgcgatggtaaagccggtgtataactcttacctgagaatcctaaccactgctcaccaaaagcatctatcaaatctggaatctcgttaaagaaaacttcatacgctttatgtctggcatacgatttggtatcaaaatgcgctgaatgaaaatacgcctgagacgccataagtaaaccgatgaattcatcttgtggagtaagtttaccgtcctttacaaaatcattgaatttcattatcgagttgtatcctcatgcggttagcatattcttcacctgctgaacgtcctaaagaatcgcaatctttagaacaagactcactcttccatttactttgtataaaagaatagaactgttcagactcttgcttactaggctccttaaatttagcataaacttgtagagctccctcaacatacgagttataatccgaaatgtcgttgtgtgatgcagctgggagtgaaatcccgcagcccaacaccagggctaagcaaatgtgattaaaggccatacggcctcctattatttttgtccagtattacgtttgtgctgaagtacagccttaacttctttgaggtatttgtccagcttacgtttacgggtataatctgcttttgaactgtgctgacgaatttcttcctgaaggtgcgaaataccatgcccaatctcacgacgaagttcgtccagttgttctacagtaagattacgaagttgcttttcacttaaatgctgcatatacacctcatcagttagtaatagtatttatataagtatgtgttacttaatcccaaagccattcgcagatgccttgctcaatggttctagcaccagcttcgtcccagttatattcttcgtcatacttcaatgcgcgtttaatttcggctttatgaaatagacgtgggatcggcatagcataacgggtccaacgtagagttttccagaatccatcgcgctttgatttagcaatcagtttcttggcctctagcggtctttcccgattttcagaaatacgcagttcaacatatttctgttgggtttctttatctttctgagttttaacgtattcgttatagcttttaatataagcaaattcgttattattctgatcgttccatttggaagattttactacatgccagcctttacggcgaattgttctagacattattacctcgttaagttaaagtacctcaacgatagtaaaatcctgatttaaaaaatttaatattcatgaatagatgaccttacatttacatttaggacattcaggttctttatttttaagacgcttggtagctgtctttggagcagtgttgtaatcatatacatgaagacaacggtagcacatcacatattttttcatattaaaccatcaacgaaagcaatattacgtacagcaagaatccaactacgaatcctagtactataccacccgctatagcaaataagctactcatgtttaatataacacccattcatattagcaataaagtctttaccctgtgccaatactttacattcggaatcaagacgattttgaagttcttctcgtctatcgctttgaatagatgctgctacacccatccaaatgaatagcatacttaaaactagcatcaggagagtattatacgttcttggcttcatcataagcacctaccagttcgcaccagtgtttacgacaaagagaaacgtatttgtcttcaccaccaagttctactacttcaccatcggtaatagcatttccgttttcgtcaatacgagctaccattgtagccttacgtccacagtggcaaacgcccttgagctcaacaagtttatcggctacagaaagaagagctttagaaccttcgaataactcgccgcgaaaatcagtgcgaagcccatatgccattactggaacatcatacaagtcaacgattttacatagctgaagaacatgttcagcagtcaagaattgtgcttcatctacaaatacacaatgaatatcacgttgtgtttgtgcccacttgaaaaactcaaggatatcaatagattcgtctactgtattagcttcatgacgaagaccaatacgagaagtaacttccgttgccgaatcccgagtatcaatagcaggtttcagaatgagagttcccatgccgcgttctttatagttatgggctgctgtaagaaggttagctgatttgcctgcattcatactcgcgtagttgaaataaagctgtgccattaaagtgtctccataaaatcagaaatagcattcttagaacgaatgagttcatcgtattcttctggtagaccatttccgtaaatggcactaatagctactacttgctcggcacctgcataatcgtcaatcaactgccacagtttatttttttgctctttagtaatcatctatttacctctaacaagacgtatttagcttttagcctcttcatattctaccactgtaatgtcaatatcaggggttgctaaattaataagtttctcaattagttcccaatcaccgccagcaataccagcaccaatctttggaatgtatagaggacgattataaacaatacgaccagaatttagttcatggaatgcattaaaaattgcgccgtaatcaacatttggacctggagcatactgagtatacaaattatagcaatatgcagtgccattcttgtgaatggctcgagtatgagttccaagcttggctaaattattgtcataataacggtcttcatcgatgtcaatatcgagaattggaggatatgctttagcaagttgtcctgctacaccagcacccattgtagtaaagcaattacatccatgagcaatatcgcattcatgcttcatgaataattctacaatattacccttaatatatccagtaatcatttattcacctatggaattttatatgttgcatattcattaagattattgtatactcttaaaaatatagcattgttacaattaaggatagggttcagcactccttgttctttaggatgcattactccgtcaatagaaacgccatcgctctgcattccacatccgcgagcattatattcgacaagtggaactattacctggtcatctttatcttggtaattataaaatgacattagcaattttctactgctaggcacaaatgctatttcaatattgttcttgaatggaccgttgctttctattttagtcccctgcgccgctagtacaggttcaggatagcctgggagcttttcccaggcattaactgaaaatgcgcagcataataaaatagctgcttttttcattttgatgatagtcctgacatataacgagccattaattggtcacgatacattaaacatatattttcgttaggagcattgacacataaatctttcatgctcttagccttacgatttattagtgttgtccactgggccgggctacgtgaatcttttactccatcgctgaatgctgaatctaattcaagcgctaatatatcaacacattcagagttcgtattgcaaaatgttttagcgatacgaagtgaatctgtcattgaattttcagcattagcagagaatgccagtaccaatccaagaagcgcggcgtactttaccattattccacctttatatgtagcattttatgtttctttaagaaattagctttctctaggacatctgacgcataagagtttccccttttgacattccatcctgcattataactagcaagagcttttcgcatattgccgttatgtatatttaaccaatatgaaagctcaatatatgcccattccgcggaattctgtctagatttaagcatttttcttatttcagaatcactaaggtttttgccttctaatttagctctggctttaaccgtaggcaagtaattttgaaataccccataagaatgatgcccctttcctgcttttaaattggctcctgccgaagattctttccatgatatagcagccattatatatcctaagccgttattatcatatcggttatgcggagatttttcctttccggatttttgatattgctcaccaaaattatatgcgtaatgtaagttgtcaagttgaacattactgaaagttggctcagacccaaaggccgttgaacataaggccattagaccgataagcgcttttttcatgtttacctcaattaatgtgtataacttttgtgctgattttacctttcaaacgtttatcattaacgaatgccatacgacactttatactaggtccttttcctggtcttggaatatccatggtaaaccctagccacagatttccatccgtaatttctaaccgcattggcttatactcgatgttttcatcaatgtcttttgggtcaattggaagccaaggcattgctaagaattcattaatttctttaagatgattaggaattttggaaagaacagagaatacatactcttcatcaatttcacgttgaatagcacggtccaacaaatgatcagagtacttagtgaagaaaggctctttaccctcggctttcgcccgggcacgaacagataaattcaaagagcgaaaagcttcctcaaacttacgacgcagtttagttctgcgaatgaatacttctgggttagttgacatagttcattctcctttgtttgtagggccatagtatcatggcccgtaaggaaagtaaactactttttaatatttttcttctggacagaacactgcccggcaagcccacatagaagcttccttcagtttctgttttgctgtacgaatctgggcaatacgttcgtatgcttcatcgagtacctgcttgggttcattggctgactcttggtagttgattaatgcctcttcttcaagagcagtaaagataagaccaagacgggtttcagcgtctttgatagcattcactttaccaattttttcattggtatgtggcttgtatcctttaatatcttcgattgacattatagtgcctctgtgaaagtacgagcgataacgtcgcgttgctgttccggagtcagagagttgaagcgtaccgcgtagccggaaacacgaatggtcagctgcggatatttttccggatgctcaaccgcgtccagcagggtttcgcgacgcagcacgttaacgttcaggtgctgaccgccttcaacttttaccgttggctggtattcaatttctacttcacgcgccttgtagccataaaaagtttcagcatccgtaatagtatcttctttaagaacttttgaaacgattactcgtgcgtcatcaccatcttcgatgtaaatggtgcctttaagttcaccttcaagaatttgatatgctttcatatttcctcttaattagattctttattccaaccacgcatgtacgcggtaattacgtccatagtattccactcagtagaatggaacttggatgcagcctgcaagtacgagattttaccttctggcattaattttacccgtgctaaacgttcagaaatagcagcgtctttccatgtagcaaaacccgttggtccttttaattcttctttaagacgaataacttctgcttctaattcagattctcgccataagcgttctctggcatcattagcataaagtatttcttcatcagtttctttatcgtactctacaatttcaataggctcatcaactccatatccacgagtgcctatatacgttgtagcttcttcccactgttttgtggcttcattccaagttccattctgatgagcttcataaaaatcttgctcaccagaattactgaaccaatcacagaagctttcaactaaatgtggaggacactttataacaatttcagccattgcattgttttctcttgaatgcgttggtcatatgtgattaagcttgaactaatcacgcctttgagcttgccagatataaactcaattctaaaattaggatagcgattcatccacttcgtgttaggagcattagaaatgaattctgcacctttaaacggaccagacagaaacttgtagcgcttgtactcaagcaggtttccagccgtaaccattgttattaattgcttcatatcggaaaatcctgtattttccattactgtaatcatatcaacaatttctgtctgtgtcatcattgcattcctatcacgaaaaataaaggtaaggtatcattaggcatagaccatctgatagcttcctggtacatatcatagaacttcatcatatcgggaactttcattggttcttcaatgataattaatgctcttccaaactttcttcctctaaacttataagaggaatcattggatagaaattccctgattgtcatcggaacaattgatttagctatctcgttagccggtaatttattaattaaatgcgatgaattatattctcgtagaataccttccatcagttcagatgattgtgtgtatcgagtagataagattataaccgaaccatcttcaagcaaccaatcggtagcgaattggcataaggctgcggtctttccggtttgtcttccaccgtctagacgaagggtaccgtactctcgcataaggcaagacggttcataaaaactgtagttgggattattcaatcgtctgtctgcagcgtctctgaaagcatgcatcagggtcaaataaatgggagttaagtgtttcattttagattccagttaaaggggccattccttggcacatgtttaatccatcgacacactatgtaaaccccttaccgcacttgggctcgaccttattacaggtaggaaaagctacttcactcagaggactcgacgttcatgaggagaggtcgtgttcggctttattaggaaattgcttacttaattgatttagcgtaacgaatagcgccgcgatcgtttacgaatgcaattttaccattacgcatgtacatggtaacagtacgttggtaaccgttagaagttttgccagactgataacctactaatgcaaagttatcttcaccaggtttgttctgcttagacttaatacgctcatgaccaaatgccattaaggagcgtgcatcgccagatgctactgctttgcgagaagactcatcttcaatagaagaggtgaaatcatcgaatgaatcaaacttagcatggctcttattatataacttgccgtctactacgtagttatatccaacaacgtccatttcaatttctgtaccatcttctagcgtggctgtcatcttctgaccttttttaaatttcagaagattacttccaacagattcagtcattacgccaactgttgctaaacgggattcatttaaaaattcttgataagttttcatttattttccttgataagcggcccaagttccggtccgcatagtttcaattacacgacgagcacgattaggtgtctgacgataccaacgtgaatttgccagttctttggcagcagcatcccattttttagcagctaagagcttcatggaagcagggaatccagcgacaccacctacacccatttggaataccatgttaattagagctgctctacgaacatcatctaatatattatataccgggcttaatgtagcattagccacaatgcccttaattgctttttcaacatcctttgcaaaaattacttctgcctcagcctgggtaatttggccaccagtagaacgacctacaagcttgtccaggttagaaatagccaaagattttgacgggtctttagtcagtaagtggccaataccaatagtccaatacccttcggtatctttataaattttgctatcgtatccttcatcaatacgcagcatgccaaaaatatccataaggacctcctattaattataggagtatttatttggccctgcacttggctatgaataattcaaggctacacttctcgtatggtgtccatttacctttccaccacacataatctcttctatcgtcctcgggcaattcactaaatcccggatatagctgttctgctatataatatgctgattttgtatactcgccgtcaccgaagacataccgtgacttcattagtgtacgtgacaacttatctcgaggatgaaatatgctaatccatcttccgtcacgaacaaatcgtagttcatgcttataaatgtgtggaatgcctaattcaacagcttcttccatagtaacctcactgggctgtgctatacatctgtgtcatgattttatacaaacttggtcccatcacatatttccattgagaaggtttaattaaagcaaatgcgtcgatttccgggaaagaaattccattttcatctttatggtaagctgtgcaacagcaattcttaaacacttctgggctcacagggagcatatatccaaacaaatggatatccttattgctggcataatcatgtcgtccgaggtcatataagaggtcctggtcaaacccagtaaaccctgtttcttcctggcattcgcgaatagcagcttcttttggtgtttcaccaggctcaacatgtcctttcggaatatcccatctagagcctctgccctggacatatgtatttgtcatacgacccatgaaaagccgtttgtcatcggtaaagaataagattcctgcactgagctctttcattggcattcattccaactttcttcaagaatatcttccatggcagtatagaccatagactctagtacaccatcacaattatatgaaccctctaccgagaaatcacagataggtccattaataccaagcagttcttctttaagtgaaatctcgataccgctcagtgattcattatcgctgtaacacagaaggcgagtatcaccattttcaaattttacatgcactgcaacagccattatttcatctccttaatccaggataaagtttcattacgagaatcatctttagatttttctttctttactttgggcttatcaaatacgccccgctgtcgctgggaaacgaattgcaaccaacgagcaagcattgcaaaccaggttccaacccctgacatccaacctagatagtacagcgtatcaccaaatactggtgaaaagaagtagaacccccagaatatcccaacaccaacaaatgttgagaaggaaaacaggataagcagaaataggaagaaatacaagaaatcatcatctttaatcattccacgataacaagttttaatcattttctgcagctcctaatccaggtgttgaaatcttctttttctttccacttcttgtatttcatacggtaagctaaaaatgtgcagcaattaatcaacgcgataattagcatccacatgaggctgaatgcgaaaacacctaaaaataaaagcataatcataaactctgagacgttcaatccaaagaatgtccctccaacaattacaaaagcacaatataaaatccatgtcacgattccaaaagctggcgccagcccatcttggttccaaaacccgtcaggtttacattcattcattttcttctcacctctttaataaactcaaacgactttttgcggttccattcaagagttaaattcttgcactgttctttccattcagctttacgcttataattattgcgagaccatttaacccatcgggaacattcaattaatcccatgatgagcaaactagttccccaccatgcaagcagaattccgaataacactgccggtgtaatatcagttaaatgcatgatatcaatcgcggcaaaggtacacattgcgccgacagttgcaccaataccaggaacaagggcataatcaatctgatcaaatttatagacataattataaacgggaggttcacttggcagatataagttactcatttctgcaccctctcacggcagtatttgataaattcatcaatgattaattgtttgcctaccatgttgttagagtcaaacatacccatgacttttggtggtaattcattaacacagtaatttaaataattgctataatcatcctgagatgtcacgtatttaaccagattaataccgagacgataactagttttattatagataatctcgataactactgtatatgttgtggagctagaagtaaaatatccatcggcattagtacgagctgatgttagatttgatggagaatcgttgaaagaataaattccgtaccgaagtgcaaagatatctacaagcttaactccgtcggaaatagacgaaatattagaaattaagtttttcagcttggaatagtctttaagaacgatagcccgcggtaaaactgtggtgttatacccgttatagcgagttttccaattttcaggccgagtatcagaataagcaaatttctcaagaatatcagtgatttcttttgggaatcctgctgcaattaattctttaatttgaggtgttgccattggaatatctccagcgcattcatataacattttattatccaagttaggggcccgaaggccccgataaaattacttcagactttccagatattcctggacatcagcagtggtggtttcaataccaggctgagtaccgctgaaggtttcaactttcatcatgatgtcttgtacatctactttagcgagttccgcgatttcaatcacgtcatcagcagaggtaatacccagagcagaagcattacgggtctcacggatgtattcgagtttcactgccaaatcaagacgttggtcatcaagcttaactacggtttcttcaatttgggcccgcatttctttatattcggcagctttatcacgtaaagccttagcagtacgacgatacagaagacccagtttagcatgggtttctacattcataccttctgccatcaagcgacgaatttcgcgctctttggaagcacctgcctggtctttttcgtcagcaagtttcagcagacgcttttcttcatttaccgatttaacatgcgtggtacgcagtttagtgatttcatcaataatacgatttgccgcagtggtatactggtcttcaacagaagtgttctgtgcaacaaaggtaccgaatttagaacggatgaattcaacaagttttttcagaatagacattttatttcctttcaatagttatggtggttttattcgtacggattaatccaatcataaacatatggtttaatgattagaccctgttcatttttgctgcgctcgaatatctcgatgtaatcagtaacgtatgactctaacccgagaataagaacagtttctttgccttcttctactgttgccttaattaggcgctcgatagctattttagcttcaagacgtatatcagcaagagtttttggaactatatttgctgtatccattactatttcctcagtaggtggggagttcattataactccccaaaattattagcagttaattaccgcttcaattcgtttggttaaagcactagcagtttttgcgaatttaatttgaacagtttcggtagcagcttcttcatggtaaactcgaacgtagtactcttcaacagcaggccaatctttgcgaacatgcttaatcaaatctttcagttcacgagtttctgctacgttgaacactgcgtgttcatgttcacctttaatccaaatcgcgcgataacgatcaggagtaccgtaattgttataaccacgttcaatttggataaagttgaatttagacattttattctccgttactctgctttgttttgatggagctatagtaaccgagttgatagaggaagtaaacaactttgtgcaaaaattttagggcatctggaggaactttctggaagttagaatggatttatacagccggggatacaaaaatgccctagatgaattctagggctgtaggattacattttattatacattgtacgataattctgtctgacgactgagttcaacaaggtgatgattcagtttagctaaaagcgttttcacttcaccgatatgctgagtttcacgtgcagaaggtttagcaccttgggattcacgatacttccacagattatcgaaatagaattgaactgccttataaagaggaccattatctcttactagcggaagagctttatcgatagctttaaacagttcacctgaaccaatgatgtctccatggtctccactaattttaaggccaggaatatttttaggtttcgctttaaccggagccggttttgcggccggtgcttgtgccggagaagctccacgtgcaggtgtagtaacctttccgcctaaactttcaaaggcagctgctaccttagcatagtctttaggatcgctaatcccaataccataaatcttttccacagaagccgcaaatttgctaaaatcatggcgttcaccacgtggaaccaataccagagcgtcacgccatttcgatttagtcatgcggccaggagctgcttcaaaaagctcttcttcggttaaaaaatctttaaatttcattgcaaaaaaatccttagtgtcgattaaattactatttatactaaaaagccccgtccgaagacagggctctaataatcgacagcatcacccactggcagatgacctgcgaaattcatttctttggactcggaggcatcagtctcatccaaagaagtatagcgtcaggaggttatgcttgcgacagtgaacaaccgactagcggcaatggacgaaccattctcttctatctgacgactcaacgagggtatacgcaagtttcccttcgaattacattacatcgtattcttcaactagatactgataataggaatcgtttgcttcaagttcttccgcatatgatgttgcttcggatttagtgtgaaaaatcttaagaggcaaagaatattcttcatagccatattcacagttccagttattttttactacagcatatactttcatattttcctcattaatttttggtatgggtaggaatcgaacctacaagccattcagcaccagggcctcacgctctacctatttgagctatcacataccagaatttggtgccgattgcaggagtcgaacccgcggcatcttcattacaagtgaagcgctctaccaactgagctaaatcggcatatttggtgaagaattacctacgtcactaggttggctgttctgtccacttaaggcttgcagcaggaacaccatggcttttcaccattgatcctctcacgactgagacattcttcataatttggtgcaccgagagggattcgaaccctcaatcctcgcggcgggagattttaagtctcctgtgtataccagttccaccatcgatgcgaaatggtcgaggcagaaggattcgaaccttcgacctgcggattagaagtccgctgctctatccagctgagctatgccccgagattgttcaggcaggacttgaacctgcacgactgattccgtcagcgatttaccaccgtcgccagcatatgatgcaatatgcgagctcaaaaggtgtccgtcaccatgtctaccgatttcaacactgaacaagataattatattactgattatttatagcatttcttaaacgataaagttgattacagaattcgcgttcagtcaaaatcgtttcagaaattttatttttacccatactgtgagtgagcgtagcattccgggtagcagccaaagcttttctgaatccttcatttttactaagtgcatcgtatgctcctgttagtaaattctgatacgcttctgaggcacggtgaataggaacacctttccaataaagtgtttgagttggccaccaccgtttctttttacctttgaacttagccgatttaccaactaatgtacatacatgtgcttgcatttcaggcgaagaaaatttgagggactgcaagaatccctccattgaggcacattctacgccatcatagataaatttatgaggagcaaaattactcaaagcacatgatggatatgaactacctgaaccaatatccattacttttccttcacgtatttcaaccaatcaacttttaatgggctttctttctgcttatacgtaattccaatatggaatgcaaccggagcatcaggaatacgaatttcttctttaatgtcaaagatttctactttctcaaatactcgcatgaaatcatagtcatattcaattggattacctagccaagcctgaatagcatacataacttcatttgaacaagaataatgattatctaaataagcatcaaactcttcgtctgagcaatcatatgcaggaacatcaacaccaaagaatttcttggaaaattcaggagttacatacttctgttcagtatgaagcttttcaagaattgcttcatggttgtaatcattatttccaaggtattcaccgcggcgaccattagaagagaaccattcaagaacgtgaattacttgattaatctcttctttttctaagccataaaccatttgggtagaataccgatcggcatcattttcccaagtggtaattgccattgctaagcctttaggaataacttgtccaaatttaatatgcatttcaatttcctcagttgataatttggtgaccctggcaaagactcgaacatgcaaccaatcccttatgaggggaacgctctaccaattgagctacagggcctttatagaaatcttatgacttttataaaagccctccgaagagggcgccttgtcgggctatccacctgctaggcagaattactcacacataaaatcagctacttcccagaagtcattttcaactgctactttaactaccggagaaatttcagacgttttaatagaaacaattacatcacctgcgacagtttctaccagaccaacgattttctcgctgcgagcaacaaatttactcaccggatggaatttgccggtagcagcgaacatagcttcttggtcaacaatcagtgcgatacgtttcattctttttccttgtttgttttgatgtagtaataataacaggttattcttgtagcattaaatctcgaaaatcgttccgttttcccacattgttgcgaacataggagaaaccttaacgaatgatttgcttcgcattgcaacgtagtcgttatctactttagccaatcctgaagcaatatcagtaatacgaccgcagcgcatagaaccacgaccacctttattatatgtacgttctccgtagaaaacgatatcgccaacttgtacgtctcgacctttagaatctttcatcatatttcgcctgataaattcgtttaaaatcagtaattagctcttctacatttgaagcattagtaaacggaataacttgacgcagtttacttactttacagccagaatgataagcaataacttcttgaatatcacgctcactgaagtactcatatttgattaatgcttcgtatctgcatttaatccagacccacatacctttgcgttcatcaaaagtatatgcaaaatcagcatgaagcattaaatcacgttcagatttacataatcctaaagcaaaattagttggacgattccattgtaatttcaccgtaatagcatttactttattcgcaacaccaataaaaatattcattctatttccttcgcttgtttttggccttcttgtcgtgcacgagaacgtcctgctttatgcagtgattcgtaatatgctcggcgtctatcaatgttttctgtacgatatgctttcccgaaatgggatgttttgaagccgtaatatttcataatataattctcaatggcaagcgattggacggtatgcccggcctcgaaccgagtcacattgactttgcagaatccatgtgtttaatatatcacccatactcgatagcatatctgaacgagactgcaatcccgctactcagcttacgccatcttgtattgtgtcataccgttaatttggtctccatagaatgactcgaacattcgacctctccatcccaaatggagcgctctaccagactgagctatacggagtaatttggagcatccaaagggaatcgaacccttatcaagtgagtggaagtcacctataatagccgttatacgatggatgcaaatttggcaggccctgaaggaatcgaaccctcatcactgggtttggagcccagcataatagccgttatactaagaacctgttatttggtgggagtaactggactcgaaccagtcaccgctcgattatcggtcgagagctctaccaaatgagctatactcccatggaaagctaatcatctgattgttgatgtaccactgctatgggcagcgtttaactttcataaatttggcggagagtaaaggagttgaaccctcaccgtttccgatggcccggatttcaagtccggtttgctaccactagcgctactctccattaattggtgaaggaagtgtcatatagacacaattcgcttagcgacagccacagcgttttgcggaccgtgtatttttccaccattccttcattgttggggtgaccgatgggagttgaacccatgactacgagaatcacaatctcgagttctaccaactgaactacggccacatcaatattcactccatccatcatgaggacttcatacgaaattaagagaagaatgatcagttcaacccctgtagacgcgttgaatgaatattaatttggctggactatctggattcgaaccagagataccggagtcaaaggccggtgacttaaccgcttgtctatagtccaattatttatttactaattttcttcctttataccatccttctggtataggggaatcttttgaaatctttttagcttctattccattattaatccacattgtgccaaattgtgaattttttgaaccggattgagctagtttcagtttatcagaaatttttcgtttagtttcagaagagtgtgttttacctaaaaacggatttccatttttagctatattagctttaactgcgtctgcaatgcgggaacgtgcatctggtgtaattccagatttaatcttatccgaaaaattcagtttaaatttagaatcatttctaattttattactggttgaatttcctccaagtattcctcttgctttcatttttgacggagtccaatatgttgagttaacatagtcaaatccaccttcgccaccaagttttaaattatatacgtttcctaataaaaattctggtgtaactatttcagattcctttaaatacatctcctcagatgattcacaataatgaataacttccttggtaaagttctcaattccgtattttagaattgcctttttaattaatacacctgaacccatgtagccatcattgatgtcatcagttttatgggctccaacataatatttaccatttacgttattggttattttataaatcaaatagtacataaattattctccataccaactatgtgataattatatcacatggtacggataaagtaaacaaaagaggcggaggcaggactcgaacctgcgcgtgtcgggatatgagcccaacattctaccaactgaagttaccccgcatttatccgggttcttgaagtactaacaagtagcttgatgtagaacacgctaaagatataatcttacgaatatagagcttattccgtgggaacaaacagcttcgtcctcggcattatcttacaggactcaaactcatcttcaagaactgccacgttcttatttggcggacctaacggggatcgaacccgtgctctctcccgtgacaggggagtattttaaccaactaaactataggtccataattcgctttcagagatactctggcacgatgccgaagcaaaggggaacagaactctcatcaccttggtaccagatgaatcttgtttagcactctgttctaagatgtatccctgaaagcgaactttcaacgccgtaagaaattataagcacgtagttatcgttgagggaactcgtacacagggaattctatgccgacgatttatcagaacgtcttctgacttcttcatttggcgggccgtgcaggtatcgaacctgcctagtcatttctgacacggattaacagtccgtcgcttaccctctcagccaacgacccgaattggtgggacaccgaagatttgaacttcggacacccggattaaaagtccggtgctctaaccaactgagctagtatccctaaatttggtggggagtgatggagtcgaaccacccgagccttttgagcaacagatttacagtctgtcccgctacccctacggtctaacgccccaatggatatttttatttatactgccctgaaattaatcagagcagttgatagattaataataacaaagaaaacctaaagcatattacacaatcggtgagctctttgatttaaccaggaataccctatgcggtgaatccatatgagagagcaatacccggtgctcaggaattggacttgtatggaacggaaccacacgataacctttaggcgtaaatcctagcaaaataccaacgcttgctgcagaaagtgacccgccgcaatagtatgataccaaatcaccaggctggatttcattgtcaagagaatcagttttgacatgcttaggcgtaactaaatcattaggaattggaacgccttgtgcatcatagtattcatgggcaagaagcttataattctcttgatagaaagtattaaacgcagctctgatattcatcacaatttcctcacaattaatctttgtatgcttcagttgaacctttagcaacggtctcaaatcgggaattcagtatctcaaaatagtcttgatacgttccctggagggcttcatagcattcttctaccgtagagtagacacctctgatttggtcagagccaggagcaggataataattagaccaagttaaaagtgcgtacattacttacgtttccagctgtagtgagccaaaataagaagcactgcaatagcaagtagtgatgaatgcagtgctgccagtagtgcacctagtcctacacccaaagtaacataatcatacttagttacttcttcacggtttaaatcatagtttttgatgaaccactgcttaatctttttcatgtgctattttatccattatgaaagaaatgatacccattagaaatgcaacacttaacactgatactgtttcaggaagagacataaaggctgcacctataatgccaaaacctaatgctcccatgcagattgttgatgcaacatttctaattaattcacaacgtttcattttattctcctcaagttgatagggttatagtatcactactacaacccgttgtaaacaactttattcagcgccagcggcttttaaaagctttttaagattagcagaacctcgggctgaaaaagttaccttaccatctttttcaccgatgctgccagtcaatttagaaagtttatcactaggaacttttttaaaatcggctaatgtcccgtcaacggtttttgtaacaatcggcagttcatcatcctgtcttttagcttctgtaataaattcttggtacgttttcatgttgcttccgttttgttagtttgtttttgatggagctatagtatcaccactaggaccggttgtaaacaactttgtgaaataaatttctatttcaaatcttctgaccagttcagttttagtggctcttggtactctctatcaagcactacaggtacttgaacttcaccctcgaagtgagctggaccgacattgtagctgagagtaatgtgcggtgagtaatctgggaaatcgtgagttgctcccagagctcttgcatattggtgacggaattttaagtattctgaatctagtttaagaactagtgtacgtccgtcttgcgtgtcccatacttcaagtttacctgatgtagcaacttcaaaacttcctgaagcgcaaacgtatggaacatgaactcttgaatagcatatcgtcgtatgaatcttatgacgaggtacaggattagggaccttcaactcacgctgaaggtcctcaatagcatcaagagttttctcagagaatttagcagctacatatagaccagtgctaaaatcactgaagttcattaggcatcagcttcttcagtagtttcttctgcgaactgtgcttcgatttttgcaaccaggtcatcaagtttaacctgaccgtcttcactgatttcaacgccggacacagcaatcagtttctgtagtacttcttcatactgtgcacgcagagcggacagaccttggatggtttcagacaggtcaaatacacgaactttcaaagtatcgacttgggcttgcagttgttcagtagtcatttttgaattcctaatatagtgttgatttttgaataaagttcttctagagaaccgtcgttagttattacgatatcgccttcgcgaatcggaagtccacgctctgtgacgtgagtatcttttttagaaccttcttgctcaggacgaactacatgaataactgtagcacccatcgccctggctacatcaagttcatggtcttggcgggtatctgggacaatgaaataatcataatcaccaaaagtatcagccataaccaaagtgaatcgtttcacccaatacatgcgatcgagcttatcacagacaatgtcagtcccaagggtctgcatgagacgacgaattgaccatggctcaacaggtttatttattacaacttgacggatgacttccatcgtatcgccgtcaagaattttacgcttgctatcataaaccaccccaggtaaaggcaaatcatgatggacatattcaatagcattcgccataatacgaatcacgtctttagtagacagatttaaatcctgctcacgatcgtaatcaataccttcaatcattgaccgagtaatgcgaggaaactgacgtgatgtatcgcgataccactcagtaagcattgcatcagccaacgcatctttaattggacctgctaactgatgctttgttgcgttatagttatccataatgtagtcagcagttgtatctttgccactacgttttttaccaatcaaaaataaaagcttcaaattattacctcatagaaggatgcattcccataactttctgttgatactgggattcgcgagtatcattgacagaaggtctaccagtaattattataccatctttttcaacttcaatgtatttgtactgcaaagttgctacacataccattgctgggtcggattcttcggttaaagaatactcaatttcagataaatcactcacccaacctccgatgtagcggacagttaatactatatcatgtttatcgttatcaagaacatgcattaaaactgcaccaggaaatccttcaccgccgttattccatccagacttgtctcggtcaatgtagttttgacagcttaacatccatttgtacatttgtacccatgaatcaagattttcatctactaaaaatctaacaggaacagcgtcaaactcaaaagtagacccaggcaatttagcacgatgcatgccttgaggcgaacctacagtatcagtagcaggaatatgaattccaggaactacagctgtttgaagattagctttaaacgcttgggtgaggcccccatcagggacctctaatataaagttagttgtgttagtttgattaaacagtccagtagacattatgatttccatacagaagtagcagagtagcgtttgcctttcgacatgaactgctgcagtggtaacatgactacattcgcccaatcagccggttttatctcaattaaagcaccctttatattaccaggaatatatgctttaatcattttgtcagcgccagcaaatcctttaacttggctccagtttatctttaatctggtcttattagatatcactggcgtattagcatactgtttaagaagttcttctaaaaactgctgacgagcctttggcggaatgtagtgaaggtttaacccatacatcaatgtggttgtaccttgctttccaagaccaagataaactatcaaaggaaatttatcccagaatggaagagtgtctttgtgcttagcgtcatacatgtaagcatatagctttccaggttgaggcttggttacagaatgaccacgtatatttttctttatagtttctgcaaaccatttagcagatttattgtttactgctgcgccttcattacgaattttatctttgatagagcttcgaaatgaatttaccatcacaagagcacgctcttgtttggtcattttgttagcaggttttttctcaatttctgctactttaattgccgttttaattcttgatgcatgacgagccattgctttactgaacgtagcaggatttattcctttgctttcagcgaatgatttagacgtcatgccttttttacgagcagcagagtattcaactcctaatgctacccattgattttcactacgggatttagctttaggcgattctgcagcttcagtgataaattcaaatatagccatcagcctttccatcctaattttttaagtgaatcttcggtaattaacctaaattctatacccattttactggcagtagcttgagctgctttccacttatcaacgtttacagaccaagtgtaaatttcatcaatgtaccgtttcttcgctgatgtcgtcaactttgtgggtttgaccggaggtctagtttctttctttggcttaacttcaaaaaagaactgttgaccattagaaaacttagcccagaaatccatgaaataccggcgtttctttccatctgcattactaaagtatggaattaccacgcactctgaattccattggactacgtctgggtgattatctaaccaccgcatcatgaaattgctcccaagtagatcgatatgtgatcttacgagggtcccccttatatttacttatgttttttggtaaaaattttccgctataagccattaggcttctccttacatttatcaaaatgccagcacttcattccacgaggttttcctgatttaccacagtgaggacatgttactataggctgcaattctgaaacagctctaagctttgctcgtgtttcttctgatctcttctttccggtgttagctaaatttaatttagtttggtgctctttagttctatttttggctgcagtagacatatttttcttcatggtatcactttttgaaatacctgtcatagaaatactgcgcttttcatttgattctagcgtctgagactttccagtaagagctgcagacagtttagctgaccactcctttgaccttggacttcgcttctttcctgttaatacggcagagttagcaatagaaacccttttgcgaatccattcatatgatttgttatttcttcctgctaatttagaagacattatatgaactgcatatgataacttatgattatttggataaatcttagctaaaagctgatgcgccacataatgctcagctgctgttaagtccacaaggttatctttatcatcacttccacccatgcatcgtggcacaatgtgatgccgttctttgtacccttctaaattgcgggatttgcctcttgcaattagttggtcataaattttacggtaattcatgctattctcctaagtagttagtagggtaataatatcataaaccactcgtcatgtacactacaactttataaatactgttattaatatttataagaggataaactatgctcttctcattttttagtccgatagattattctgcaaagaccgtaaaaggtgctaaggcaaaagctatcccaaccgctgacatatttcgtaattatcgcaaatatttcgacactgtagcagaaaactatcttttacaaacatattacataagtggagctcctagaccagaagaattagcatatattctttatggaaatagtcagttgtactggattcttttaatgtgtaataacgtatatgacccgtttagagattggattaaaacccaggatgcatgctatcaatttgcacaacaaaaatatgcagatgtaggtggagaccaaatactctatcacgtggatgcaaacggcaatcgttattataacctcgagcaatatcctgaaaattcaggcatttggtatgataaaggggactttaatcatcagtaccctcaatatactggggctttagctggtgttgacatttatgaagactctattatagaaaatgaaaaactgcgccaaataaacattatcaatcctagtgatattgaagcatttctttctgatattatacgagaaatggaaaaggctcctgacagtgaatatgaatcaggtcgatataaatcccagaccacaattggagaagttgtatgattgaaatgaatgattcgttgaaatggtttaccggtgttgttgaagacagacaagacccgttgaaacaaggaagagtgcgagtacgtgtttatgggcttcacccatttgaaaaggtgcaaggagctataacaggtcttcctactgaagaccttccctggatgtcagtgattcagcctaccaactcagctgggatttctggagttggctcatctataaccggaatggtagaaggaacatcagtgtttgggttatggcttgatgaattcaaaacagcaggactagtaataggaacatattctgcgcatagaaaaacgaagccaaactacacggaaggcttttctgatcctacaggccaatatcctagacaggtcgggtcagataccaacccactagttcaaggcgatgaaactgggtatagtgctataccaaatatcattcaggacagaaatttagacattggcattaatcctgatgatgctgacttaagtgatattcctgaagacccaaatcctgcaattacaataacagatatgcttaatagggatgaaggtcttagattgaaggtctattgggacacagaaggatatcctactataggtattgggcatcttatcatggcgcaaaaagtacgtgatatgtctgtcattaataaaactttatctaatcaggttggtcgtactgttacgggaaatcccggtatcattacaatggacgaagcagtcgcgttatttaagcaagaccgcgataaaatgctttctgatattaaaacgaattcacgtgtaggacctgtatatgctaaagtcaacaaatcaaggcaaatggctttagaaaatatgagttttcaaatgggtgtaggtggtttagcaaaatttggtaaaatgcttgatgccatgctcattggtgattggaaaaccgcttatacagaagcaagaaactctgtttggtttaatcagacaaaaggtcgtgcttctcgtgtttccatgattattctaacgggtaatatggaatcatatggagttcctgctccaaagccagaaggaaaaaacctgtctgctgcttacgtagaaccaaagtctggaggtaatcctgaagacccatggactccggaagattcaagaattcttttcaaagaacctgagtcttcatataatggtcagtatccatatgttcacacaatggaaacagaatcaggtcatatccaagagtttgatgatacacctggctatgaacgctatcgtattgttcacccaacaggttcatacgaagaagtagctcccgatggacgccgtaccagaaaaactgtagccgatttatatgacatgactcagggtgatggaaatattttaatctctggggataagaaggttaacgttggagggaacgagacctattataacatgtataatcgtcgacagcaaattgatggcgataacacgctttatgtacgtggaaatgaaactaaaactattgaaggcgatggtactatttttgtcaagggtaacattaagatagtcgttgaaggaaatgctgatatccaagtcaacggtgatgccactactaaagtagatggcaaccacgacgtaaccgtcggtggtaacttaacttggcaagtagcaggtactgtgaattggaatgttggcggggcttggactgagacaatggcttctatgagctcaatcgcccaaggtcaatacactgttgatggttcacgaattgatgtaggttaatcatggctgatatacttcctattaataccacgttacgcgaagtaatagaaggtgaatacgttgagcagtactttactgctcaattatctaccaacgaaacattaaaatcaataaatattatcgactatcaaccagtatctgatatctctgtgtctgaaacctattataaaggtaattataactcagtttttacttttggaaacgatgtgcttaaataccgtgaaggcgatgagctgaagtccgcttcagcgtgggaggatttacctaatcccaaaactgctgatttatacctgtggaaagcccccagaacactagagaagacatttacctatacagttgagataatatatacagtgacagaagaatcgtctggaggttcatccggaggttctagtgctccaatcataacagaacataaaaagcaaaagatttactctcaaacagttaaaggcaactggagtagatggggcgaccagcttcgtgcttatgtatatgcggggaactaaatggctggactatcatttaataaatgcttaactgccgggcatagtgcgtatcctccgacagaagtaaatgctacacaaagtaaagtattcactggtggaatagcggtattagttgatggcgactcaattaccccacacaccaagacggttgaccctcatgatacgcatggaggagttgttcaacctcgcacatccaaggtatttgtaacaggcaaaaaagctgttcaaatggccgatccaatttcttgcggcgacactgtcgcgcaatcaagctcaaaggtattcatacactaatggctattaaagaacctttaaattatcagttaacgcgtactgcaaacgctatcccagacgcatttactggagcaacattcgacgaaattaaaaatcagcttattaactggcttagtggtcaaaaagagttccaagattttgattttgcgggttcgcgcttaaatgtgctattagatttattagcatataacacgctttacatacagcaatttagtaatactgctttatacgaaagctttattggaacagctaacttgagaagttccgttgttcaagcagctcagcaaaacgggtatttgccaagttccaaatcagcggctactgcatctattatgcttgaggtaactcatccaaatccagagccagcaataaaaatacctcgtggaaccaagtttttagcatatgcacgagattcatcagtagacccatacaactttgttgttaccgaaaatgttattgctttaagagatacttcagcaccagaaggagttaataggtatcttcctattgtcaatttggcacaaggacgtattattcgtactcaattgtcatatgacccgaagaaacctattgttattcgtgatcagtcgattgaccgtaagcaggttaagctgtgggttgatggcgctgaatggactaactggacagacaggtcaatggttcatgcttcatccatttcaacaatttattatatgcgtgaaactgtcgacggaaataccgaattcttctttggtgaaggcgtggcagaagcctctgtagcaggaggagttcttgaaagtaatttcattggtggattaaaacctactaagggcgcgcaggtagttattgaatatattcgtactgatggtgaatctgcgaatggcgcaactgatttcagctatgctgatactctgcaatatatcgtagtaaacaaaatcattgaaaactggtcagattctcctgattatgttggagctgatggcggtggtgaacctgaagacatcgagcgtattcgtgagctcgcccagattaagcgcgaatctcagatgcgatgcgtgtctaaaactgactatgaatcattcgttagttcacgctttggttctatcgtacaagcagtacaatgctttactgatcaggacaaacccggatatgcatttatcgcaattaaaccaaaatctgggttgcagttaactgctgttcaacgagaagacattcaggattatctaaaacctttctgtcttgctccaattactccttcggtaatgagcccagattacttattcattcgtcataatattaaagcttcttatgcgctgaataagttacaagaatctgagcagtggttacagtcaaaaattatagactcaattaatagatattacgttgatgaagttgaaatgtttaacaaaaatttcagtaaatctaaattattgacctatattgatgatactgaccattcaatcatcggttcttctgttgatattcagatggttcgtgaaattgtcaactatttcactcttcctagcgcaggtattaaatactataatactattactccgcggacgttacgttctggtgatttggtctttactgtcactccaactgcagattcatatccagttaatatcgttggaactgacccagataaaaatggtaaaggaaatatggtcattggaccatttaaaccaggtgatattaaagagaatactcatattcagccatatactgaagacgattttgatagaactactaatggagaaagaactcgttggtacaaaatcggtgaagtagattattatggtgataatatttactggagccttggagctattggagccgatcctcttcagtttgaagaccagagtattgagctttattctactcctacccaggatatcgtcttcgcccgcgatggaacacttatcgtatttgagaatgaccttcgtcctcaatacacaactattaaattggagcctattactcaatgacaattgcaccgttcgtcaccagcttacgaattcataagctatctgcgaatcaggtcaatattcgttgggatgacgttggtgcaaacttctactattttgtagaactggccgaaactcgaaacagagcgggggaagttatccccgctgataacttgagttggtcttcactgggttataccgcggataatgattggttcgaacaaaatcgtattgaaccgcttacttattataaaatgcgtgttcaaactacgtcagcagggtttgagccgtctgaatgggttgaaacagaagagttccaaacttttgaagaaaacgcatacacatttgagcatatgcaagaattcagtttagtgaaagaattcattaaacagaagttttctttaaacaacatgtcgtatgttaacttcaacacatctgccatgatggcatctttgatgactgagtcttttcagtttagtcctgaatattctcatttatcagctattgaaaacttcgttgtaggtgaatctggatatcatgaaattcagggacctattgaagcagtgtgtgttgataaaaatagaactatgctgggagaaatagacggaattttgtatctgtttgaaagattccaacatatggttaaagtatcaaatgataaaggacagaattggcaatacgttcagttatttaatgaccgtgtcggaaatccggtttctagagtggtaatttatcaatctaaaactacttcttatgttttaggatatgataaaatcttttacggaaggaaatcatctgacgtacgttggtcatcgaatgaagttaagtttagcgataacgaagttacatttgctaaattgggagaccagttaaagcttggctttgaagtagagttattcggaacgtatgcatcattgcctgctgacgttaccaaatatgctgaagcgtttacctgcaatgacgactatttgtatgttgttgcaaaagacactgtccgtaaagttaaattaaaagatgctccaatagatactgaccctttaagcccgacatttggtgaaaaggtatttgaaaaggaagtatctcatataacaggcaatcctaaatctgtatgctttaaaatggattccgttgggggcaaaatctttgcccttattaccggggaagttaaaaccttaggattagacccaacagacccaaggaacgttgtggattctgcaactaaaggcgtctatgtttaccaggaaggcacaaatacttggaagcgtgtatttggtaataccgatgaagaaaaacgtcgtatagagcatttatggacttctatgtcaactgacggaaaggaaatattcttttcatcagccaattttaagacaacagagtacgctcaggatattgagcttgagacgaaatatccagaactaatttctaccgcagttaaaaatgttaacccaattcagtatcactctgataagcattatcacatgatgagtttccgagcagatgaattttcaagatgggaaacatttgttcctggaccgatgaggttttatgctgagccttggtttgtctggatggctcgtgaaggtaacagatgctggataagtacagctgaccatgcagttgtcatttataatgatattctttatcagaaaagaatagatgcagcggcgcagggaactaccgagcgtattctttcggaagtgtgggataaaggcgacgcaacgttttattgccctccggtttcatttaacggatttttgcagtatgcttctggtatcatgtttcacgagccagatggaaagctgataggttattatgcattcgattatcgtgttcgtgaccaggtaacgcttaactggaaaccaactgatgtaatgtttaaggcgtttctgcagaaccaaacccgtgaagaagattggactcctgaacatactccaggcttgcgtgacccggatttacgtccgtatcttactaaaatgatgccggatagttacttgctacaagatagtaattttgaacacttttgtaagtactatctccaattcctttcagatggaaatggaacacattacaacagtctcgttaatcttgttaagaacaaatatcctcgcgaagaaaatgcatgggaatatctgtggtcagaagtttataaacgcaacatttatctgagtaaagacgctcgtgacgctgtcgtccgtttctttgaagcacgcaagaatgatttctatgctactaaaggaattgaagactcatataagttcctgtttaaacttctttataacgaagacgtcgaaatcgatattgagtcaaagaacactaccgaatatgacattattgttgaaagtacaaatatttctgacgatttagttggtcgtacgatttatactgcttccggtcgtagtaatgtgacttatatcgagagagaataccgggatggtcgtctgttatggcgtattactattcataacttatcaggacggttcattgaaggccaggaaattaaatcagagcgtacggactttgagggtattatagttcaaggtgttcgtggaaaggatatgctgagtaataacattgattatataaaccgcagccgttcttactatgttatgaaaattaagtctcagcttcctacttctcggttccgcgacgatgtattaaggtttgttcatccggtaggtttcggtttcattggtataacattgctgacaatgtttatcaatagtggcttaaatatgaagcatgttgagactatcataaataaactcaagaactataaatgggatgcaggactgccatcagtttatcctgatagagttgctattatcgcttcagatgatacaatagaaagagacccaataaccaatgagcctaggtattcttcacgtgctcaagctggtgaacctttcccgttacctgctaactataatcaagaaaataacaatagtgttatcgctggacaaaaccctggacaacgacgtaagccgttaagtcctacgtttgaccaatcagcagtaacgtttgctaattatcgcgatttagttaaccaacgtcttaaagacgatgcaggtaatcctcgcgatcctgaaaatccgacacaggtaaaaattgatgagtaattcaacaagagcaagttcaacgcgtagcacgatttatcgtgctatcattacatctaagtttagaactgaaaagatgtacacattttataaatcaattggtccgggaacggaccaaaacacgttgtatgtttcatttggtaaaagcactccgtggtcagataacgaatctgaacctgggtttgcacctccatacccggccgataatgaagacggtgtggttgatatttggacaaatatgatgggtgcagtcaaaattgaatcatctatgcttgactgtgttgttccaagaagagactggggagatacaagatatcctaatccacgcacatttttaatcggcgatatcgttgttgctaactctgcgccatataacagaactgatgctggatttggatggatggtatatagatgtattgatgttccaaagaatggaatgtgttcaattggtaatcttacaagcaaagaagaatgtattaagcttgggggtaaatggacgccatcaactatttccggttcagcgcctcgtgggcgtggtgatgcaaatggtactgtcgatttgggcgatggatatctttgggaatatctatatgaaattccagccgacgtatcaattaacagatgtacaaatgaatatatcgtagttccttggccagaagagattgaagaatctccagctcgttggggatttcaaaacaacttaacttggcaacaaaacgactttaacctaatctatcgtatgaagtgtaatacgattagatttaaagcataccttgatgcaatttattttccggagtttagtcttccgggaaatactgggtttaggcagttgtcaattataactaatccgcttgaagttaagccaatgccaaattctcctaacgttaaggctgaaaaaggttggtatagcgcttctggtcttgaaagacagtcaggtgaaatgatttacatggaaaatcgacaacctattatacgttcaatggaccaaacagaagagttaaatttaattttcgagttttaattatggggagcctttggctccccatttttatataaataagactatactttgatatgaggttaacctatgtatacagataagggtaaaaaaataattgacgtcggtgagattggtaatgcttctaccggcgacattctgtatgatggcggtgtgaaaattaatgataacttcgacgccatttataacgccttcgctgatcaacgattatttgcagccggtggtggagctttaaaccaaaaaatccacgcaacaagttattatcaaaagataaaatttggtgatgctaactcggccggtacagttccgatgggttcatgcatagatgctgattgctcagaaggggcagttcaaattcgtctttcaaaaggtaaagcgggagaagctgtattcgttgtaaatagtaatggctcagcatcaaaagctagatccataaaaataacaacaaacggcgaaggtgtagcagatgcatttaaagatggatcgcgagagttgattatcaacacgccaagatgtagaattgaattgtggtgtgttgaagtcaaagctaacggtgctgcagtttgggattattcaatttcaagtatgtttggcagcacatattcaccgttagaagctacatataatttaacaagttctcctattaatattcggcttggatataacgatgattactctactgttaaattgttattaagcttcagcgcaaatccaggtggtcaaaccatcaaaaggcaatcatctgaagtcatgcttatgattgacccgactattacttcatcagcgccaaacggaagagtatttgacactgaatatgcagtgttaagaagcggtgaatcatctgaaaatgaaaagatgtattctatttcatactctattaacgcgcagaaagatttaatatgcacagcttcaacatcttatggaaacgcacgtttggcagttaaagttattgctacacagaccgtaggggtatctcaataatgaaacaaaatttgatagtaggccaatctgtagatgatgggtctggtgattacctccgtaaaggtggtcttaaaattaataacaactttgatgatttatattcagagttaggtgatggttcagttccatttgcagcaggtgcatggaaaacttttaaagctagccctactggaactactttaaatgctaagtttggtcaggcctttgctattaatacccaggcagcaagagttaacgttcagcttccaaagggtacagccaacgactataacaaagttattaaacttcgtgatgtttggtcaacctggcgattaagcccaatcacagttattcctgctcaaggcgatacattaaaaggttcagcttctcctaaaattttcaatactaacttccaagatttggaattggtttattgcgcccctggccgctgggaatatattgaaaataaaacggtagataagctaactaacggtaacttaagtactgtagcgaaaaaatcaattattgctgctgcgggtcagactgactttcttaacatttttgatggcgtagaatataacgaagactcgcttaatgtatatcgtcgtggtaatattttatattacggtgaaaccagcgttatggataaagccaatgctgattacggttctcctggaacagtagcaggtcaattggtagaattaaacggtaaagacattcgtttaaaagttccatgtgttgaaggggaagtaataacatttgaaaccttcctagatggaattggtgtttatcggtcttcatacaacaagttggctatccagatacgagattcagcccagactacatcccagacgattcctgggtcaatgatagtagataaccttactactctccgcagaatcactctggatgacatgggtgtacttccgggcgtaggggtaaatcctaactcgcttgaaatttcattgaacggaaaggaattactcgaagctggaactgcaggtcttcctttattttattgtgaaggcgcggaaggtggatatgcagaagactgtataaacaatggtggtcaatgggtaaattctaaccaagactatagactggaatttgactcaactggtactaacgtcgaagctattatttttggtgaggcgtttgaagataaagaccttcttaccgtccgttggttcaataataacatcggtactactatggatattgacgatatcatggcagaaaccgaccaagtgtatatgaatgctgagcaattagtaactctaaaaaatcgcattgaatacacaaattatgatgaacctaatcagaaaaatatgcgtccggttgctgacgatattatgattaaagtcaataatattgcagcattttttgacgtaatttatccgattggcacgatttatgaaaacgctcacaaccacgcaaaccctgctgactatatgggatttggggtgtggaagctttattcacaaggccgtgttactgctggttggaataatgattcatctgatccttatttttcgcgtaacaacaataacttaaacgaaaatggtcagccatcattaacagcaggtggaacggttggagatttgacgtttacattaggaaaagaacacattcctgagttaatgtcaagagacaaagttctaatttcagaccctgaacatggcagcgtagttattggcggatgtcaattagacccagacgcacaaggtccaggttattctaaataccgtgaagacactgttgcggtaaacaacggtgtagttccaaatgacatcactaaaattcagccaacaatcaccgtttatcgttggattagggtaggttaaaatgacgattgaaactaaaactcgtgaaggggctaaagttaattcaagattaactgccttttcagaatatcgcgtagacccgcagaatattgcggtaggaaataaggctcctatagggagcctaacctttgaacaaatggatttaggtgtttggtatccaaacactgaagctgctattaatgatttaatgtcattacagtcagcagaaattggaactattatttgtaatgacaccggaatatctccacaaccagcacagcaaattacacgcgctactttttcaggcgtagtttcgttagaacctaaagaagacggttctgttggcgacccagtaataattcacattcttggattgccaattagaattgcgaatggtgatgactttgcagcagtagctaccaggtggtatgataaggtaaaagaattagaagcagttggaaaagtggttcaacaagttactcaatcacctgcaactcctcagtatgttgatattattcatctggattatcagaaccataattttgaaacatataaaaaatatggtttaactgttgagtttactgttacttcacctgctaaagcgggttatggacaatgggacgctattggtaacgaaactaaaaccttcggtgcaaacacatttacattccactattttagaaggatgggataatggcccagaataactataatcactacagtgatttggccaaatatacgatatttgacccagcaaatacacaatggccagttgctacaaaagacgtccaatcagcgctagcgttgattggaagctgggcaagaactgacattggattacctgcagcatctccaaccgtagcaggtataattcgtacagctacgcaggccgaagttgaagctggaactgtaggtaatgctgcggttaccccagctacattaaaatccacaattacccggcctgaagcaactaccgcaattcttggcttaacccgatacgcaactaatactgaagccgcagcattaaccgcaggaaatagaactattacagctgctgctcttggccatgtgtttaaaaccgtaaaagcccaagaaaacgtagatggaactgttaggttaacgactgccgctcaagctcaagcaggaactgatgaaaccaccgcagtaactcctaagcgtgttgtagaaatgattggaaagttcagcgttaatcctcctacttatacttctgcaacagaaagcaacttgggattagttcgtgtcgcaacccaagcccaggtagcagcaggtgctgttcacgatggatacgcagtaactccaaaaaccttcatggcatcaaaagcgtctgacagcgtatttggtatagtaaaatttgctaaagactcagatgtggcttcagctacttctaacaatttggctgttactccaaaaagtctacaagcgttaaaatcaaccaaggataaatatggattaacccgattatcaggttctccaacatcagatgcttcacttgctgcagctgcgactgatgctgtctttaaaactcgcaaaataaatggaaaaacccttgataacgatataacaattaccaataacgatatcaattgttatacacgccctgagtcggatggaagatatatgccagctggaacgcgtgtcggtaatattacttgggtagaaggtggaacttatattcctgctggaaactggtttgggtgtaattctccatatgaagccacttctagattggcgctgactctcacaataaaattccaacgtaataacgacggctatgacaatagaatttggagatttagaataactgtcaacggggaaaatagaggagaacatacactcaatatagagaataccaagggcggtagaaatggtcattcgtggagatttgaaggatatgctacaggctcatatattataaatgatgttcctcctaacgccagagttcaaattgagccatttgaaaatatccgtggcgataattattcagcgtcattaacgttttgcaccaaccgatagggaattatatgacaaaattagtagactcgcttccgtttgtagacggaattccagacgattttcaacagagaattaactggataaaaaatacagagcctcttaatggggcttcaacccgctatggaaatgatggagaactgaatagagcttctgtgcagattcagaaaaatgtggttcaggtacataacgatttgaacaacgttggaactgctgtagaaaatattcaagtagatgtagaccaaatcaaaaaatcgttagaaattacaggttcttctgacgccattgagcaggtttatatcaataaaaagaatattgaaaagcatgatggacaaattcttaaattagaagaagacaccgaaaaacttcgaactgaccttgattttctcgaagaggatgtaggtgtttatgattctagtaaagatgattattacagaacagttcgtgataatatagtttgggttaaacgtgaaattggtgcgtatcctgggcaagatgttaacggacagcctaagcaagacgctccgggttctggtatgaaataccgaatcatcaacaatgcgtcagctatagtaaaacatgacgagcgtattcaggcgctagaggatgcatacaatgattcagacgtaggttctctgactattgaagtaaacgacctgcgtaaagaagttggtcctaaatccggagctacgtcagcttcaatttatgcaaggcttgtgaataacgctgatgctatttccgcagctaataatgaaatctttgctattaaccaagccattgattttaccaatccagtaaaaattggagctcgtactactagattagaaaacgattatcgtatagttgacgcaacacttaactctgcacaaaccgggttagttcctcgtgtcaataatattgatgctcgtttggggtcttctgataagcctgatactattgaaggaaaaattagttctctttcaactgaccaagggtacatttctgatgttgtaggacgtgatacttcatcagggcttcagggtcaagtagcatggataaatcagcaagttggtattgttcctggcggacagccgattcctccggggtcaattttagcgagaatgaccaatgttgaagggatgcaaaactctcagcagtctgctatccaggacattcaagtagaacttggcaataacagcgaagggttaaaaggttctgtatttacgttacagactcaaatgaatggtgacttttcgtcagaaaatccagttcaacgggatggtgtatacgctactgtagtagaattgcaagataaattcgtgactgcagttactgacgtagaacagactggagcatacctccgtaaacggggcgaatggtttaagaagccttcatcaataggtgaattcagtaaagaagatttcactgttgatttaagttctgatgcattggtaaatcctaactcattggtcgctgcttcatttaatgctggcattcgtattgttgatgatattattgttgatgacgatggcgtattttgtgtagaaactgatacagttatcgaagcttctgattcagataaagctgtccaaattgttattctcgtcaataacattgaggtgtttacttatagcctaggtgttaaagcagtaaccggcgagcaactgttgaaaaccaagaaacttattaagttttcgtctggcgatgcaatcaaaattgtgtatagagctgcttcagaagaatcaaaagttcctgttagtattaaatcattggatattactattcatccagcagtataatgaaagggaccttcgggtccctttttcgtataaatagaatataaagaggagcttatatgtcatacaacacatacaacccaaaaacgcttaaagacgctatacttcgacgtctaggagcgccggtaattaatgtcgaagtaactgaagaccaaatttatgattgtattcaacgagcattagagttgtatggtgaataccactttaacggattgaataaaggctatcaagttttttatattggaaaagatgaagctgacaacgcaagatttttaaatggtgtgtttgatttgcgtggtcgtaatgtatttgctgtcactcaaatcgttagaacaaatgtaggttcattaacttcaatggatggtaatgctacctatccgtggtttactgactttttaatgggaatggccggaattaatggcggaatggggtcaagctgtaataagagttatggaccaaacgctttcggtgctgacctgggctattttactcaattaatgacttattggtcaatgatgcaggatttgcttgccccacttccagactattggtataactctgataatgaaatgcttaaagtaatgggcaacttcatgaagggggacatcattgtttgcgaatgctggactaaatcatttatgaataccgacatgatggtaggtaatactgcaggttacggcttcgctggtgaacaaacttccgaccattggggcttaggagataggtatcagaatcctaaccttcgcaataacggccaatatgcaggtgaaggtaatacaaatagagaaggtgcttataataatcgttgggtaaaagattatgctacagcactgactaaaaagttgtggggtgaaattctgtttaaacaccaagggctacaattagccggcggcgttacagttgatggccaaacacttaaagtagaggcccaagaagaaatcgagaggctccgagaggaacttgatttacttgacccgggttgtcctattctgttggggtaaaagatgactacatttaattctagtttattcgctcgccttgaggattaccgaggatacaataaaactaatgagacagaaattctcaatccttatgtgaatttttataatcacagaaatagccaaacgttagcagatgttttatcagctgaggctattcaaatgagaggaattgagttttatttccttcctcgcgaatataacaatccggatttgcttttcggagaagacccatcaagtaaattcaccaaggcttggaaatttgctgcttacttagactcttttgacggttattctggtgataacacgttcttcagtaaatttggtatgatggttaatgatgaagtcaatttgactattaatcctaatttgttcaagcatcaaaccaataattcagaaccaaaggcaggtgacctgatttatttcccgatggataattcgctgtttgaaattaattgggttcaaccatatgatccattttatcagttaggtcaaaatgttcaacgtaagattactgcgcagaaatacatttattccggtgagcagcttcaaccagaattgcagcgcaatgaaggaattatcattcctgagttctctgaacttgatttagaaccaatcaaaaacattgattctcttgctgatatttctgacgtacaatacgcagaaagcgatgcaattaataaagaagcctctgaatatgttcatccgtattatgttaataacggaagaggacttgagtctcctcctaaagcagattcgtttgatgacggattttttgaataaataaaataaagatgggacctttgggtcccttaggagaaatcatgtttggacattggtataattcgtccttacgccgatacattgtattgcttggagatttattttctcatgtacaaattgctcgttggcgtgaagacactggactaaaatatattaaagtacctatcacttatgcttcaaaggaaaagttcctttctcaactcggaaaatggactgctatccagtctaccgagaataaagcaaagatagaaactgttttgccaagaatgaatttgcacttggttgatatgcaatacaacgcgatgtataaaacatcacagttgaatagaaccaaatcatataaaaccccttcaaaaattacatctcagtataatcctactccgattaagatgatttttgaattgggaatttatacacgcaatcaagatgatatgtatcaaatcatcgagcaaatcgttccttattttcagccgcattttaacacgactataactgaactttacgacaaagacacaagctttaatcgtgatgttagaattgtattacagtcattttctccggatgaagctgttgatggagataatatcactcgtcgtagattagaatggtcgctgatgtttgaagtcaatggatggttatatcctcctgttgccgaggttgacggcgaaattagaaccatttatttagatttcttcgctaacagcaaagagctaactccagaaggaaactttgaatcagtagatagcgaagtcactccacgagatgttcaacacgaaaattgggatggttctagtaaacaaacttattctcacgatattcctattccggtaaatccggaggctcctggaccgagaggtgaaaaatgagtgaattacaattagatatggctaaattattagacatcgaaggaattcctggaatagaaggacaagaaattccagtttatgaaaaacttgaattagttgaagttaaatctaatccaaatgaccgtaaacctgacctcgaagatgactattcggtcgttcgcaagaacatgcacttccagcaacaaatgttaatggacgcagctaaaatatttttggaaactgctaagaatgctgactctcctagacatatggaagtatttgcaactcttatgggtcagatgactacaaccaacaaagaaattcttaagcttcataaagaaatgaaagacattacttctgagcaggttagtactggaaaaggagctaatcctcaacaaggaatgaatattcaaaacgcaacagtctttgtagggtctaccgctgatatgatggatgaattcggtgatgcctatgaagcacaagaagctcgagagaaaatagtaaatggaacagactcaaccgtttaacgttctgagtgatgcccatcctttaaatgacgggaaactgacggttattcgtcacccgtctgaaatggaaacgaaaatcgaaaacggagttcgtttctttaaatcgcaatgggatgataagtggtatcctgagaaatttgaagactatcttaagttgcatgggatagttaaaattcgtttgcaaggtgaagacccagctcatttccaaacgtttaaggacaaaaataataagcgcacccgctatatgggattgccaaaccttaaacgagcaaatattaaaatgcagttgactcgtgaaatagttgcagaatggaagaaatgccgagacgatattgtgtacttcgcagagacctactgtgcaattacgcatattgactacggtactatcaaagtccagctccgtgattaccagagggacatgctagaaatcatggcggctaaacgtatgacttgttgtaaccttagtcgtcagcttggtaaaactactgtagtagcaatctttcttgcgcacttcgtgtgttttaataaggataaagcagtaggtattcttgcgcataaaggctcaatgtctgcggaagttctcgaccgtactaagcaagcaattgaattacttcctgactttcttcagcctggtattgttgaatggaacaaaggctcaatcgaattagataatggctcatctattggggcatacgcttcgagtcctgatgctgttcgtggtaactcatttgcaatgatttacattgacgaatgtgcgtttattccaaacttcatagatgcatggcttgctatccaacctgttatttcatcaggtcgtcgttctaaaattattatcacgactacaccaagtggattaaaccacttctatgatatttggactgcagctgttgaaggtaaatccggctttacgccttatactgcaatttggaactcggttaaagaacgtctatataacgacgaagatatgtttgatgatgggtggcaatggtcacttcaaactatcagtgcttcttctcttgaacagtttaaacaagagcactgtgcggaatttcatggcacatccggtactctcatttccggtatgaaacttgccaatatggattggattgaagttactcctgactcgcacgggttttataaatttaaagaagcggaagcagaccacaaatatattgcaactcttgactctgctgaaggacgcggtcaggattaccatgcactaaatattattgacgtgactacatctgaatgggaacaagttggagtattacattctaatacaatttctcacttaatcctcccggatatagttattaaatatctaatggagtacaacgaagctccgatctatatagaacttaactctacaggtgtttctgtagcgaagagtctttatatggatttagaatatgagaatgtcatttgcgattcaatagttgatttaggaatgaaacagacgaaaaggtcaaaagccgtcggatgttctgcactaaaagaccttatcgaaaaagataaactcattattcaccatcgtgctactgttcaagaatttcgtactttctctgagaaaggagtatcctgggcggcagaagatggatatcatgacgatttaattatgtcactcgtaattttcgcatggttaacaacacagcaaaaatttgctgatttcgtggataaagatgaaatgcgtttagcatctgaagtttttaaacgcgaattagaagatatgaacgacgattacgctcctgtagtgttcgttgacgccgtgaatagcgcagaatatgcgcctcaagaacatggtctttcatttgtataaataataaaaagcaaacaacattgaggatatatcatgcctttagtctctcctggaattgagctcaaagaaacgagcgtacagagcacggtagtacttaacgctacaggtcgtgccgcaattgtcgggaagttccaatggggtcctgcatatcaagttactcaaatcactaacgaagttgaactggttgatatgtttggtggtcctaataaccaaactgctgattactttatgtcagcaatgaactttctgcaatatggtaatgatctacgtacagtccgtgtagttaatcgtgaagctgccaaaaacgcatctccactggttgataatattgagtgggaaatcacaactgctggtagtaactatgaagttggtgataaaattacggttaaatatgcagaccaaactgtagatgacactggttcagttactgaagtagatagtgacggaaaaattatgtcggtgttcattccgacggcaaaaattattgcatatgcaaaaagcattaatcagtatccggatttaggtgattcatggacaactactattacttcacagagttctggtgtttccgctgttattactctgggcaaaattatttctgattcaacagttctgttaactgaacctgaaactgcccatgaagaaatgacaaaaactgaattccagactgcgcttgcgcaatataaaatgcctggaattgtagctgcgtatcctggcgagctcggaaaccaactggaaattgaaattgtatcaaaagccgcttttgataaaggcgaacagctgacgatttatccgagtggtggacagcgtgcatcaaccgcaaaagccgtatttggatatggtcctcagaccgatacacagtacgctatcattgttcgtagagatggtgcggtagttgaatcaacggtgttatcaacaagccgtcaagataaagacatctacggaaacaacatctttatggacgattatttctccaaaggttcttcacgttatatatttgctaccgcgcaaggatggcctgaaggattttccggtgttattcgtctgggtggtggggtttcagctaatgaatcagttactgctggcgatttaattcaaggctgggatttatttggtgaccgtgaagcattgcgtgtaaaccttctgattgctggtgcttgtgccggtgaaaccgatgaaatcgcaagtacagtacaaaaacatgtttcgtctattgcagatgagcgtcaagactgtttagcactcatttcgcctccaaggtcaacgattgtaaatattcctctgactcgtgctgttgataatttaatcgactggcgccaaggcgatggaacttatgattctgctaacatgaacattaataccacgtacgcggcaattgatggtaactataaatatcagtatgataaatataacgacgtaaaccgttgggttccactggctgccgatattgcaggtctgtgtgctcgcactgatgatattgctcagccttggatgtcaccggctggttatcgtcgtggtcagattctgaactgcattaaacttgcgattgaacctcgtcaagcacatcgtgaccgtatgtatcaagcaggtattaacccggtaacgggtcaaggtacaggtgaaggtttcattctgtttggtgataagactgcaaccactgttccaactccgtttgaccgaattaacgttcgtcgcttgtttaacatgctgaagaacaacatcggtgattcttctaagtggcagctgtttgaattaaacgataactttacccgtagttctttccgtatggaaaccagccaatacctcgcaggtattaaagctctgggtggtgtatatgacttccgagttgtatgtgataccacgaacaacactccagcagttatcgaccgcaacgagtttgtagcgagcttctacatcaaaccagccagatcgataaattatattacgcttaactttgttgctacagcgactggagcggatttcgatgagttgatcggaccacaataaattgtacattttcgctaaatcctgatacaattgcacatatgaaatattatgtgcaattaaggaaaaccaagtgattatctctaaatttgttaaagtaaaaataattcctaaaaattttaaatacttttcggaacttggatacaagctgcctcctctgggttcgcctaggcatggattcaaatattattcaattgatatcagtgttgaccatcttgagcccgggtcaaacatatatgttgattgtgtttgtgataaatgcggtgaacaatattcacagcgttattgcagagacactgacgtgtgctatgattgccgtagcggaaaatttaagataggaaatactattggaacagctaataagggtaaagtgttgtcttcgatgacaggagaaaaccatcctcgctggaatccaaacaagacagaatataatgaatatgctagtaaagttagaagagaaacttctaagcataaaccaatttattctacatgggaaaattttgataagattggactatgtggaatacctggagcgtatcaattagaccataaggtttctgttgcatatgggttttacaacaaagttcctcctgaaattataggaagcattgataatttagagataatcacttgggaagaaaatcggtcaaaatcaaagaaatctagtattgatttatgggatctattgaaatgaaccccaggacattctggggtcatctaacctttagatgataaattatattaccgcacactttaatagcctctacgatgatgtagtcaatcaagaggctatataaatatctataggaaacaacgatggaattaacagacatcacccgtgcgtttgaatctggtgactttgcacgtcctaacctgtttgaggtagaaattccttatctgggtcgtaacttcagtttcaaatgtaaagcagcaccgatgccggcaggtatcgtagaaaaagttccagtcgggtacatgaaccgtaagattaacgttgccggtgaccgtacttatgacgactggactgttaccatctataacgatgataaacatgaagtacgtaaggcaattattgcttggcaggctcaggcccacgctcaaggcaatgatatctctggtatgactccagccgattacaaaaaggttgctacggtacgccagtttagtcgtgatggcaaaactatcacaaatgaacacaccattaccggtctgtggccaactaacgttggtgaagtacagatggactgggattcgaataatgaggtagaaacgttcgaaactacatttgctattgactggtgggaataatgttatggggcttcggccccgtatcgaagttctgtgagttatttgcttaaatatctgacaaaacttcgatataaatatacttatagataatttcggagactccaatggcctttcatattttggacttattcgctccgtgggaaaaacgcgacgaagctgaatataagcaacaaatcaacaatgacctagagtcaatcactgctccaaaatttgatgatggagctcgtgaagttgaatcaaacgaaaacgaaatccagtataattcattcaaccaaatgatgtttggttccaatgaacctggaatgaaaacaaccgctgatttaatcaacacttatcgtagtttaatgaataactacgaagttgacaatgctgttgaagaaatagtttctgacgcggttgtatacgaagacggtcatccagtagtttctcttgatttagattctaccgacttcagtcaagcaattaaagaccgcattcttgaagaatttaatacagttttaacatgccttaatttcgagcgaaaaggagccgaccatttccgccgttggtatgttgactcaagaatattcttccacaaaatcgtcaacaccaagaaaatgaaagacggaattcaggaactgagacgtcttgacccgcgcaacttacaattcatccgtgaaatcgttaccgctgatgacgctggcactaaaatcgttaaggggtacaaagagtatttcatttacgatactggcaaagaaagttattacgcagatggtagattatattccgccggaacgaaaattaaaattccacgcgatgctatagtatatgcacattctgggctagttgattgctcaggtcaaaacatcattggttatttacaccgagccgttaaacctgccaaccagttaaagctattagaagatgcgttggtaatttatcgtattactcgtgctcctgaccgtcgtgtgttttacatcgacactggtaatatgccttctcgtaaagcggcagcacacatgcagcatattatgaacacgatgaaaaaccgtgttgtatatgatgcgtcaactggtaagattaaaaaccaacagcataatatgtcaatgacagaagactattggttgcagcgtagagatggtaaagcagttactgaagtagatactcttcctggtatgtcaggtatgagtgatatggatgacgtccgttactttagaacagcgttatacatggcattgcgagttcctctttcgcgcatgccagatgcaaataatcaaggtggtgtgcagtttgatgctggcacagcaattactcgcgatgagcttgattttgctaaatttattcgtagattacagcataaattcgaagagattatgcttgatccacttcgcactaatctaattcttaaaaaagttttgtctaaagatgagtgggaagacgaaataaataatattaagattgtgttccataaagattcatatttcaccgagttgaaagatgctgaagttatggagcgtagaatcaatatgctcacaatggctgaaccgtttatcggcaagtatatttctcataagacagcaatgaaagatttccttcagatgtctgacgaagaaattgaacaagaagccaagcaaattgaattagagtctaaagaggctcgcttccaagaccaagaaaatgaagaggatttctaatggaaaattatatttccgcaattgaatccagagacctcgtagcagccaaaaaagcttttggtgcaattatggctgaacggacatctggtttaattgaagagcgcaaaaaatttatcgcagcgtctgtcatgattgagggtgaagagcccgttgacgatgaagatgaagacgacgaagatgaagataagtctgagaaagacgacgacgaagaggacgagtaatgcttatactgcctgaaaatcatgaattagttatcgacgctgtcgaagcttttcttcctgaagcacaggcacgttttgataagttgtccgcagcgctttctaaagatgatataaataaaattgtagagaacatggttacttctgagcctgatttagcaattgctttaggttcaattaacgaatctctacaattaaatgaatttatcgttaagcacgttgattctaaaggtactattacacgtactaaggatcgtaaaacacgtgagcgtaacgcgttccaaacaaccggactttctaaagctaaacgccgccaaatcgcgcgtaaagcagtaaaatcaaaacgtgctaatccatctgctcaaattcgtggattacgtaaacgtaagaaagcacttaaacgccgtcaggctctggggctaagttaatggaaaacctcaatgaacaacttttaattgagcattggggtcaaccgggcgatgtaattgatggtaaacccatgctggaatctattatcgttgaaggcgaaaatgaatctggcttaaaacctggtctgtatatcgaaggtgtttttatgcaggcagaagtagtaaaccgtaataaacgtctttatccaaaacgcattcttgagactgcggtaagccgttatattaaggaacaggttgctactcgtcaggctctaggagaattaaaccatccacctcgtgcaaatgttgacccgatgcaagccgcaatcattatcgaagatatgtggtggaaaggcaacgatgtttatgggcgagcaagaatcatcgaaggagaccacggtccaggtgataaattagccgctaacattcgtgctggttggattcctggtgtatcaagccgcgggctcggttctttgaaagactcaggaaaaggatataacatcgtacaagaaggctttcgcctgactgttggtgtagacgcagtttggggtcctagtgctccggatgcatgggtacaaccgaaacaaatttcggaaaatacctcggcacaagttgccaatagtgctgatgatgcttttatggctctcgcagagaagttaaaagcgttataaataattatgtaacttaacacaggacatcaaaaatgcttaaagaacttttaatgaccgaagctaaaactatcgatgcttccgtcgctcttgacagtattttcgaatcagttcagctttctccggaagctaaagctaacttcagcactgtattcgaagcaacagtcaaaaaacacgccgtagctctggcagaatctcatattgaaaagattgctgagaaagcagaagaaaaagttgaagaagaaaaagaaaaagctaaagaagaagctcgcgaagagctgaaagaagctgcttctaaatactttgaccatatcgctgcagaatggatggcagaaaaccagctggcggttgaccgcggtattaaagctgacctgtttgaatccatgtttgtcggtatgaaagagctgtttgttgagcacaacgttgtaattcctgaagaatcagtagacgtagtagctgagatggaagaagaacttgctgagcaaaaagcagaaactgctcgtttatttgaagaagtttctaagcgcgatgagtatatcaattatgcccaacgtgagtatgctatccaagaagcaacccgtgaactgactgatacccaaaaagagaaagtagtttctctgacagagggtatggattattctgactcgttttcaactaagctgaaagctattgttgaaatggtgcagggttctgtagagcagtctgtaacggaatctgccgatataaatactatcgacaaagaagcagacggtttaaacttcacaactgaagcagtagaagaaactcctgcgactaaaaccccatccgttatggatgcttatgtggcccaagcggctcgtctttcttaatttaaaaggttatacaacacatgaaaaagaataaacttatcgaaaaatggcagccgctgcttgagaacgaagctctgccggaaattgttggcgctagcaaaaaagctctgatcgctaagatttttgaaaaccaggaagctgatattaatcaggctcctgaataccgcgatgaaaaaatcgctgaagcatttggttctttcctgtctgaagccgaaattggcggtgaccatggttatgatgcacagaacatcgcagctggtcagacctctggtgctgtaacccagattggcccggcagttatgggtatggttcgtcgtgctatccctaacctgattgctttcgatatctgtggtgtacagccgatgtctaacccaaccggtcaggtattcgctctccgcgctgtttacggcaaagaccctctggctgctggtgctaaagaagctttccatccgatgtacgctccggatgcaatgttctctggtcagggtgcaaccgagaaatttgaagcagttaaagccggtgatgctctgactgttggtgatatcgttgttcacgatttcgcacagaccggtcgtgctcatctgcaggttgttgaagatttcactgtagacgctggcgctactgatgctgctaaactggacgctgcagtaactgccgctctggaagctggtaaagttgtagaaatcgccgaaggtatggctacttctgttgctgaactgcaagaagcatttaacggttctaaagataacccgtggaatgaaatgggcttccgtatcgataaacaaactatcgaagcgaaatctcgtcagctgaaagcacagtattccatcgaactggctcaggacctccgtgctgttcacggtatggacgctgatgctgaattgagttcaatcctggctaccgaaattatgctggaaatcaaccgtgaagttgttgactggattaactactccgctcaggttggtaaatctggtatgacccagaccgttggttctaaagctggtgtattcgacttccaagacccgattgatatccgcggtgctcgttgggcaggtgaaagctttaaagctctgctgttccagattgacaaagaatccgctgaaatcgctcgtcagaccggtcgcggtgaaggtaacttcattatcgcttcccgtaacgtagttaacgtactggcagctgttgataccaacgtatctccggcagctcagggtctgggtcgtggttataataccgacaccactaaagcagtatttgctggtgttctgggtggtcgctaccgtgtatacatcgaccagtatgctcgtcaggattacttcaccatcggttataaaggtgctaacgaaatggatgctggtatctactatgctccgtatgttgcactgaccccgctgcgtggttccgatccgaagaacttccaaccggtcatggggttcaaaacccgttacggtatcggtattaacccgttcgccgattctgctgctcaacagccgaaaggtcgtattacctctggtatgccttctatcgtcaactctgttggtaagaatgcttacttccgtcgtgtatgggttaaaggtatctaataccaataagggagccttcgggctccctttagttgttttaatggatataaataaacttataaatccacagaggaaagcgcaatggctaaaatcaacgaacttctgcgcgagtcaactacaacgagtagcaacttaattggtcgccctaatctcgttgcattaacgcgcgcaactactaaattaatctataccgatcttgttgctacacagcgtactaaacagcctgtagcagcactgtatggtattaaatatcttaaccctaatggtgacctgacgtttaatacgggtgcaacttatgcaggtcaaatcggggcgccagaacgtgagtcaattgaagaactcactatggcaaataaagactcattcaataaagacgatatgttcaaataccagaatgtggtctttaaagtacttaaagatagcccgtttaccgatacagcagaaaccgatgaatttggaattgtatctgaagcagtagcagctaataatattcgtatgatgtcagatgctgcagtcactgaaaaattcgaaggacctgattcagacccaatcaccgaagccagttttaaaattgataaatggcagacccaggttaaatcgcgtaagcttaaaacggatttaactgtagaattagctcaagacttagaagctaacgggttcgatgctccagagcttattgatgatttacttgctactgaaatggcagaagacattaataaagacatcctgcaatcattgattacggtttcttctcggtttaaagtagctggtgtatccgataaaggtgtattagatttaactaagcaggattctgccccggaacaaggtcgtactctgtatcgtttcatttgtgaaatgaattcagcagttcaacgtaatacttcttattctggcacctacgcagtagcatctactcgttgtgcagcggtactggcagcttctggttggttaatgcagaagaacgatgggactattccagaaaacgcatatggcattctgaataacggccttccactgtattgtgatactaacagtccgattgattacgttattgttggtgttaaggcagaatttggtgggaaggaaactgtaggttcattattctatgcgccgtataccgaaggtcttgatttagacgaccctgagcatgttggtgcatttaaagttattgttgacccagctagcttgcagccttctgtagctttactggttcgttacgcgctgtcggttaacccatatactgtaggattggacgaggacgaagctcgtgtgattaatgctgcggatatggataagatggcaggaagaagtcagatgtctgttatgctcggtgttaagttacctaagctgattgcggactaatttatgggagccttcgggctccctttttgctataaactaaatatgtcaaacttcggagagtattcctcctcgagggatttaaacactttcttatcgtatagattaacacattctatcccgtgcctgcgagctatatcaacagctactctcgtccctccagatacactcccgcatcttttctcaggcgcccaatataataccttatctacaggctcagtgcattctaggcccaatacctgcatagaattccgtgcgaataaagtctgcactatcttcgagcattcatcccagtacgacgtaacttctctcgccttaatgatgcttttgattttggcttcgtttgataattcagaccatacaacaacacctgtaccaggaacatggccacaaaagccagaataaggaataatcctacaagaatttgacctatcgtatttcgccaaccacgcttcatctgaacctggagctccacctgaatatgaaaaatgcccctcttccgagaggcgttgacctattgtagtcattagactcagaactctgcgtggcgcttctcgtgaaccaataagcgccaatctcattattctacaacctcatgccatttactacgaatagtattttgaatcaaagtagtgatttctttcttaaccgcagaaggattatcagcgaataacatatcatgaccttcacgtgctgcttcgttaatgatatctttcatagtcagacccataacacgaccgaaatctttagcagttacagtaccaatatgagacagaacgttacttacgcggttccaggttacatattcggaaaagatttccagaacacgcttatcattctcggtgagttcaaccttcgctttaataggcttatcggatttagccttctcgctgaacttagagttcttacacttaatagcaacacgagtaccattattgaagaacttaggatgaaccggcttaagaacatagccttcagctacgccagtttcagaagaagcctgtgggccgaacacatgtttatttgcatgttcaaggtcagtcgtgtcaacaagctcattatagtaattgacaatagatttaaagtcattcacatactgagatagctcggcaaatgaacctcgaccaagaagtggagccaatttaagaccaagaccagtagcaaacgattctactacgtagtcgtcccaataaactttttcattaccagaatctgacagaatatcaaacacgtagaaatctttctcaccataatctacgcccttctgaataccaccgccagcaaattcgccaaagatttgaacagatactaaatccatggcgttcagcatgttctgcatcttaacgaaagaatccttgtacttcttcatgataatctcatgaccaaagaaactttcactttctaaaataggtccagtacgcttagccggaacgatttcggtaggagtaataatcacactaaagttagtgccatgaatcttctcacgagccacccactcaacagtatgcatatcaaaaccagcaccgcgaatcttctcgatgaacttaccgttgtaatgattctcgagactagaatattttgcaaacattataatttccttagaatgtgattttcataaagtcagtatcaccattacgctgggcactggtataatttgtaacaaatccttcatcatgcaaataattaagaacacttgtaatatgtttcttaactaaactgctaggatacataattaactcacgttgacccgctaaagcggttttctcaatctgggttaatacttcttcttttgctgcactcaattcttctgtagcaatattgatggctgtattagccattctatcggcaaggttcataatttttctctcaataaataatataaaaccaggagtctatcttggtcaaaatggtatcagaggatttcccctgagcccattataccacatcgatttttaaagcaattaatagccgctcggcacgaagcgatacatgatatatccgcttttagttagcatgatttcaaattgacttttgcttccaacctcaagtactaatggaatatctttatccatcagcatccaatcaatttttccataccgttcattaatcaaatccgttattttacgtgcaccacttttatagtagtaagaactctgaacagccatcattttactaacaaatttagatgcaaacaaccagacatttaccccattagcagctggcgtaaatttcttagaaagcatttcttcaaatcgttctactacaattgggtctactttaggcattttcataataacctcatgtgtttaacaagtttcttatgacgagattttataccaacgtttgttaagcgtttccgataaacgactttttctttttgcttaaaccgttcgtgtgctttctcaactgagacccacaatttagcagcttccgctggagtgatatctaacgcccttgcaatttcttgaaaatcctttccgctttcatgcatcaagtgagcttgtaatgctttcataataacctcatctatgtgacgaggacataataaaccaatccgtgaatagcaaaaagggagcccgaaggctcccgaatattacggatagataatacctgcttccagcgcagtacgatgaacaatgtatccatttctagattcttgtacatcgacttctggataatcatctagcattttagctagagtataccgatgcaggtaataatcgctgtcagggtcgtcgagtttccaatctttgccctcaacagtcattcgttggatttcatccattacccaccatccacaccagatataggctgttccacggaacggtagaggatgaatatacggaagttctccgtctggctccggggctacccttttagtaatggttacatcgccagttttagtgactgtaatcggggtgtaatcttctgcggaaacctcaacagaaacctcaatcacttgagaccctatatcagacgtgtcaatcactaacgtgcttgttgagccttctacaggagaaccgtctttggtccaagaataaaccccagttgcaccttctggagcaccgataacgttggctttaaaagatgcttcagacccttgttcggtcgtaatagactcaggagtcaaagtaacagaaacaccgctcatggtctttttagtaaaagcgacagcaatacctttagttgcagttccattattatagtctggggcagaaaccgttacttcacaattcagtgtgtagctagtttccgttgactcggttaaggtaattgttttacccgtttggccagaaataacagaagaaccacgtttccaaacataagcaatgcttgctcctgaaggggcaccagtaacatcagctgtgactacttgggattgaccaatttctttagaaacagaagtcgggctcaaagttaaagtaattgcaggcatagttttgttattaacggtaagagttgtttctgcttcagccgtttcaggatcgccttcagccggagtaacagtagcaactactttaacggtcttactacctgcaggtcctgcagcaacataattcatagctgcggtaacagaagattgttttacaccatttactgtccatacaaacgtttctgtgccttcagctgcggctccagaagttgttgcagtaaaattggttgttgctccaatgactgccgaagcagccaaaggagcaatagatacgctataagccatagctgttccttattttaaagttacaaatgaagaattacgtgtttcacgaatcataacagacccgtttcttttgatgtaatagattaaactaaacagtgtctggtgtgctgatgggtgttcaaacgacgttggccgagatttccaatctgggttatctttaatccattggtaaatccaccatggaagagtaatatatcctgggttcttacctagcaattgcatatttggactaaagttttcaggaagctcaatgatttcgtctgttttaataattttaactactttgtccattgctttgaaaaattcttcggggtccgtgatactaaccggaatattggtaacttgtccttcatcatctatatgaataacgctgtctccaataggagcttcagcataaaatcctttatcattgatagaaggtgtttttacttcaaaccctgggtcatttaccttaggggtttctttatagaaacctgggtcaatatcatgaattttaataccaacattaactggagcgtcaaacagtagttttgcttcatcagacgcttcatcattgaaaagtgattttccttcaatttcatcatctgcttggattaaatcagcaattgatagaccatcgttgtcttctggcataggctcatcggccaatttagccagttctttttccaaatcagcaaccatattgtcaaatgagcgggtcttcttcagtttaataccgaaggttttggcatattcgtcgagcttgtctttagcttcttttttatcgagtgcctgaatttctttaatatagtctttatctagcattgggtgtgcctcatgtaatgtataaatatgattgtatttataaactgaggatagtacagtgcacgacatccaagtcaaatttaaagattttagtcatgttcatattgagtgtgatgactcgattttctatgaactcagagactattttagcttcgaagccgatggatacagattcaacccgaaatatcgctatggacattgggatggacgaattcgtctgctagattataatcgtctcttaccgtttggtcttgttggccaaattagaaaattcgccgaccaattcggatataaggtttatttcgatccaactatattcgagcaagaaactctttcgcgggaggattttgataattggttgtcaactaaagaaatttattcaggattaactaagattgaacctcactggtatcagaaagatgctgtatatgaaggtctagttaatcgacgtagaattcttaatcttccaacatctgctggtaagtctcttatccaggcattacttgctcgatattatgtagaaaattacgaaggcaaggttcttatcatcgttcctactactgcgttagttgaccagatgattgatgatttttgtgactatcgtttatttcctcgtaatgctatgctgggtattcgaggtggtactgctcgtgattcgaatgcattagtttatgtatctacctggcagaccgctgttaagcagcctaaagaatggttttctcaattcggcatgatgatgaatgatgaatgccatcttgcaacgggtaagtcaatttcaacaatcattgcaggtcttacaaattgcatgtttaagtacggactgtctggttctcttaaagacggcaaagctaatatcatgcaatatgttggtatgtttggtgaaatcttccgtccagtatcaacttctaagttaatggaagacggacaagtaactgagcttaaaattaatacaatcttcttaagatatccagatgcagccgcaaatgctttaaaaggaaaaacgtatcaagaagaaattaaattcatcaccaatgttaagaaaagaaatcgttggattgctaatcttgctactaaacttgcagcgcgtgacgaaaatgcctttgtgatgtttaaacatgtagctcatggtaaagagctattcgagatgattaaagctgctggtcatgagcatgtctattatgtgtcaggcgaagttaataccgaaacacgtaatgctttaaaggctatggcagaaaacggaaagggaattattatcgtcgcaagttacggtgtattttctaccggtatttctgttaaaaacctgcatcatgtaattttagcccatccagttaaatcgaagattatcgtactccaaactattggtcgtgttcttcgtaagcataaagataaatctttggctacagtgtgggatatcattgatgacctgggtgtaaagccgaagtcagccaatgctaaaaagaaatacacacatttaaactattgcttaaaacatgcattagagcgtattcaacgatatgctgatgaaaaatttaactacgtaatgaaaacggtaaatctatgattaaatttgaagatatttacgaagccacaattcgtgaggctactatcgataacttcatgagtaaaattaatgcttgccagaccttagatggtctggaagaactcgagaagtattacgataagcgctctaaagaaactactcttgctgattctgatgatatcattgtgcgtgatgctttggcggggcgtagacaagctcttgaagctgattctgaagatgaagacgacgaagacttctgatataaaaaagccccaaccgaaaggaaggggcaaagccaattggctacatcaacactagactaaattaaaagctgcgtttcttgcaattgctcttctgtgtcttcagtgacaggcaattcaatcgcataattatagcaagctccgggatgaaccgggcctttgtctgtttggacaaccaatgcttcatcgattggtcctttacagacgacacataccgtattcgacatgattgtctccttagtttacaagtttatttattacgcgccagcttcaaactgacgaaggtcaataatatgcttaatgctaaaacctcgtgacttaatagcatccatagcatcactacagaactccaaaagaattccccaatattgcaatttagtatctacacccaagatttctttatcagcgcttaaaacagttttcatttctgatttttcatacacatccatgcatacttcaccaccaacctcgccacggccagtgtaataatccaatcgtgctttaagattttgctttttgagggcatctaatcttaacatctcttttcgacaagtcgagtgcttacgcacccatttaccatacagaacagggttattagccgcttcatactgtagtttagtctggtcgataatcaaatcattatccaattcatcctgtaattcttctaatctcattctatctccactctactgtttctttggaaggactagtaccattatactctactgctagagttagcattactacgcatctgtatgcgtatacgttctagcgtatcagggtcgtctactatagaaaactgcacggtgacaattatagcattatcgtcatataacggaagcacatcaactgatagacggttaatcctaggctcataattacgcacggcagagactatattacgctttatcgtatcaccagttaatggagtcatgttttcaaataattcgtttgtgatatcacaaccaaacgctgggtcaaatggccgagacccctttcttgtggttattattccaagaaggctatttttaaccgatcgtgctcctaccgtttttgacacatcggtatcccaagcaagtcgcatctctgggtcaaggtcagaatataatttatcaatattgctcatgacataatcttaaagaattctttaagccccttaattacatgaatgtgagaaattccgcattcacaagtaatgggaactgccaattgaacctgtggcttcaatagcatatttttgatgttaactacatcttcggttgtaatagcagaatataaatcatcgatttctgcatcatttaaatcattaaagtaaatctgctcatttccaaccacgatataatctatgcattttgatatcatcattggaatgtctgaatcgtcaaaaagattcggatacttgaactttattttaaatccctttaagtcataccagaggtcttctggaggatcgatttgcgcatgtgtataatttaatggcacaggaattttacgcccacaggtgcaattccaggtcacctcatgattaacctcgcctatactatgcgcccaaagtataactataagtaattccgattcctgtttgtttaattcagtggcattagtgcattctctgagcaatgctttaacgcattcatcgattgtaccgtttttcttcgctgcaattaaattagcgtattcttctagtgtaaaagctcggcactggatattcttgccatttattcttgtttcaaatttgtatgtgatgttcatatccactcctcttattcaaatatttataaatagtataaagaggattaccttatggccaatatagttagatgcgaattaccagatggtgtccaacgttttaagccatttacagtagaagattatagagaccttttattggttagaaacgacatgaacaccaagtctgaagaagaacaaaaacagcttatagcagaattaatggatgattattttcatgaccatcctgctgagtatcgtccttatatatttcttaaggtatttctttcaagtattggtaaaaccaaaatacctgtcagaatgaagtgcccaaaatgcggaaaatataagcagtatctttttaatcttaatcagcctccgttgacaaatccgaaagtagaggttgctggattaacgctcaagttcaaaaaacccatagaaataattgacgatacaggtaaaatgattttagataacattatatctgtgaaggattcatctggggaatacgcgtggaatgaattgagcgatagcaataaattgaccgttatcgatgctatagatgttgaaaccttggaaaagattttatcgcagatgaagccgtttaattttgagctaaaaacgtcatgctgtgataccacgacagtattaaaatatgataacattgttgatatctttaagctattgctacatcctgacgagattttcacattttaccaaattaaccatagattggtttctcaaggtaaatatgacttgaattctataatgaagatgctgcctattgagcgtggcataaccttatcgcttattgaaaaggaccttaaatcatgacaacacaaagattaggatatcctaatataagcataaaattatattctggatatgatgcgtggctagctaatagattcgttgaattagcagctacatttattacattaacaatgagagattcattacgcgggactaacgaaggcctacttcagttttatgactcgaaaaatatgcacacgcgtatgaacggtgatgaactagttcaaatatctgttgcaaacagtaacacatcgagaacacaaacccgaatttatgggattaaacactttacagttggtgttgatgataaaggcgatagcattatcacccttcagcttggaacactgcatgacataatgaatctcaagttcagcagagcgttttttagttctgcgtatgaaactataaaagaaatgataggtgcaatgtatgttgaccaaccattgattgctcctcctatcaacggaattaacgcttacgtcccacgggttccctggactagtaccctcaaagattacttacgatatgttagaaatgtaggcatttctacagacaacgatcaatttatttttgcgtgggaagatatcaccggaattaacatgatggattatgaatcaatgatatcccaggatccaaatgtattcatgttcggggctcctcaaacaataggtcagtttgctgcaggattaaaatatccattagcatgggattttgaatggcttgttaaatcaaacagatataatagaaatcccatgaaaaacgcaacattttatgcacactcgtttgtggacaaagatgttacccgaattattaatggagaaggccaaaacagcgtattcattaataggtcaggaggatattctgacatgatttttaggaatggctatgaagaagcactacgcatttctacgatggctcaatatgacgggtatgctcaaactaagtgttacggtaattttgaactaactccaggaatgaaaatcaactttgttgatttaaaggaccagttcagaactgacttttatatagatgaagttatccatgaaatatcaaataacacatctataactaacttatatatgttcacaaatggctctgcccttgaacctgtagatttgattaaggtgaaaaatgaacttaaacgtgattcttcctattaagaaaatagtaataaatgaaaagacgatatcaattccaaaactggggttaaagcaccataatctgatgaaagatgttaagggtccagatgaaaacatgaatcttcttttggattcaatttgtccaggattaacagcagccgaatctgatattgttgtattacatttattagcatttaacaacagaataaaagaaactgttgttaaagatgattttacctacgatttgaataaggtttacatttgccagcgattaactcaaaggttagatggtaaagaattcaaattcagagctcctcctcgttattccaaactaggttcagtagattcaattttgagcgaatttcttgaatcagtagatggaaaaccaatggatataaactttatgaagcttccagcttttgtgacaaagtgggctgatgacttagtaaacactatagccattgatggacctgaaggaccaatcaaaggcatgcttaacgtaatggaaatatttgaatgactaagaaatcagaaatgaattcaatgcgtagaagagttattgctgactcggctccacagaaaaaggctgagtctcaagctgatgctcaaattaatacgctagaagatattggtcgtcgtttagacgaccaacaagcatctactgatttaatttcggatgtaatagaaactaaatcaaacgaaattatcaaatcagtagaagatgtttcagctggtgtcgaattgaccgcagaagcttctgagcgcacaactgatgcagtatcaaaacttaatgatactgcatcattaattaatgataagctcacgaaacttgccgacttgttatctaaaaagcatgatgttcagcaagatgtccaaaagactggtactggaacatcattagaaacgataacagaacaagtcccggatgctcctactcagcagccgctagaggaattactcgaaagacttattcctcctcaggatggcagacgtcctgacgcggatttctttcctagcacagaagagcaagaggaaaaagctgagcctaaaaaggaaactgaggacaagaataaaaagtttcttgacctaaaatttggagaattaattaaaagcgttaaatctggttttggaaaaactatttcattaacagataaaattagcagtatgctgtttagttatactgttagcgctttggcccaaatggcgaaaactgccgccatggttttgggtgtgataatgcttatagatttaattaaagttcattttaattattggactaaattattcgaaaagaactttgttgaatttaacaagcaggctaaagaatggggtccgctattaactgcaataagcgagatgtcgaatgaaatagtaaaatcattcgtcaaaggagattggggcggattagcaaaagccattggctcgggtttggttgatgtaattgataagctcggagaaaccattatgctcggaatgagtaagcttcttgctggaatgttacgcgcattaggatttaacgattcggcagataacattgaaggcgctgctttagacagatttcaaactgttactggagcagaactcgatgaagaagatgctaaaatgagagcaaaatatgttgaccgtcaagaaagagaatatgacgaacaacctgaatggaaaagaaagctttctgctaagttccaaaaattcaccgggcagattgatgacgatgaatataacaaactgctgagcggagagaaaaagcagtcagcgtatgcagacttgccagaagacgaacgcctcaaaatcatcacagctcgtaataatgctgaagcagaaatgaagagaacaaaagcgtatgtagaaaaaactgacgcatctgattccactcgattagactctgctaaggatgcagtacaaagcacaaccaccagatataaagaattggagaaattatctccagaagttgcaaaagacttaaaggttgaattagaccaattgcaaaaactccttgattctaaaatatcagaacctgctccaactgccgaagctatacctgcagcagaacaacctgaggttaaacagtctgcttctattaaagccgctgcggatagtcgtgaagctgctcgtacacgtgaatctaatacacagtcgcaacctattcaggttaataccgctgtaaataagaatagcacatacgtttatagaacgcctccacagacttcaacagctgctcctggaatgcaaggcgctatgaaaacctcttaaggaaaaataatgatttttgaagaactggccgatggccttgaaaacatcaaaaaatcaggaactcgaatttcccaaggtaaatctaaactgacgaatgcgccaaccactaaggtggcgcagttcccagctgaacgttcagctgggaatgattccgcccaagatatgagagtacatgacttatatcgcaatgggttattattcacagcatatgattttaaaggaagaactactcctgatttgcgttcatttagacgagatgtaatgttatcgtctgtattcgattcaccaatgtcagcattggctaattcatcaagttctaccactagtactgcaccagtagctaatattctattaccgcggtctaagtcagacgttgattcagttagccataaatttaatgatgttggggattctcttgttacacgtggcggcggtactgctactggtgtattaagcaacgtggcttctactgcggtgtttgggtcgatagagtctttaacgcagggattaatggccgataatggtgaacaaatttataacactgcccgtagtatgtatgccggacctgataatagaacgaaagtgtttacttgggatttaactcctaggtctgcagatgaccttatacaaattattcgcatctatgaaatttttaactactattcttacggtgtgactggaaattcatcatacgcaaaagaagttaaagctgctattgatgaatggtataaaggaactcttaaatccgcagctccagatggggctaaagtagaaaacacggtgtttgagcaaataacatcgtttttaagcaatgttattgtagtttctaacccaacgatttggactgttcgtaattttggatattctacatcaatggatggtagagaggatatatttggtccatgccaaattcagagtatccgctttgataaaacgccgaacggacatttcaatggtttagcaattgctcctaaccttccaagcacatttacgcttgaaattactatgcgtgaaatacttactcttaatagaggtaacgtttatatcggaggtattgaataatgtttactctcgaagaatttaagagtcaagcggctgatatcgatttccagagaactaatatgttctctgttgtattcgctactgtaccctctagtaaaacccaggctcttctaaacgactttggtggagagctgtataataatatgggtttagatggaaattggcttggattgaccccaggtgaattcaatcagggtataacaactatagtgacacaaggaactcggcaagttgttcgtaaatcaggtgtgaatacatttatgattggcgcaatgactcaacgtgtggtgcagtcattattaggagaatttacggtaggtacttatctgctcgatttctttaatatggcatttccaacagcaggattgatggtttattctgctaaaataccagagaacagattatcatatgaaatggataagttccataacgctcctaatataaaaatcacaggaagagatatggaaccgctggttctttcatttaggatggacccagaagcaagcaactaccgggcaatgcaagattgggtaaatgctgttgaagacccagtgactggtctgcgaggattgccacaagacgtagaatgtgatatccaagttaaccttcatgctagaaatggattaccacatactgtatgcttgttctcaggggctatgcctgtagcgtgtggagctcccgaatttacatatgatggagaaaacacgatagcagtgtttgatgtcacgtttgcttaccgtagcatgcaaacgggttcggttggaaaacaagctgctatggattggttggaagataaggctattcagaaaattgagacgattaatccaaatcagggcttgagtgcgtctgcttcaagattgtctcgtttaggcggggctggtggtggaatttctaatatcactactacaacaagtagaataatttaggggccgtaaggcccctttgttttatgcaatgcagccaataaaccctggctcagtgcgaagaagtttcatttcgtttgtggtccaaactactttaacaggaatgataccttctgcctttccattaagaacggcttctacaaacgatggctctgttggcttacggaagatatcttgaataagaaccgtcggagtaccttcgttaaacccttcaagcatgataagaacttcttcattgaacttctctgcatctttaacatcagcagaccattcaataccgttaaagcgaaatacgtgtttcatatcaatttcctcattggtttgtgtaagtctatagtatcacgtccttgtgataagtaaacaactttatgcaagtttttctgggataccatccaggttgatagcaccagccagtagctccatggtacgcgtgtagctaaccttatctgtagaacggtctggcgaaaagtaaatctcatttaaaaagcctttgaacttgctttcttcaagaggttccactttgccctgttccatcaagatgtcaccatcatagagatgaaccgattcatcgatttgctctggcggaactaccgtcatttctaccatgaatgtcttgttattcgctacaccaactccatttctaaaaggagttccccatactttgttgactttcattgccaacccgcgaggaagaataacttcagcctcatcgctaaagcttgacaagacacccgggataactaccttaactttatcggccccatggataacgaatccaaacttaaactcatcgccataggcaacttcctcgcctctatcaactctttccaagttgtctgttccaataacagaagatactgcatctatagttgtttctttgttttctaaatcagaactaggtgcgtctggcattaatgaatcaccagcatttgaataagcaccaaagataattggacttaacgaagtagaaacatagttctggaaataaaacattttagactcaatgttatctttaaagtcttcatattttcctcgctgaccacgatacaaaagagtgcctggttcaagacgcaaacctttttcaaaggcagaatcgagcggacgaattttcttgtcaataattggatcgcctaagctttccatgccaataagatagttattaacaaatgaataaccagaaccacagtaatggtgtattgcatctctttcttcttcgcttaaacgagaatgcatttcacggttatattcaattgctttggatatagaatcgccaacaattgacacataagcggatatcatataattgacaagattttggtattgacgtaaagctccgaaatcgtcagctggaggcatatcaaatccacgagtagctacttcaacgattttacgcattgtttccatagatgcaggatttttagcttgagcaataacgtcagcaacgtctgaaattcgttgttcagcgattttcattttgtctgaccccgaaggaatgaaaaccttccagtcgtcatgcattctcgacatttggcctacaaataatctctcaactgcatcgccaaaattacttccatatccgccacgaacacgatagtgcttgatatcatcaacataaaaaggaattgatttttctaatccggctttgatatctttttggaggtctaccgtatcgccttctgcgctaagaaccggtgtgttagtagttaattcgtaccaacgttcgcgtttattttctggccaatcttcatcaacatatgaaacaaatttgccgtactgtgctcggattaaatcttttcgagacactttcattttactcattacagcgagttcagatttcttgtcttctttttcgccaatggaattagccaatgcttcggctttggtaacgttttcgccggtttctttagacacataaacttcgcctactttggaatctactttggtgtaaagttcttctgaaatttcaggaattccttcaatctcttcaagtttcttacctttacgaaccataatagaataagcatacttacctttgtagtaagccatatctttcattagattgaaacgaccgccggtgcgagtagtaatcaaccgagcaagaatgcgttgaatggctttatcctgtccttgcattttcttcggattaaagcggaacattaccgcatcagctttaatttgcttaactactttgttgacggtctcaaaaatggtattgatagcaccaatcgggtcttggcctaaaccacctttaagcgccccgatgttacctttttccgacacagagaaaacatagacctggatgaatttatcacccatcttgatgttcttaactgcatcaccttgacctgacccttgtactaaccgaatcattaaattgttattacccggcaccttaatcaaaaagacctgtggtaccttaagttttggcttaacgttctcgacgggatagattttactattctcttcatcgaaaacttcatttaaaagttccatgacatatcctcgtttgtttattctatttatacgaaaaaaggcccgaaggccttaattaattattgttactgtacgccaaacttgtagtccatttacagactcatactcttcaatgttttctttgaagtttcttaatgtgttaatgttattaaactcaataacttctgtgtgaacagaaataccaccacgtccgtcaagagatttagcaatcacttcgtataaagctttcattttattcctgttgcctcagtaaagttaacaccaaacgcggcttcgaatgtattagccacttctttatcatatctacgctgtttaatgataggtaagaataatcctactgtaccatcatcacgaccttcagcagttacccaaccattacattcaagttcccagatagttcctggaagagaatctctgtttttccatagatgagtacgatcaagttcatgtaattcttcgggcttatctttaagacctgacccagcgttaacacgaatacgaccacattctgatacgaacattaagccgcccattttaccaggttgttttctatgctcgtacgaaccgacacatttcaaatctacagtgataacctctttaaatttaacgaggttcttagaacgcttatcttcccaataagcaccgatattcttaaggataataccttcgagaccttggtctacgtatgtcttatagatagcccgagcttcatggatgttatgtacgacatggttttcaattagaataaccttgtcatagcctttgctcatcatttccaatgcacggaagcgtacatcataagcaaatccaggaactttaccttcggaatatactacatcaagcggaacataatcccaaacttggaatctcataccttccgcttcttcggcagatattgttcctttaatagccttattagccaatccgtttgattccgtgcgagccgtctgttggaattccttagctttacttaactcaggaagctcaggctctttaaacatatcaaacaggtcgttttcttcttctttcacttcgacatgatataccaactcgccgtcaatcatcacaccgttaggatggcgttctcgggcttctttggtcatctcgataagttgacgcttaagtttatctagacccaggtattcattaccggaacgagtaagaagagtcacatcatctaaatcatctccgcggatttcagcgaagcatcgggctccatcagctttaagttgtgcgaatgcagggaacttaatatatgacagcgctttctcagagtaggctgatgctaacatctgtggcatctcaggaattaatttcttccataccttattagcaatagaacctgaagcgccgcaacgcatatctttaagaagaacccgtaccagtacactagcatcaccctcattcatcttagagagcaaatctactagcccctggattgccatattaccagtaagtactcgtgctgccagaatgtcttggaggtaatctagaccatctgaaaacgtctttgaaggaacatttggatatttaacgggagtatattctggaactttcttaataaagaatttaaatcgcccggaatacgccagcagataagctcgctttaaatcaacgttatctttattgtcaatgagaatttgggttttggctttagaacccttagcatcttcaattgctttgatgatatcaaaaatcattattcacctaattcttttgaaagttcgcttacgctacgatgataagttaatccatcgatataaacaaacccgttattgatgcattcattccaaatcgggcacgactttgcttcacgccaaattggattccaacgataaaactgattaacatggccataatcacatgataaccagcgtttaccaaccttagtatgaactacaaacatatttcctcctagggtatggcaattataccatacccagagtgttagcaattaatttggtgattatcacatgtaatacgaccattattccaccagtcgtttccaggaggaacatgcggaccaggactaaacggaatgataggttgtttccaccaatctcctggaacttgtcgtggaggccaattaaaaggatgttgctctttacgaatttggtctttgatagcttcttcccacaatccagaaagagacttctgcggtttcttaacgaatttcagagattccaggcaagttacaatttgatgccaatcttcaaccataattccaggagcagtcactgaaccttctcgctcaccacgaggcatataaaacacacgggtttcagtgtcttcaaagactttgctagctgcagcaatgtgtttaggcaaatcatctacatagcaaacgatgcgatcgccgtattttactttagccttttccagtaaagcatctttagattcatcataatcgcagaccatgatttctgtaaatgcatcagggaacaaagcattcagattgaaacgacgattaaggttagcatctactgagttgccaagagccgtgatagcgacaaaatcgtatttttctttgagcttattaactgtagctaaagcatcagcatacggagcaagataacgaataaaatcactgttgttgtacttcagaagcagcttaacagctagttcttcttcacaatcaaacagctcagcgggtttaatgaatttttcagtagtcatcatatcaaggatatgctctacaggaaggttatatttctgggcaaagtaaggcagaccactttgccatttaacgatgattccatcaacatcggtcgcaattacaggttttgacattcggggaaattcctcaatgcttgtttaaatttggcgacgctatttgcggcaccggtgaaattgaaccagattaaccctggagtgtccgagggttctatatcaattaattctatattataatactcaacagtctttagcatttccctggtgatacgtcgggcaaccatatgaccgaagtgaggattaatagacatcgtcgttagcagcccttaattgagtaattggataaagctcggattctgcatggattgaacgattgccatcaacccaattaacttcataccaaggttcaaccaagtaggctttaattgctggagccgtatcacatacaactccaggaattccatttgctaatcttactgtactgaagatatgatatttcatgcatcaagtctcactgcccattcgggcaattcaaagaaatccggagcatcaatttcatactcaacggtgtgttgtttaacatcagctgacatgatatcaaccattgggtggtttttcaaactgcaagaaaaaataccagctttaggtttaggcacggatacaatcatgttgatttcctcaaaatttagttatgaatttttctttcggcattttggcatttgagccatcactgtcagaatacccaattggcatagttgcattaatgaattcaattttagcatttataacattaatgctcagagaatctacaccatcaaccatacgaaattcaggagggcaatacttatcaatgtatgctttcacgccatttttattagcaggtgtaccatcgcgagtatcgctgataatggtttcaacttttttctttcgtgaatcatagaaagctgatacaatcatttcaatttcctcttaaaacgggcgaatattaacgtgaaccacagggacagcaaaaggttgcatgattacaacttttgtgtctttagttgcattcaggcgttgtacttttgcaagattaacagcttcttcctttgttaatccgccattgtaggtatcatttcctttatttgatgtccaaacaccccaatcattgcttccatcatcgtcggtcttcggttcaggttctttgtagatggtttcttcaaaataatgctgaaactcttgattagtaagaatacaccacatatgggaaaagcgaacttcatctacactaacgcgtttgcattctccatctggcttaatgatttcaaattcaactaatccggtattttccgcatatttaaaggttctggtaattttaatcggattattaccgatttgctcaaaaacacccttgataagagcgcctggagacaagattggagtctttttaagcttatagaatttacctttttccattatcatttcctcaatagtggggccgaagccccgagttagttaaaacttgatttcgtttgaaacgatatcccagattgcttcacgttgttcttcggttgttttacgaccgaggatgtggcgcagataaattttaacaagcagctgacgatttgtgttccaagacggatgtgaagataaatcacgtttacgaacttcatcatggaatccaactttgatttcagaaccgttgaactgaatatccagagtaggaccattttcaaagctgaagaatacgtagttatcttcccagtacatatcgatttgagctactgtgccattgttgtgttcccacagcaaagtagtagaaacgtcccaagcattgttctgtacgtatttgcggttgaagttagtgaagttcatttttattctccgtagtttgtttatctgtttgggtggtacaggtctatagtaacccagaccacccaagaagtaaacaacttttattcaaaaacttcagacatttttaacctctacagttttaacagtttttacttctgcaaatccggtgcttttaaacagttcatacttggtagtttcggggacgatatcggttagttcaaggatgatttcttttgcttcttttaaagtgaagacgctacgcccatctttaaccactggagtaggtttaacgaacgttgatgggatttcaaaaactgcatagcggtcatcagagctttgattttcaaacgctcctatttgcacaacacgtccttcttctaactcgtgagaagaaaataaacatgacagagaccggtcatattcatctcctatggtttttgccgaaatgattttaccggtttcggttttaatcttaacgacccgtcccagcgaatcaagttctaacggcgtccagccttgaactccgacaacggtggcaatgagatagttaattgtgttcttagcgtctttccatctacggtaagtttctggggaaatgcaatatactcggtttttgctgtaattcattttgatatcctcaaagatggggccgaagccccagtcaagattactgtttagtccaattatccatgtttaatttaccgacctttttcatttgctcaattaaagcatcggcacgattacgaccattttcataccaggttacatcttctgagtaaccgtcttcttcatctgtgtaagtttcagaacgaatacgaccaacaactggagtgttcagaacatatacagaacctgtgaaccaattggttagcgtgatatgccagcagaaatcatctgatggaccgtccggtgtcatgcatggaacgatatcaccttgaactttagacaaaatccacattttctcgtggacagtctgagctttataaccgtcatggtctttagtcttgatagttgcattcaggttgatggtattcattttattctccgttgtatctgtttgggtggtacaggtctatagtaaccttgttgagcctagaagtaaacaacttttttcattctgcggaaaataaaaaagggactcccgaaggagtccctgaacttatgctttcggcttaccaaaacgagaagcatcatcgcgaagaaccgcacgagcccgacgcatgattttctcaaccgtctgattgatacgcttgttcgacccacgcttgtagccagcgcgtttagaggtaccaacaacttcttttactgcagtttttgctttagcttgtttagccattttatcatcttccattttggagaaatacatgggagcacgttcttccgaggttcaacttctttcgacagttctttcggttgtagctcccgcaagccctcaaagggtacgtttaaactcttatctgttgcacaccgttagcttaaaggttccgggtccgatttctcggggataagatatacaccgatggatgtataggccttgaggcgtactcccgattggccatcgcctcggggtagcatgcacttgccgtttattttctagctgcactttggtagcaaatcaccgatggtttcggatgttttacgtggggataaccaacaacgtccacatcatacgttacccatgcgtacacatggtgggcgtacaaattacttcagcgttaccacaaagtggcgaacagctttgcgagcagcagaaccaagatgcttagcatacttcagttcatccatcgcttctaaagtatcacgaaattcagcttgtgctgggttcaggtgtttaaaccctttcagaacttccagtgcttctgcatagatatcgattgaagcaccgtagttttcgtgaccggaattccatgcattacgttggagttccagagctttagtaagttgtttgttcattgaatcgttcctcaaatgaggttaaaatttggtggacggtaaccgaggtttagctcgggcatccaccgcgtagaattgctcgggtaactaattgtccgacgcccaattcatattattatttatatacgcatgcaagggacttataatgacaagtcacaaacttctgccgaatttctttaggtttcttcacacctgctgctactaacggatgaggtacatttctgatattaccaacaggcagtggagtcaaatcaccgacttcaacaaatcctttcggtacatcatcaccgatagaatagatttcacacatatccggcagttgtccttgttcttcttttccaagaataataccggaaggagaaacaatttcatcaccttgctgtgcaggttcagatacgagaattacatactcgcctagagctttaattggaagttccatgtgttacctttattgtttgaccatgtagttatattaacatggtcagtttaaagcaaattacttaccgatcatctgcagcagatgctcaactttcataccatttaccgagataagtttatcaaaggcaaatgagcgccaaccttctttctcggtatcatatactggaagtgaagtagtgctttctgctcgagcagatttagtagtgctttctaccaaatcagatggaataatgtctttatcacgagtacagcgcagagtacgaatagtgccatcagctttttcaaacacaatctgggattcgcccatgctcagcacagccttcagagtttcacgaatatggatgttttgttcagtagtcagtttcattttgatgtctctttaatagttttgataattacagatttgcgcttggataattcttttaataatcgaactgcttgatcttcaaatttaaatgttgctagtggtttccatttaaaccaataccggcgttctactgagtatgatataacaacatcaccacttaggttaagtttattaatttcaacaattctaagtttcattattcaattccacagaattctttaatgttataccaattcaacttatccaaattacgttttggaacattgaacacctcgattccagcagaacgaagaatatcgtcccagccgggttcgttcttgtcgtatgtttcgcagtatactaattttttaataccagactgagcgatggcttttgcacaatctggacatggagacagtgtgacatacattgttgctccatcaatactactgccgttccgggcagcaaaaagaatagcattaagctcagcatggatttcattgactttagaccatgcagagtgggctgctcgatgttctttgagcaatccgacttttttgacttgaaatccgtcttgacgcaatcccgtagatttgtaaggaatttcaccaatccaaccttgttctgctgcatggtcacaacagttcacaccaccagaaggtgaaccgttatagccagtagaaataattcgtccattcttttcaattactgcgccgactttccacgagcagcattttgactcttgagatacgagatacgcaatttgtagtactgtcgacgctttcatttaaatcaccagataagttgtgttatttgttttaaccaattttaactcgtcggtaggagaagcaaaactctctactcgagaagtacgaatgcctgtaccatctggaaacggatgatttcctcgttcaagaacatcggaaaagacataaccataaagaggttggccttccttaacatcaacgttactgtacaaaatagcatcatattcttcgcgcggaattgaccaaacgccttggtcagaaccaataacagcattaattagacgaataccattttggctaatttctgccctaattccacgagcatgttcaattaaaagagcttctacagcctcacgtaaagtcattagatatgtcctaaaatgttagtcatttcaacttggcctgttccggttaaagccaattgagtgtgttgattgctctttccattattaactgtaatgatataagcatcaacatagttaaaggatgactctcgtcggagagtcactttacttccaggaacccggtttgctacttcctgtgcgaagattttaaccttcgaaataaattcatcatgcgaaaatttagcatcagacaacataagtttcaacctgttgggtttcaaaattagcaataattccaacgataaaccagtcgtgttcaccttcgccacaagaaattttaacttcagatgaaccgcctgaccggtcaatagaaaatttaataacttcgccgtttggaataagtgcattcatggcagataaaaactctgcatgcattttggctacttcagatggagtaaactcatctgttaaatgattagcaacaacttgcgtaaatgatacttttactacttcggaatactttggaaacattatactttcctctaaaaatcaccgtgggctacttgccagcattcaacaccgatacgacgccacatttcaaccacctgcgccctgtcatctactgcaagttttacattataacgatcagcaattcggtcccagaagatttcttcttttaccacatcgtctttgcgtgaatcgccttgcttacgttggaagtgttcgcctgtttcgccaacatggtccaacaaccatttcttcgtaatgcgttgataaacagtagggtcttctttagtaccagactctctgccggaaacagtaagaattttatatcctttgttacgaagcattttaagaaattcaattaccatttcctttggatggtctttaccacatttggccaagtcataaggagaacgatgattgttatctgctaacgtgccgtcaagatcaaagataactgcttttggcaatgattcgtctggaatgtacaaatcatatggatgcatcttagaatagaagctacgaagcacttcaataggaactgcattcgcgccacgatagaggttacgattaagcaattcagtccaaggaacgtcaaagcgtttaatttcccacttgacaccatcaatttcgtatgccaactcttgccacttcttgatagtcgttggattaaggttagtatcagcaatgatgacacctttagtggtttccatctcgagtagagtcttcgccatagaaaactgtcatacagatactgacttctcacgaagcttagaatatttgtaatcattacgtttatcaaggccaaagatgccttcacgcaaatcatcacgagacaaaacataccaacctggattagctgctacgtattcgttagcccaggttgttttaccagagcctggagccccttgtgtcaaaaccaattttttcattatacatccttaagagtgtcaataaaatcatgaagagccttagacttttcaccccaattagcacgatatttttctttaattgctcgcaatggcttattcattgacagtatatcatttttgtcataattttcagctgcgcgtccaaacacgatgcacgccaattcattttcagcaattaatcctttaagtgtttcatactgctctcggttcattataataccatcacttaacgcaacgaggttctttaaggtcagaacgataataacatatcattccattagcatctttagtatatcgtaaaatgtcattcatccagatacgatattcttgcgactcttcaaacggcataccaacccaggctttaccgtcaattacttttacttcccaatgtccttcccatttttgaattgggtctggccactcaggatgtaaaaccgggacatctggtgcactagaagagcatccagcaagtaagctgataatacccatggctaatagacttcgtttcatctggtagcctcctggatatcttctgcaaacttattgaagcttgcattaatctgtttttcaactaatccaggtttggctgcaactacgtttccacgcttagaatctttattcatcttagcgttagaagtatcacgagctgctcggttttcctgatagcctttatatgttgtctgcagattttttatagaaacaccaatgttttctatttcttttgcttgtcgatcagattcatcttggacgactttgaggtcagctttaagattttctacccgccacgaaagatatttcaatccaccggcggataacgctaacacaccaatcatcaaccaagttgtgtttattttgagcatagtttaaggataacctctacgatatcatcacgggataatcccgaaatgaggatgtgacgatcagaactttccgaaggagaacacttgaagcaagcttctacatattctgccatctcagaataattcagctcgcgatgcataatgccaagacgatgcttgccataaatcgggtcaacgattacatagcatttgcatccgttagcatgaacgtttggctgggtgatgttcttgaacacctctgcaccatacttcgcgagatgattatctaggaaatcaatcatttcatctacagcttcaggaagggcttcggcacgctgctcgttcacacgattagtgtactctttttgcttcttacgagcagcttccttgcgcgccatgtgcgtccgtaggtcagtgacgaagcccaccttcttggtaccattccacacaaaaattccatcggaatgagtaccatatttgttaacaaccatatctaaagtaattgcttgcatatccatttcaatatcctcatcagtttgtgtaagtctatagtatcacactctgacgaggatgtaaacaactattcttcagaaatttcaatttctttttcgtactcttttggaacatatcctgcccagtactttaagaacaccctttcgaggtctttaagcagtttatccacatctacagttccttcgtacatgttcatgataacaccaaaaagatggcgctgattaaccgttgctttctgagcagcaatagcataatctttacgagcacgacctctgtattcatcgtagaacgactgacatagctcaagtgactttcctaggtaatctagataagcttgctcaaacgcagaaattttcttaattgcgtattcatctccagcaaaaagagaacgcaaatcgtcggaatttgcagatacgacagacgcaaacagtctttcatttgacgttattgagtctttagtgtgatgaagagcagaataccattcggttttaaccttaaatctctgcccagtgtttagaactgcaatgtacccttctacgccttcaagttcacgaacaccttcaacccaagttttggggtcagaaattccgtaagcattaattaaataaggacgaatcttagcattagcgtacaaatcatcatatttaatatactcgccagttgcgttattacggacgtttaacacaaacagctgtggctcctgatatgctaaaacaacacgattattaggtgaaacaaattccatgtttaccgtataaccatctagcgctagctcaagaataacctgatgaagcgaagaatattcttcactgttaagcaaagctgaagcttgtcttgcctggtcactgtaaagagaggtttttgatttaaggtatagatacccatcatcaacataagatgatactagagagccatcagccttatccataatgtattctacatcgctaatatcaattcccatcgttagtgggttttcattcaaattgaagaatttttccatcggacgcgaagcaattcgaattggggtatcgccatccatctcaaacatgataccgcggcactcaagagcatcgggttttaaccactcgctgtagcttgcgtagtgatatgaaaacactctgaacttaccatccataggaccggtaaaatctttataaaagaattttgcaacttctgagctttcacacagattcattaaatttttatatagctctaacatttctttaccttatgtttgcaattatcgtagtgccatctgatagcaatggcctttgaagttattataccacaatgcgggcatggactgtacaaaggctttttctttcctttttggctttctgaccgcttgagtttagtttcttcagattgtgttttaccggttaaagattttgatatcttttcgcgtgtttctttggcatgagtctttccttgagttggacttactctgcctttcagtgctttagataaattctttctatgttcttccgttcgtttctttccggagaataagttagatgtataattagaatgctttattctagagctttcataaaatctggaatgaactttaaaattctttccagaagaattacacatcatccaaagagcataattcattttagaattattatgtatctttgataatagcaaatgggcaatgaaatgttcacgtccagtcaataaaactaaattagaaacatcgtcatttcctcctaatgattttggaatgatatgatgagcttcagtataatagtttaattttcctttatcattgcctcgtaatttaccctttgctattaggttatcatatactttaacatagttcatttagctttgttagtatgttgtgtgttccatggaggattgaacttcttaatcagaagtggttcttccaagtccatagtggatattgacatctcgccaagttcattattaatcaaaagattaaaacactgacgagcatagaactctacttttttgccagccattagtgcttcaaaaatcttggcagatttagccgaatcagaggtttggtctttccgattaatagcagttctataataatttatacgtttacgaagattttttgtcttaccaatgtaaactagttcatcatcaactgcgatggcataaactacattcaacttgtttgctatcaaaattggtttgatggtaaaatctggttctaactcaagttgaacatattttataaaagaaaactcgttagcaatatcattcataataaagaggggccgaagcccctttccttataagtactttttaaatccaattagaacatcatcagtgacatcattgtcaatctgagctaccagataagaacttatctcaacttcctgcggagcagattggactgcatcagagttaagatattcgcgaatccaaggaataggatgacgagttggtgcatccgtgattgggcacggcagaccacagctacgcatgcgagatacagtcagatagtcaatgaagtcatgaagaattttaacgttcagacccggaagaccaccgttgcggaaaagatggatagcccaatctttttcttggcggttaacttccatgaagattttaattgcttcttgttcacactctttagcaatctcaacccattcttcgccatcagtgccagtttgaagttgacgcagaatgtactgcgtgcccttcaaatgaagttgttcatcacgagcaatgaacttcatgattttagcattaccttccatgatttccatatttttatggaagttgaaggtacacgcaaaactaacatagaaacgaatagcttctaatgcgttaataacatgtaagcaaagataaagagatttcattaaatcacgtttagcttctttaatttcgatattatcttgattaaagcagcgatttttggcattttcccatgcgcgagtcttcgctataacatcatcatagtaaacaccaattgactcagcgcgtttcatgattgcttcgtcaagaacgatttcatcaaagattttagctgggtctacatataggttacgcatgatatgcgtgtatgaacggctgtgaatagtttcactgaacgtccaagtctggttccaagtatctaggcttgggtcagaaataagcgcagataaaactgctgctggagcccgtccttgaattgaatcaagaagagattggtacttcaagttatcagtgaagatattacgttggtgttctgggagtttttcaaactgaccacggtccatcataacgttaacttcttcaggacgccaaaagaagctcaattgcttctcaatgagttcctcgaatactttatgacgctgaatatcatagcgtgcaattcctagaccagaaccaaagaacattggttcggtcatgatatctacttgcttggtattaaaaactgtactcattctatttcctattctgtggtgttaaccatccgtggtctaattataattcccttttattaaagcttacaggccgcgcagtcagcagaatcttgaatcatatcatcgttaccggaaccatcacgggtgttatgatagtaaagagtcttaccaccaaagtaccagaaataaagcaagtcgtccatcattaccgacatttcaactttgcctttagggaaattcgccgggtcgtaataagtattagcagagatgctttggtctacaaatttctgcataatcagaacctggttcagataaggcttattaccctgtttcgcgagctgccaggcataatcataaagggaagcattgtgttcaacatttggaacgacttggttgaagcttccttcttttgattctttaactgacactggtccgcgtggtggttcaataccgttggtagagtttgatacctggcttgacgattcgcatggcataagcgcagataacgttgaatttcggataccgtatcgcttgaggtcttctcgcaggagttcccagtcacagacatagtttggagctgcgagttggtcaattctttcgttgtaccagtcaataggcagttcaccacgtccgtatcgagtttctttgtaaagcgtgcacggacctttttcgctagcaagtttaacagaggctttgatgagtgcatattgaatacgttccatcatttcgtgagtaatatcattagcatctgcgtatgaagcaaagttgcttgctaaccaagctgcatagttagtaatgccaacacctagtgctcgacggtctttagcttttaacgctttgtctacaggatagtcttggtaatccaaaaggttatccaaagcccttaccattacttctgcgatttcgttaacttcttcttggtcttgccagttgaagttgtcgagtacgaatgctgcgagtgtgcatagcgcgatttcgccatcttcttggccaacatccgaagttggtaacgcaatttcgaggcagaggtttgattgcttaaccgtagccacatcacgaataaaaggaccatattcaccaacgttatctaccatgtacgggtaaattcgagcagtaccagcacgttcagtaaggaacaactcaaacagttcacgggctttaatacgtttctttcttacgtctgggttcttttccagctcttcgtataaagtacggaatgcttgtgcatcacggaagtattctgtatacaaagtaccaagacacacatcgggactaaacagagtgatgtaatcattcttaatcaaacgttcaatcatcaggttattaatctgaacaccataatctaaatgacgaatacggttttcatctacccctttgttgttcttaagtacgaggaggttttcaacttccaagtgccagatttgatagtacaatgtcgccgcgccaccacggactccaccttgggagcaggatttaactgctgtctggaagtgtttccagaaaggaataactccagtatgtttgacttcaccgaatccaatttttgaaccctctgcgcgaatcattccagcattaataccaatacctgcacgcttactgatgtatttcgtaattgacgcagcagcttcgttaattgaattaagactatcaccaccttcaataaccacgcatgaactgaactggcgtgtcggagtacgaacaccagacataattggtgttggcaatgaaatctttttagtagaaactgcatcatagaaacgaataacgtttgctaaacggttttcgccatcatcttggtgcaagcacataccgatcaacataaaggcaaactgtggagtttcatacaattcaccagtgtgacggtcttttacgagatacttctcgataagctgcattgttccagcataagtcatagtgaaatcacgctcatgcttaatataagaatcaagcaaagtaatttcttctgcagaccacttacttagaatttctttatcgtacttatttgcgttaacacaacgtgaaatgtggtcaataaatgcaggcggttcaaactgtccataaacacgtttacggatttcaaacattgctgcattggatgctacatattgataatctggctcatcaatagaaatgctattcgctgctaccttaacgatagtcttctggatatctgcagtgctcatgccatcacgcagatgggatttaataatttcatacagctcgtatgggtctactttagttccttcgcacgcccattcgaggactttaatgattttctgcatgtcaaattcttgactaacacctgagctcttaattacttgcataagtcctctaattcaaatgtatctttaaaaagtttattcactacaagagctattatatcaccatggcaaggaagcggtttgcaggtgcatcctaatctcattcctcttaaagtttctaagtgctctcgctttatttctccgttccgaatcttagcaataaaatcgtccttaaacgctgcaatagcatcaggacgattatcgcaatctttaccgacgtaatttccccacattgttccacgttggatatttacatcgaagtcggaatggtatttattaaccacccgacatatcttcatgttatatcaacttcaaaccaacagattaattgtgttttgcctatagaccattcatatgatttaacaatagacagaaccctttgttcggtcccatcaaaaactatcttgtcattaacttcaggcaaatcgctagagaatgcatcacacatctcgcctaatactgttttagactggtgtcctttacgaacaaatcgaatattcatatcgccatctttcctgtaattgttgggtgagatttatacccaactagttcaaaatgatgaggacgtgcaaattgttctaaccaacgaacctgagaactagtctgccaagtttcatacgtatctgggaatgcaatttcaagctcacaaagttctttcggttctcgacgaagaatttctttacattgctcaatatgattcaggtaaatatgagtattaccaccagtgaataccaaatgcccaggtttaagatttgtcattttagcaatgatatgaactagtgctgcatatgacgcaatgttgaaggggaggccaaggaatacatctacagaacgctgataccattggaggtcaagatgcccctgacgaacgttaaattgatacagcaaatgacatggtggcaatgccatcttatccaaatcaaccgggttccatgcagtcacaatctgacgacggtcatatggaagttgcttgatacgatcaatgatcaatttcagttggtcaacacccatgaaatctcgccattgcttaccatacacaggtcccagttcacctccggaataccccatgtcttttgcctggttttcatagttgtcgtcccagacagttttaccttctagtaatgagtcatgctgaataagacgtaattcatgcacattagtagacccacgcatgaaccaaatcagttctgcaatacacgctttccacgcaagacgcttggtagttactgccggaaatccttcttgtaaatcaaaccggtgttgagtaccaaactttgcaatagtaccggtaccagtacggtcatcagtctcgtatccattttcaaaaatatctttaattaattcttggtattcacgcattaaatttttcctgaagaggagtaaagaaaagctggtctccacgcttttcaaatcgtccaataatagacactacatcatcgttaaccgtcacattaccgtgtgacattccgatgaacatcttcttataatcacgctcaatttcaataggtatatttccatttcggttatatactgtagttgaaccgttataagtgctaagaccattataactgaaaactagaagatgaataccatgcttaaatggaaatcttttccacttcttttggactttgtcttctgatagctgagtgatatcatagtttgcgctcatagaccacctctgaaatgttagtcacttcatcaatatgataccagtgattttctttagtaatgaatcctgattctggccaagtaggagctgctacaaattcagcaggtagagtgacatcagaattcactctatgactttttctgatggttgtttggataaccctatctgcatatggatatgccttctggatgattccggcaccacctatgatagaataattaaggtctctattaaaagtgatagtactgttgtaagaagtatgagcggccataatgtcaccacccaagaaaccgataaattctaattcacttacataagcatctgcaaagaagccatttttagcagttgccaacgcacgactcatgtcttggacaacgattgtcttacgaccaggaagaggtttaggaaaactcataaaagtctttgctccgcaaatcaagatagtatctcgagtacgattagcaaagtttttcatgtcctgggaaatatgtttccatggaagaccatcgcctaaaccgaaagcattttcgtttttgccgtctacagtttttgtaggagcaaatgcataaactatttgaatcatttaaacctcagcaaaatttagacatataaaaataatcctaatataatgccgctaataaaagcggcagtaacagaaattaacaaaactactaattcagcctcaatcatttcttggccttagcaagtttaaatgcttttttgaattcttcaacatcttcaacaggaatccagaagcctgagccatacccatcttcatagcatgggcagttatcacagtaatcattccaatagacagtttcaccacccatagtgaatggagcttccatctggcacagtacttcttcaacacgctctaattcttctgggtttttgtcgcaaatgcagaaattccatttaccacgatattcagaaccaagtttgatgctttgacgttgaagtttcatttttattctccagtagattatggagctatactatcacaagcatagctccttgtaaacaattattcttcaaaatcttccataaagtaatcaatgtcgtcccattccagagattcaagatatgcaataaccttttctctagaaccgcggaggtcaatatttggccaaccaccaccaggtccatgacgcataatcaagtcaaaatcaataccatggtcagtgtcataaaaacgtgtaccatctgcatactccaaatctacacaaataccgtctttgttgataataggagttgctacgatatcaatgtttaatttacccatgatgttttcctctactcgttttgtttcgatgtagatatagtatcactcatcaactggcttgtaaacaattttgtgaaatattttttggaggaataaagaaaaagggacccgaaggtccctttatattagaggtcgttcaaaatatcattcagatcgtcatcgccaacactgtcaccagcatcgcccatgatatcgtctgcggaacgagaagaggtcggtttggattcaaaatcagacaggtctttgtcaaaggaatccaggtcatcgccaattttatcggcttgagctgctgcttttgccgcggcaccaccaagagctgctgtacccataatctgtttaaatttggcttcgttaacttcaaacgatttaaactgagatggagcaacaatttcgctgaggtcagccatattttcggtcaggaatttctgagtttcttcatcattgatgtttgcaatctcggactgaccaaggaatttacattcatcatagttctggaaaccaccgactttcttaactttcatgacgaagtttgcaccttcatacacgcaagttacatcaaccggagtttcacccatatcaacatcaacttcaaccatcgcgttgattttgtccataattttctgaccgaaacggaatttgaatactttgccttcgttttctgggttagccgggtctttaataaccaggatgttagaccagaaagaggttttacgtttcagaagcttatattcagctgggttgctgttataagaatcgtttttactcagatgagcacaaaccgggcaagaatcaaaatcaccgtgggtagaagtacaattttcgatgtaccatttaccgccgtgtttgaaaccgtgattgatcagttttacaaacggtagagagttttcatctttaccaggcaggaagcgaattactgcttgaccattaccagcattatcggtcttcagtttccattcgtttttgtcttcgttagagaaagaagaaccacctttcagaccagccagttgttgttgaagttgagcaggatttttacgcttaaacatatgattacctttttaaatttaacagttgttgttgcaacatgggtccttgcaactggacgatagattaattatatactaatttctttacaagatttgattatgctaataaagagtttcttagcttcagcaccgtcaacgtttaaaagttttttataagcttttaatttagtggagtaattactccaaactaaattatccgttgcagtatcatgagtatttattatatctaaaaacgagtcaagcatgatgaatgtctcgaaagatataacgtttgactgaagaagtttgaacacataagatgttccgactttctcattatattcaaaaatatcatgaagcttatctacattaactttcttggcaaaatagtaaatgttctttacatcttccgagaacgttgttttaatctgcttcaatttacctatatattcacgataaaacacgagggcatcagcatcactgatatcgccaatccaagcatcttggttagctacgaggttactcatgaatatcagtgttaactcttttaatgtatatttctcagcgagtttctcaaagaaatatttgtctctacgcttttgataagctttatcagagacccgcataacccagttatacttaacaacgtcatatcgaccggcaaagtgttgtttgagcattaaatataaaagataaacgctcttaccgttaacgtatctgttattatttccaggcatgcggagacgaatcataataaaaaatccagactattcgttttatgtgtttgactaaatgatggtcgaagcatattttcttctaatgcttctgacataattttttctatgattgcaggtggaatatatctattgaagtttccctcaggaatagaattttcttctaaccactgagttgttgcttcaagataccccattccaagttctgttaccatagactcaatagtaaatccgttagcttgcttatctaacagctgattaatggattcagagggggatacctccccctcgtctttaagcgaaaatagagtcataagcttctaccacttcatctttttcagtttcaaaacgatcgcgtgtacctttatggaacagggcaagcagctgattaaataatttgccttctacaccaagctctttcttggcgcggtctttaatgtctttgttaagttcaagatagctttctgctttcaacttattacctgaggcttctttaatcatatctcgcagagcctgtccatgtaccgcttcatcaaatactacttgctctttttctttcttagccattatattcaccttaaaagttgttaatttctttcattaatttagacagaccggatttaacaaagtagctataaattttaccacgacccggtaattgatagttattataacaatctaaaatgttagcaacaatgtcttcgcggatgtaatcaaaatcgattaacacgcggttttccaagaaacgcttatactgttcttcagtaagcaaatctttaatgttttcgccagcatcaagacattcttcaacaaatgtcattttcgttgaaggagtacgctcaccatcaacatgggtgtaccaaaaatctgaacgaactttaatagaagctacgttatctttcttgtcacctttaataattttaaccatacaatctaaagcaggagaaccggttttagattttaccagtttcttctgcattggtgaccattgcttaacattaggatacttatgcaattgagtaaagtcaccatccgaagaaacaatcatgactggatggccttcgagactgaactttttggttaataccgcaatgctgtcatcagcttcagctttatcaatatcaatgacataataaggcatatactgcttaaattcatcaattacagtacgaagaccttcaaagtatccatcccagtcccaattggattcttcacgggctttagcacggttctttttatagtaatatgctacgtcccgacgccaatacccattaactgcgttatcaacgcagatgacaattttagtgtatccatctttcttccacttaaaagcattaaattttaaagtagaaagaataagatgacgaaccataggagttgttagtttgtcaccttctttatacgtatgaagaattgtcgccattgcaatttgtgacaagtcaattaaaatgacgccttcttttacttggtcttcttcggcgaataagcaatttaaatcagacatttgaacctcgttcaattagttagtacagccattataaatacttctataatgaagcataaccccataggagactctatgagcgatttactgaaacaacatttccgtgcaacgaacggcttggacgcaggcggaaataaagttataaatgtggcacttgctgaccgcaacgttaaaaccgacggcgtctccgtcgagtacgttattcaagaaaacactatccaaaaatatgacccgacacgtgggtatctcactgattttgctgtgacttatggacgtcgtatctggattgcaaataaagatattccaaagcctgctggagattttaaccaggcgaattggacttctttacgtgttgacccgaactggatttataccgtccgtaaaggagagtttgaaattcaatctggtcagttcatcaacgttgactctaacgctgcaggtaatgctacattactgcttccgttagcaccggatgaaggcgataccatcgtagttcgtgatattggcgggcgtcctggctataacggaatcttaattaaagcacaagatactggtgcgtctatcgtatttggtgaatcgcgtctgcgtgaggtaagacttacacgtccgtattcacaaattatgcttacgtttagtaatggtgcatggcgtgcgagtttaacagattttggcgatactgccaagatggtagttccgaacgggattgttccgacgcaagttcaggcaggtgataacgtagttcgtcgttatacttccaactcagagatttttattactctgccgttgttcgctaattcaaacgatatcatcaattttactgaccttgacggtacatcgccaattaaccatatgactgtgcgtacgtttgacccaactatctcaattgggactcctgggcaaacagaggttcaagtacgtacttcaggcaccggatttttggtatatgactcgattgacaaaatctggcgtatttttgaaaatgatttacgcaccagagtaagaataattacttctgatgttactttaatgcctaatgagcatatttctgtatttggcacagataacaataccgttaaaacaattaacgttactttgcctacagacgtagctgttggggatactgtcacaatcgcaatgaattatatgcgcaaaggacagactgtagtaattaaagcttctggtggtgatactatcgctagcaatttgaatttactgcaatttccaaaacgttcagagtatccacctgatgcagcatgggtgcaatcaagctcaattacctttaacggaactacatcgtatgttcctgttcttgggcttgcatatattgaagataaagcatccggaaaaagctattggattgtaactgaatctgaccctaccgtagaacgagttgatgctaaagacaatacaactagagcccgattaggtgttattgctcttgctacgcaggctcaagctaatgcggagtcaaacccagaaaaagaattagcaattacgccagaaaccttaaatggacgtcgttctactgaaacccaaactggtatagcaagaattgcaacttccagcgaagttaatcagtcaacaactgcttcttacttggataatgtaatcgttactcctaaaaagcttaacgaaagagctgctactgaaactcgtagaggtttagcagagattgcgactaatgctaaaatggatgcaggaacagacgattttacaattgttactcctaagaagctgctttatcgtactacgtcggattcacggttaggtgttattcaattagtaaaaactggtggtgctcctaacacaactgctgatcgttcttctgctggcaccggtatattcgatcattctgattacaaaaatgcagttactccaaaaactcttcgtgagtataaagctactgtaaaccaatcaggaatagtctggttagcaactgatagcgaagttagaaacggaactcctgcttcttcaaatattcctacggttgttacaccagaatctttgcataaaaaagttgctactgatggagcaattggtttaatccaaatagctacacaaactgaagttaatgctggcggcgtgactaataaagcagttacacctaaaacattaaatgaccgtacagcaactaacaatcgtactggtattgctcgcttcgcgacacctggtgcccagggtgaatttgaagctggtacttcaagtacagtaatggtaaaccctaaattactgttcgataaatttgctaataccgatcgtatccaagttaatactagttctggcttaactattactgggaacctctgggaccattataccatcaacatacaggaagcaagtacttctcaaagaggtacaaccactcttgctactgctgctgaggttagaactggaaccgacgctaagaaaatagttactgctgccgcgttacatgctaaaacagcaaccgaaggagctatcggtcttgctcagtatgctacacaggcacaagttgatgcaggcacattaagtgatagaattgttcctcctgcttacttgaaacagactattcaggtaacagagtcatggcaagctacagacagcgttagagggaccgtgaggctatctacaggcgatggaacgtggaaaggtaatgataccaatggctcaactcttccggataacgggtatgcctctaagggcgtcgcagtgtctccgtatgaattgaaccttacactgaaacattacttgcctcgtctcggtaaagcctatgacacaggaatgttaggtggtcaaacaccagacaaatatgctcgtcgcgatatagcgcagactatttctggagcttggacatttagtcaggacacttcatttagcaataatatttctgtcaagaatgttatatatgctaatggtggtgaagttaaaatttctccaactgctgacactggaattgtgcatgttcgttttcaaaatagagacggaagcgagcgtggtataatttatgctgagcctcaaacagcttcagccggaaacttaaaagttcgcgtaaaaaacggaacaggaactactgctgcaagccagacctacacatttggcggtaacggtacgttagaagttcctaacgaagtgtcaactaaaactctgaggtcttctggaaatgcaatagttggcggaactgttatggttaaggacgttcagatgcttgctgtcgagggattgaattcaatattcggtgcccaatcacagtccgcatttattcgttcccgtgacgctgatacacaaatttttgcacaggattcaactggatcgtatccaattttaactaccaaaaactacgcaagattagctgatggccgttatgtcaagaaagctggtgataccatgaccggcaatcttaacataaatagttctgctatcgtcattacgggttctgaatcctggtatgtgccaacgaatgaaactgtaataagacaaggttcttggactgctgaaatcaaagacgctactaaattgaaaggtcttcgtggttatatggttccaatcagaacaccgattgaccctggtaacccaagcactttagtagtgactgggtatgaagaaaaaactgcagctggtggtgttttaactcaggttggtgtaactacaaacaatacttatcagctttggacgccttatcctccgacaaccgaaactgctgataagcgtttcgcgcatactgtgtggatgaggatttataatccaaaccttaataagtttgatgattggatgcgagtatttacatctgctactcctccaactgcagctgatatcggagctccgagctcagtatcaactcaggttaaaacccttgaagttttggaatggattaagcttggtccagttaaaatctggccagaccgtccaaatcaaactctcaaatttgaatgggtaggtgattaatggctgaaccaattttaatggcagccttcggcgaggatttcgtggaaacacgaatcctctctgaggcaaactctgtgaagtattggctaaaagcttatgctacgcattctaatgctgttccgaataagccagaattgaatattaacggtgcctttgatatgacctcctccttacggagggggattaatgttgttcaagttaatggtgacaggtttattaactttaaaacatttgacgttaccactgatgataacaacgctaataacaaagcgtttgtagaatatgcaaatggattaacttcgggattgtatattataatgacacatgaacgatttcaatccagcccgctaatagacaggtggtttaaaaataagtggtctgcttcttggccaggttctgatttttccaaatcatttccaaactctgcttatgtaggagtgctcggagcagcaaaaggacgcatattaattgagtcattttacggaaatgatggaaaggttaaagaagattccagagctaaagtcgatactgtatatgataacgttggcgatgtaggatatacaggctgcccttatcgttccattgaagacactaatgagtactcggattctactggatatgaatataagcgatatccagttcaaaatgaatctataagcaaaatagctgattatggactatctcctggggattctgtatttttagtatgtgatatgtatgcatctaaaagtcttcttgatgctggttctactactagagctagcctgcgatggttcaaaggctcatctttattatcttcaaacgtatcattagaagttccaaaaaatggagctgatagatggttaagatttgaaagatttaccgctgttcctacagacgctgatggatttactattgtggtatcaagatatccaaaaacgtctgtagttggtgactctaaaatcaaaaaccttgtatttgttcaaacctctcatagcgaaaaactgaatagtgttgttcaagaatttggtgtgaatggtataagaatgaataaaggcgttgaaggaggaaccactatgattatggaacttccaaattcaaaagtcgatccgagcggtgttattccagttcaatcgttcagagaaacatcagactaaggaagccttcgggcttccttttttcgtataaatagaaaatatataagaggataaactatggccgatttaaaagcaggttcaacagttggcggaaatcctatttggcacgcgggtacttttcctcttgtgccggcaggaaactccctaacttatagaggtaagaaggtttatactgagatagataaacctcaagcaaatgataacgacttcgtgtccaaatcccgtggtggtacgtatacaggcgaagtaaaaatagcatatggcggctctggcaagttaagcatgggtccgttggcaaatgttggtattagagtcggtggtagtaatggtgaagttcttatcatcggagggaattcaaaaattcaattgcgcggcggcggaacggaagattccagcggcatagttgaaattgctaaaaatggtaacttaactgcacagactggtagaattaccgctaacgtatttacttctaaacaacagccatctggcgtagacgatttaactcgtaaagattatgttgatggacgaataaatactgttagcaacgtagctaacgcagcagtcaagaaagctggtgataccatgaccggtgtacttagggctaacgctggcgtagttatagtaaataaagcaacatccggtgaatatgctcctagattagatcaggttatttcacgcggggtaacaatagattttggcacatactaagaggtagccatggccgatcaaaacttaaaacaaatacaatttaaaagaactagcacagagaataaagcaccaggtgcagatatcgtagcccgtggcgaaatcgctttgaatacacatgggcgtactcttgccatttatactaaagatgaaaatgatgccgtagtacagctcgccggtaaaggggttcctttcttagatacctccggaactcttagcgttgatggaactactacgttaaaagacaatgtaaccatttctccgaataaagcaattagttttgaaactactgatttgagcggtgaaataactcgtcatatcgttggcaaatgtgctactaatgatggctggtacattggtgccggcggtacaagcaacagtggtattcttgaaatcggtactattgatgatggcgctgaaactattcaattcgtacaacgcggtgcaggcaacgttgaagcccgaaaattggtcttgcttgacggctctggtaatacgactcttcctggcgatttaagattatctaccaataagactgttaaaattaacagtggaagcactcttgttcttgaaatgggtgtaggctctaacgacgtctatattaaaaaccaaagaggcacgggtgttcttcaattaactaatgacagtaatttaacgttcagaaattcacaggtgtattacgctatgagcggaagaggtcctggtaaatccggtactcttctgacgaatgtagaaaacaatcgtcaagcctggcaatatactatttctgctgcaactgcgtcaactgctcgctgggtaaaagtagctacaataaagcatccaggaatggcttcttcgcaactggatttaatgattagcggtggtattgattctgggcacggtagacattacgttgattttatcacgttatcaggacgaaatttaacatcttggagcactaacaatttagataactgggttgaatggcgtcgagttggttctcctgataaaggaaagattccagagtattacgttgttaaaaatgatgctgctacagattcagaggcttcatttgatttttacgctaaagttcctcgatacggcaatgggctttatgttacagtgctaaacactgctggatacaacggccaagatagcggtaaagtaattatctatgaaaccaaccaagacactggtggatatggaccagctggaagtattcttgtttcaatgaaacagatttttgacagttacgcaaaaccagatttcggcgatactacgggtactcttccagttaaccgtggtggtacaggtgctactagcgcaggagcagctcgtaataacttaggtcttggtactgctgctgttcgcgacgttggtgaatctaacggaaacgtgatggaagttggtgcttatggcttaggcggtaatggcggtaaatcaatcgaaaacattacctctaatgctgatatgttgacccgtttaaaagcatatggtggtactttctggcgtggtgttactaaatctggtgttagtgttcaaaatggtctttatagccatggctccggtatttttatgaatgctggcgataccatgtcagctattaatatcgactacgccagcgctaaagttcgcgtatacgcagctaacgacagaagtcttgctgagggaaatgttagatacaacgaactttatggtacagcaaataagccatctaaggctgatgtcggacttggtaatctgacaaacgatacccaagttaagaaagctggcgacaccatgaccggtgatttagctgcacctaatttacatgcttccggcaccggtactgcatcagtgtatgttaatgcaggaagcggaaatgctcatgtatggtttagaacaaacgccaatgaacgcggtgtaatttgggcaactccaaatacagcggatttaggacaaattaatattcgcgcaaaaactactggaggtgtttctgctggtgattttagcttccgttctgacggtcgatttgatgttcctgtagcagttaaagtcggtggagcagcaatgctgactaaagacgggaatattacctctggttcgatgtttggtggtaaccttaacaactatttgacttccattaaaaacgacatcactgctggcgataataagcaagtaagtaaaactggcgacacaatgaccggtaacttgactattaacgctaacttaaaagtcgaaaaccctaatggaacaatggctgattttggttcagagaattcggataagtatagcagaataactcttgctcgcaaagttggtagcggtgctgccgtagcaatgcttaaagttactcctgaaggacacgtgcaatttggttatcaaactgcagtttctactccagctcctagtaaatatattctagttaaatccagcggtcttgaggtagaaggggatttagtttttaatcagacatatagcggcgctgaagaggcagttgatatttccgataagactatcgaccttaatagtctgattattagacgatcagatttaggtactcgtcagttatataaatgcgtatcttctggcggtggttctaagataacaaacaaacctacatctgatggtaactttgttcttgaagttctgtctttacgcaaggtttctgataccgattggtcatgtaagcagacctttactacaaagaacggcggtgttgaaggcacatatatccgctacggacaaaatggttcatggtctgcatggaaagaagttgtttctggtgttcagccaattaatttaggtggtactggagcaacttctgcagcttctgctcgtaacaacctcggtgttggtgaaggacaaactgtaaaattcggtaatttagttacaaccgatttaaccgcaaacggaaacgctagattagtcggaagactgaaccttggttctacttccgcaaccggtgtattacgggctaatgaatctggcgcagttgttttaggttcttctagtggtcaaaacatccacatcagagcaggaagtgcagatacttctaatggtgaaacccgctttgagccaaatggaaacgttttagttggtggagctctaacgtcttcaggaagcttgcaagtaaatggcgaagccgcgatgagcagaagcttgatcgtttctcaaaacataaagaatactaacgataatagttttattctgatgggaaaagactccgatttaggtttcgttaaaaaatctaactcaggcgctaagctggtatttgcttcaggaaaatcatttgttgttgctaaatcatcagcaactgccatagctaatccagcttcggaaacttacactgatgtgtttaaagttgacgcagatggaaaccaaacagtttatggaaactcagcagtttctagagctttgactgtatcaagtacagcaactattaatggggttattaatgccaacggcggtattattgttcctactaccaagtatgtgcaaattgccgatgctcctacacagaataaccaagctgccaacaagaaatatgttgatgataaggttgcttctgctattagtaacgctggcgatacttatcttccattagccggtggtactgtaactggtaaccttgacgtaactggcaccagattaaaaacatggcagttagaagttgatggcaaaagtactctaagaggcgggttagatgttagtagcagtcttaaagtttctagcggaaacttagtcgccgctgacacaaccaatgctggtggtctttttgctaaaaacggtaatgtttactgtgatgcaggttcagctggtacaaactctaactactggttccgtgattctgctggaaatgtcagaggtgttatttggtcaaatggtcaaaacggtgacatgattatccgtaaccaaagtggccgagagcttgtattcagaaatgatggatatctgcaattagcccacttagcaccaggaaacacagataatgcaaacaccgtaaatggaatacgtttacagcgcggtgatacgattttcgatagctttaacgcatggcagtcgggtgaatatgttcgcgctggatggcatttctataacgccgctggagttgaccagtggttagcacttacagatactggtgtaaaaatctggggtagtgctgctaatctacgcgttgaaggtgttggtaatttctgggacgttgaaattcgttctgaccgtcgtgtgaaatcaaatattgctaagattgataacgctcttgataaagtgtcgaagctatctggtaatgtttatgatttacagcttccaaatggtgatactaaaccatcggctggccttatcgcacaagaagtgcaggaagttcttcctgaagcagttacaactgataacgataaagatgcattacttcgtttaaactataatgcagtaattgcgttattagtcgaatctgttaaagagcttaaagcagaaattgaagaacttaaatctaaataatgttatggggcttcggccccatctttgaggagatatcatggcagtaacaggtcctaatgtaggaagctcagctaaggctgtaacaggagaatcttcaatgattgcagctggagcaaaattaaggctgggaacacccttttggatgtccaacatgataggaagaaacgtttggaatgctagtataactatttcaggtaacaaccctgcgacaggacctaaggttcgtggcgcttggaatgataagaacagtgcttcgtggaacgtattacttgattctcgtgggtccttatcaggtatatgggaaacaggctttaatttggttgtttttgggctagcagagcctagtaaatgggacggttataatgatgccatcgttttagaaggcagtgggaattttaatgtaaattggcgcgttgatattgaagatggaagtcagttccattttaacagctctagagattatagaggaagacgatgctataattgtacagacccaaatgctttttggaattggctttacgccaatgatggacgaactttccaactgtcgtttacagcatattaagcatatgctagagcaataaatagctctgtaaggagagcaatatggcaagcaaacaatcaataccgttttttgatatgtttcttgggttgctcgagctattattcaaagatggagccacgggaagagttctcttttcccgtgttttcgttgtcgtacttttagcactattggcgtttgctggatataagtctgatagtcttattacagcttacgtcgacagtacttatgacaagtatgataaactggttcaaaaggatagagattcccgatttgataatacagcactcgaacaactccagatagtacatatctcaagcggtgcagacttttctgcggtctttacgttcagacctaaaaacttgaactacttcgtagacttaattgcttatgaggggactttacctagcacggtagattctaaaaacttgggaggatatccaatcgacaaaacaactgctgaatatagcacgcatttatcgggtagatatttttggacggataaggaatttgttttcttaccaacaaaaagaaaaccgcctgaaatatcgtatatgtttagctgtccgtatttcaatttagacaatgtttatgctggaactgttgaaatgtactggtacaattccaaacctgcattatctaacgaaagactaacatcgatatgtggtcaggcggttagagctcttggaagagctaagtgattacttattactatgcatagccattgttcgatagatagactcaaatccctcgttgtattcttcaacgagaattctcttctcttcgtcagttaactcagaaaccattttacgaaagttgctctgatttaactgacgcccctgctcattcttgattccaatttcattcaagaacgcaataaattcatctcgcttctccatgatatgttcagcattgaacttagtcagaatagaagcaacagtaacaatttcttggacaatttcaaacttagtcattatttttcctacaacataatggattatgtgattatagtatcatcttgataccgcgttgtaaaccagtttatgccaattcccaacgagaattcaaatcttccttggtagtgatatactcagcaccagaggacatccagagcccgtagcgaccatcttttactctagccgttaaataccattcctttccaattggacgaaccctacgattcatccagtgacatacgtcaattgcctcttgaaaggacaagtcaatcagacttccaagcgcgattttattcattaacgcttcaagatatctttgtgattcaacgacagattctaggttatgactcatgctaaaaccacctctccgcgattacctaaaatgctttcgatatactcaactccacttataatgtcacctctatcctttgctttaatagtaataattccatacgtgtggaaatctgctgatagactaaacggtttagaagtttcctgagtaaacgtaaacattactgcttgctctaaatgttttacttctaagtcattagcccaagagttaagaactttaagcctaacttgtaaggtgtattctactttaattgctgaaagcaattcaacgcgtttatgatatgccttggcttcatcttctctgcgtaaagtttcagtattcatagataatctccaatgtcataagcatcaacacatttctgaaattgttcaataacttcttcaggttcaacattagcgataatagctacagtaaaggtaccattattccaatcgtgtaccatccagtctccatagccagcattctggaggtcttccattagttcagaatggatatctgctactaatccagaatggtcccctaatttcttgtggagagcttctaggtcatcacaaataatagttaaagtagtacatttggaattattcagaatgcgcattgtctttacctttgtgtttttgcttacgttttgattctttggcagcgcgctttttatctttatgcgcgcctcctttgttaaagtcattcttcgctactgggttgtacatgtgcaattacctcatttaagcagttgcgtgtaatatcaaaacgcttagcaataccacattcttggatatgtgcttttaaatctccggcatgcacatatcccaattccaagataaaccgtttaatttgagccttttctgaacgatttaagctattgaagtaatctgccttggcgcttattgctctcacgctttatcttccttacattcaagttccttgatataatagtcaatatctttaatcatttcttctgtcattattttgtacatttcagcaagaaatggtttagcaccgccattaaatggatggctaaacgggcagatgtattctttatccatgagagttttcatgaatttgctatctgccattttaaacccggcttcattggtatatgtaccccaattatcgtccatcatttctaacgaacgctgaagcgatttacgctgaatttttaaaagcgtaatgttattctttaatgtactaatcattagtataaatcctctgagaataattcattggcgggtcctgatttaggacgaactgtattaacttggcctgcatgtgtagcgatgattaatgcttcttcgcgtgtgaagtactcaccccactggtcaacaaatccttgattgtctccatggacatggtcagaaactaatttgtcacggaacatatctagaacgttcgccatatcaacagaataatggcgagtgcctggaaccacaattgttccaccagttttcaattcaaaacggtttgctgcacaaacgatacggcgttgaagtaatcgtccatcccaccaatcagctactttaaagcaaatttcaggaatactaacttcttctggctcattaattagagcaccgtgacgagaagcatcaacaaatttattcatttgttcggaaaacttgctcatttaaagaatcctttaattttctgccacaaacttttcttttcacgaataccaatttgacgaataacaggttcaccctgcattttctctaaccactccattgagttaacagcttccgccattggaacaaatttagcaagggccttttggtagttatctacatccatgatatgtttaccatctgcattgtagatagcatagcattttgcgaatttcttatcaatgtatccgataaagtgcccacggaaccatacatcccaacaatcagttgggatattagcattcaagttaactttttctacacaacgctgaagttcattcagtactttaaacttgttcattacagttccttaatagagcggatgatggtttcaatgttttcagcagtacgggc

SEQ ID NO: 17 - DNA, 167537 bp, unidentified
  source 1..167537: mol_type = genomic DNA
tcatcatgagtatgcagaaaagcagaagaaactttctggtgataacgtagctcgcctgcaggcgatgtatgatgagcaggtgaaagaggcacgaggatataaagcagaattagaaactcttcaaagcgaactgcttgaactcgtgattggtgatgacccagcagagtcaattcaagaagttcaaggtaaaatctttaagattcgttctaaaattgaatcatactcaaaggttcttgggttgtatgataaaggcggtcattgcccaacgtgcttgcaggatttgcattctaatgacactctaatcactaagattaatcatcatgttgaagaatgtaataccattcttggcgagttaaagacgcgccagagtgaactggatgaactagctcgcgagtataatactattcgtacgcgtgcaagagacatcaaaaatcaaatgagtaatttgaaacagatgactttaactgcagttgataaagcacgtcgtattaaagcagcaattgataaagcatcacaggagttcattgataactctgacaagattgaactgctacaagaagaattagataaaattattctcgtcaaaactaatttggttatggaaaaatatcgtcgtggtattttaactgaaatgctgaaagactccggtattaaaggagctatcatcaagaagtacatcccgatgttcaataagcaaattaacagctacctaaaaattatggaagctgattattcgttcacgttgaacgaagagttctctgaaacgattaaatctcgcggacgagaagagtttagttatgcctcgtttagtcaaggtgaaaaagccagaattgatatagcattactattcacatggcgtgatattgctgaaaaagtttctggtgttaaaataaactgtctgttccttgatgaagtctacgattcggccaccgacgcagaaggtgttaaggcaataactgctattcttaataagatggtagatgccaatgtgtttattatttctcaccgtgaccacgacccgcaggcatatggccaacatcttcaaatgaagaaagtaggacgatttacggtgatggaatgaatgagtttacaactggccagcatctgctggcctttcctgaagtaaagcgatatgtgttaactaatttgttttctgatgaaaaacacttagtaacagaagaaatgttacgagatgcttttacaggaaatgaatataatagagtcatgtccagcaggaatcccggttggatggttgaagattattacgattaaggtaaatataatgattaattttgttgatgtgaaagatatccaggttaaaaacgtacgtgcagattccaacccgaataaccaaaatcgtattcgtaagtcttgggttctggctctaactgaagaaactaaagcagctattaaagataagattaaagattctgaagctcgctttgctttctataaatctattgacgacgaagttgcagaaaaatggattgaattgatgcgtaagcattacaacgaatcaatcaaggctggtgctaaaattgttactgaccgtcatggtggcgaacgtctagaaaatgattactgcgtagatgctgatgagcaactcgttgcggcaggtcagattgttgcagaagaattaactgctacattcgcagcttgatataattatcctgaacttaattaaaaggtattgaaatgaaattctctaaagaaactctgaacattctgaaaaacttctccaccatcaactccggtatcatgctgaaacctggcaattttatcatgactcgtgctgttaatggtacgacttatgctgaagccacaatctctgatactatcgatactgatgtagcaatttatgacctgaacagtttcctgagcattctgtctctggttggtgatgatgcagatattatcatgcaggaagatggtaacctggcaattaaagatgctcgctcaactatcttctggccagcagctgacccgagcacaatcgtgttcccgactaaaccaatcccattcccggtggcaaacgtaattatcgattttaaaggtgaagacctgcaacagctgatgcgagtatctcgtggcatgcagattgacacaattgctatcaccaatgttgatggtaaaattgttctgcgcggttataacaaagtagaagatgctgcactgacccgtccgaagtattccctgaccctcggtgattatgatggcgaaggtaactttaactttatcatcaacatgagcaatatgaagatgactgttggtgattacaagctgatgctgtgggcaaaaatgaatggctccaagaaacagactgccgcaaaatttgaaggtgcatcagcctcttatgtagtagcaatggaagcagacagtacctttgattttgagtaataatttcggggcttcggccccatctttaatctgaatgaggaaatataaatgaaattgacagtaaacgaagcagacttcatgtgggaacagaaatatcgtccaggtactatttctgaatgtgtattgcctgctgaagataaagaaattttttcggctttagtagctaaaggaaaaattcctcatttaattctccatagtacttctcctggcaccggtaagaccacagtagctaaagcattatgtaatgacattaatgctgaaatgatgttcgtgaatggttctgattgtaaaattgatttcgttcgtggaccgttaactgcattcgcaagttctgcatccattgcaggcaagcagaaaattatcgtgattgacgaatttgatcgtgcaggtcttgcagaatctcaacgacatctgcgttcattcatggaagcgtatagcacaaactgtactattatcattactgcaaacaaccttgatggtatcattaaacctcttcagtctcgttgccgtgtaattaattttggtaaaccatctccatctgatgttaagccaatgcaaatcgagatgctcaagcgttgtctcgcaatttgtgaaaatgaaggcgtggtggttgaagataagaaagttgtagctgctttggtcaaaaagaattttccagaattccgtaagaccattaacatgcttgatcattattcttctaagggtgtgattgatgcaggtatcttgtctatcgttctgaatgaccgtggttcaattgaagatgtcatcgaagctattaaaactaagaacatcaaagaactccgtgctcttgctccaaaatatgcagcagactatacttggtttgtagataaactttcttctgagctgtatacaatggttactggcccaagcattatcagaatgtatgaaatcatcggtgaaaataaccagtatcatggcatagcagcttcgattgaattacatttggtttatatgcttattcaacttgttgtagagatgcagtggaaatgatgagtttatttgaagatgatgatcagtataatgagcaccaaatagcttggttaggtaaagactggacgaaagtccaggaattatctgattcatataaagaaaaagcagaaaatcaattcttcacaattattgggtctattaacgaaaagcaagagcatttgaatatctcgacgatggattattcaaaattcatggttgaaaacgctctttctcagcacgctgactgtatgcctgcggtttatgttatgaaccttgttggtcaagggttatctgaccaagcacactataactatatgatggcctctgttcctagaggtcgtcggtatggtaaatgggctaagttaacagaaaacatccaggatgcattgattcttcaagttataatgacatattacaaggtcaatgcgattgatgctaggatgtatagagagaccctggaagctaaaaacaagcttaaacctgctctcaagaaaatgaaaggtcttgtgactgatgaattggtcaagacaatcacgaaaaacgtgaaagaacagaaaaatcttaagaaaacagcattggaatggtaaagatgattgaaattacactgaaacagcctgaagacttcctgaaagttaaagaaactctgacccgtatgggaattgctaataacaaagataaggtactatatcaaagctgccacattcttcagaaacagggtcgttactatatcgtccattttaaagagatgttaaagcttgatggtcgccctgttactattgacttagaagatgaaattcgtcgagactcaatcgcacaactgctctctgactggggtctactgagtattaatcgtggtcaaactcttgcacagatgcagaataacttccgagtaattacattcaaacagaaacatgaatggactttaaaatctaagtacacaatcggtgcgtaagaaaagggcttcggcccttttactttataaaaatcggagtataattatcccacctaaagactaataactcggtctataaacaaaggaaacccatgaaagaattttatatcagcgttgaaactctaggcaatgacattgtagaacgttatatcgattctactggtgaggaacgcatgcgtcgtgttccgtattctcctgttatgtttagtcattgcatggaagaaacaaagtacaaagacatctatggcaagtattgcaagaagaatacattcccaactatgaaagatgcacgcgattggatgcgtcgtatggaagatatgggaatggaagcaatgggtatggatgatttcaaacttgcttatatcagtgatacttacggttcagaaatcgtctataataaaaaattcatccgaattgcaaactgtgacattgaggttactgcatctcaattcccagacccgatgaaagcagaatatgaaattgatgctatcacccattacgattcggttgatgataagttctacgtatttgatttactgcattctctttatggttctgtttccgagtgggacaagaaactcgctgctcgtttagattccgaaggcggtgatgaagttccacaacatattcttgatcgtgtggtgtatatgccattcaattcagaaaaagaaatgatgcttgagtacatcaatctttgggaacagaaatgcccagcaatctttactggctggaacattgaaggatttgatattccgtacatcatgaatcgtgtgaaacagattcttggtgagcgtgcgatgaaacggttctctcctctgaataaagtttcatctaagattatcacaaacatgtatggtgataaagaaatttattctatcatgggtgtgactattcttgattacatggatttgtataagaagtttagtttcacgaaccaaccgacgtataagttggatttcattgcttattatgaaaccaagaaaggtaaattagcatatgacggtccaatcaataaattgcgtgaaactaaccaccaacggtatatttcgtataacatcatcgacgttgaatcagtacaagcgattgatgctgttcgcggatttattgacctggctatctcgatgtcttattatgcgaagatgccgtatcaaggtgtaatgagtccgattaaaacatgggacgcaatcatctttaacagtctgaaagaacaggacaaggttattccgcaaagtcgttctcatgttaaacagtcatatcctggtgcgtatgttaaggaaccagttcctgctgcatatcgttatatcatgtcgtttgacttgacatctctgtatccgtcaatcatccgacaagttaatatttcaccagaaaccatcgttggacagtttaaacttcatccattgggtgagtacattaacaagactgcaccacgtccgtctgacgaatattcatgttcacccaatggttggatgtatcgtaaagatgtagatggtgtcattccagttgaaatcgcgaaggtattttatcagcgtaaagagtggaaaaataaaatgatgggtgccaaacgaaatcaagaactgattaaaaaggttctgaatgataagaagtttggaactatcgataaattcgcagaagttaatgtctatgaagatttctctgatgatatgaaagcagaactgctgacatataccgaagagtgccttgacaaactgatgtttgaatgtaaacatgctgaaatcttgggtaatactaatcagttaaaccgtaagattctgatcaactcactttatggtgcattgggtaacatttacttccgttattatgatttgcgtaacgcatcagcaatcacgttgtttggtcaaatggcaattcaatggattgaacgtaaagttaatgaatatctcaacaaggtatgtggtactgaaggacattcgtttgtagtagctggtgatactgactcaatttacgtttgtgttgataaggttatcgagaaggtaggtcttgagcgtttcaaagaaactaacgatttggtcgaattcctgaaccaattcggcaagaagaaaatggaaccttggattgaccaatcatatcgtgagatgtgtgaatacatgaacaataaagaacatttaatgttcatggaccgtgaagctatttcttgtcctccgttggggtcaaacggcattggcggattctggaaagcgaagaaacgatatgctctgaatgtgtatgatatggaaggtactcgatatgcagaaccgcatctgaaaatcatgggtatggaaactcagcaaagttctacaccaactgctgttcagaatgcgttggaagaatctattcggcgtatgctgcaggaaggtgaagaatctttacagcaatattataagcagtttgagtctgagtatcgtgaacttgactataaagtaatagcagaagttaagaccgccaacaacatcggtaagtatgatgatggtgcaggatatccagataaaggtacgccatatcacgtcaaaggtgctttagcgtataaccgagctaccgcgggctttgaaggtataacaccaatcatggaaggcgagaaggtgatggtcatcccgctgcgtgaaggtaacccgtacggtgagaaatgcatggcatggccatcgggcactgagctgccacaagaaatccgacaggaagttctagtgtggcttgaccacagtgttctgttccaaaaatcgtttgttaaacctctgacgggtatgtctgaagcggcagggttagactatgaagagaaatcgtctcttcttgacatgttcgatttttaaaaaagttgtttactttgccacaaggatgtggtaccattgttctcgaaataacatactgaggagattacaatgaaatcgttacttgctgttatcgttgctctcacgctgactggttgtcaaatgccacaaggtgatatcgtcccggcttcttctgttggacaggtgcgagcaattggcggtactgtaggatactatcgtgctagcaaccaggtctctgctgaatcgctcgcggttgagcgtcggttggcgaaagaaaaagctaatcctaatcgtcagctatctgcgatggaactcgacatgattgagcagaataagcatgagctggaagaaattaagcgtctgcgtaaaactcaaaaagaacgtacatgcactgctcaagcggcagcagtgaatgaccagattcgtttaactgattttgctaacggcggattgagttataatgagcataaacaacgtatggagcagttaaaatctctccaaaatcacatctacaacaaatgcatgtctaactgaggagattaacatggaagcagtatttggtttaatcattcttttcttcatctattttttgccgacctttgtagcttgcagtcgtaagcataaatcacggggtggaatctttatcacaaatctagtattcggttggtccattatcggttggttaattgcgctgatttggtctgcttctaacgcacagcagaatacaattattatccagcaagttaaataagaggtctcatgattgtaactccaatgacagtacaagatatccgtcaagaattcgctgatgctttgctcaacaaagaatttgtgattgataagacgggtgtgaagactattgaaatcgtaggtgcatcatttattgcagatgagcccctgatttttggtgcagttaatgatgggtacattgcccgtgaacttgagtggtataaatctcaaagtttattcgttaaagatattccaggtgaaaccccagctatttggaaagcaattgcatccaaacatggtgagattaattctaactatggctgggcagtttggtcatcacaaaactattcgcagtttgctaactgcgcaaaggaacttatcagtaatcctgattctcgccgcggaattatgatttatacacgacctcaaatgcagtatgattttgagcgcgatggcatgagtgatttcatgtgtactaacaatgttcagtatctgattcgtgataataaagttcatgctgttgtaaacatgcgctctaatgatgtcgtctttggatatcgtaatgactatgcgtggcagctctatgttctggaacagttaaccaaacttctgaatgcatcaggtaaaaattattcagttggtgacattatttggaacgtcgggtctttgcacgtgtatgagcgtcatttctatcttgtagataactatgcttatactggtgaaactcatattgcaaagaaagactataaaggtgagtggaaatgattcagtttgtaattccaagttataagcgtgccggggcagttactgccctgactatgtttcctgaaggttatgttccgcatcttgtagtacgtgaatcagaaaaagaagcatacgaaacttggcacggtcatgctgctaaaatcgttactgtccccgatgatgttgatggaattgcaggaactcgccgtctgattactgaaatgtatgcaggacaacgaatttggatgcttgatgatgatacgaccattcatctgactgaaattcgtgaacgcgacgatcgccgtgttccacttggtgccggcgaggcaatgagtcaagaggtatttgatgatatggtcaaatacgtagagactgctatggattgtggttattatcacggtcatgctcgcttgccgattttcaaaatcacatcaagctggggtcattatcgcgagaatagttttgggttcaccaatactttctatgatttgactaaacttaccgcagaagatattggttacggagttattgaccttaacgaagatgcttatgcttttctaaaattaattaacatgggtcatcctcatctggctctgtttaagtatctcgttaaatccggcaaagtgcagtctcctggtggttgttctacacagcgtgatactgctcgtcagaatagagcccttgaacagctacatgctgctttcccaaatcaagcccgttggaaatctaaagacggcgaaagacgtgggttattcggtgataatgaacctctgaaatcaattcgtatgtgtattaacactcgagtgaaatctcaggccttccatgaatttggtaaggtagaaccatatctgtgagggcgaaagccctccaaggacctcttatgaacatctatgataaatctgacgtagctggtaatatattcaaggctgaagaattcagatgcttcgtatgtaaatctgatgagtttgttcatgaaggaactactggctcagatggaatgcattgctggtggcatggcatgtgcgttggatgtaaaatacactatgaaatagatatggaaacagtggtttataacaccaagaagaaatggaacttctgataatagcttcaagaacaaagtaatataattactctatcctttaacctgtgagaaaaatataatggagacttatggaatataatgaatgtctgacttaaaatctcgcctgattaaagcatccacttctaaaatgacagcagaactgactaaatcaaaattctttaacgagaaagatgtagttagaactaaaattccgatgcttaatatcgcaatcagtggagcgttggatggtggtatgcagtccgggttgactatcttcgcaggtccatctaaacacttcaaatctaacatgtctctgacaatggttagtgcttatcttaataagtatcctgatgcagtctgtttgttctatgattcagaatttggtatcactccagcttatctgaaatctatgggtgttgaccctgaccgcgtaattcatacaccggttcagtcggttgaacaattaaaaatcgatatggttaaccagcttgaagctattgagcgtggtgaaaaagtcatcgtgtttatcgactctattggtaacatggcgtctaaaaaggaaaccgaagatgctctgaacgagaaatctgttgcagatatgactcgtgcgaaaagtctgaagtctctcttccgtatcgtaactccttacttctctattaagaacattccttgtgtcgcggttaaccacacaatcgagactatcgagatgttcagtaagacggtaatgactggtggtacaggtcctatgtattctgcggatactgtgttcatcatcggtaaacgtcaaattaaagatggtactgagcttgaaggatatcagtttgtcctgaacgctgagaaatcgcgtactgtcaaagagaaaagtaagttcttcatcgatgttaaattcgatggcggtatcgatccatacagtggtctgcttgatatggctctggatatcggatttgtggttaaaccgaaaaacggatggtatgcacgagaattcctggatgttgaaaccggtgagatgattcgtgaagaaaaatcctggcgggcaaaagatacgagcagtacggaattttggggtcctctgtttaagcatgagccattccgtgacgctatcaaagcccgttatcagttgggtgctattgattcaaacgctgcggttgatgaagcggtagcagaaatgattaactcaaaagtttcaactaaggttgatggtgttaaacttcctgagagtggttcagtatcagctgctgaagttgaagatgaattagagaacttcatgaatgaagactgagtttgatttagaatctgaactcgagaaatttgaacaagaatctccctcggaagagggagacttcgagcgtcaagaacgagtgttcaagaaaagccatgaaataatccaagaagctatgaagactgttatccaagaaattgtgataaaattaaatggtcaatcacacttggtttatgttcataaattaaatatttctccttcgggggaagtaactattgagttcagtacaccatctgaagctcataaggatgaactttatcctcatgtggaagcttgtgttaaacaacaaatccagagtgcattaaagaccaagaaaaaatcattatggaaaatcttttaagaggttaaagtggtagaaacaatcttagctaatctgatttacaaccaggctttctttacgaaggtttggccatatatggacaaagagtacttcgagcaaggacctgctcagacggtgtttaacataattaagaaacacgttaatgaatacacagcaattccttcaaagactgcgttatgtgtagcactggataattcgtctataactgaaacggaacatgaaggcgcaaagaaacttattgataagttatctgatgctcctgaagatttgaattggttagttaaggaaactgaaaagtacgttcaagaaaaggctatgtataacgctacgtctcgaattattgaaattcaggctaatgcccagcttgagccaaataagcgagataagcgtcttcctgatatgggagctattcctgatatcatgcgcgaagcgttatcagtatcgtttgatagctatattggtcatgattggatggaagattatgaagctcgttggttatcataccagaataaagctcgtaaagttccgtttaaacttagcattctgaacaaaattactaaaggtggtgccgagactggtacgctgaacgtattgatggctggcgtcaacgttggtaaatcgttaggattgtgttcattggctgcagactatcttcagatggggcataatgtcctttatatttccatggaaatggccgaagaagtttgtgctaaacgcattgacgctaatttgcttgatgtatcacttgacgatattgatgatggctgtgtatcatacgccgaatataaaggcaaaatggaaaaatggcgtagttctagtactcttggtcgtttaatcattaaacagtatccgactggcggtgctaacgctaatacattccgagctcttctgaatgagttgaaactcaagaagaactttaaaccgactgttatcatcattgactatcttggtatttgtgcttcttgccgtattcgtcaatatactgaaaacagttacacgttagttaaagctattgcagaagaacttcgtgcattggctgtagaatctgaaactgttctttggaccgcagctcaggtaggtcgttcagcgtgggatgcttctgatatggacatgagtgatattgcagaatctgctggtctacctgctacagcagactttatgttggctgtgattgaaacccctgaacttgctcagatgaagcaacaattaattaagcagattaaatcacgttacggtgataagaacatcaacaataagttctctatgggtgtacataaggctaatcagcgttgggtagaaattgagcagcaaaacgacccaactaagcctaatccaagcaataccgtccgagaaggtgccggtgcacagaaccgtgtagccgaatctaatcgtcaagaacgagtatcacgttctaagcttgatgctctggcagaagagttaaaattctaaggaattctatgatttttgtgtttagcgcggtccgtgaccagtcaggtcactcttttgttgtaacagccacagataccattcatcgaggcattgaggcatataacaaagcagacctatctgtatgcgactatggagaggtcaaggtgtataacagcgatggcatctgggttaactctgctacatacctacctaccaagaatctgacctctgacattttgttgaaaaaattgttcaaaaggtagtttactttctccaaaggccatgatactatggccttactgaaacaaaacgagtagaggaaaacatcatgtggacaattgaaaaagcattagacgtagtctttaagagtaaagatgaatcagcggaaactgtaccgcattgcggtatggtagttggaagcaaagtagttaaatctccacatgctaatctgcgttgtgatggcgtagtacgaaaagcattagatgaaggcgatacagttttagtagttgttgagccattcaaaaacactgatggcaatgtgtcaatgttagtatacgcaaacggtgattatcgcctgatttctgctcttaacgtacaagctgcttgaggaaaccaaaatgaaaaagattgtacttgctttagtgttcgcagtatcaagttgctctgcagttcctgccatggccaactatgacaaagacttatgcgagtggtcaatgactgctgatgagtctgaagtagctcagcagattcgtgcagatgttggtcatattgtggaaaacgtagacccgagcaaacaaacagaagtgcaagcagaacttaaagacgacggcgcagcacttaagttgaattatgttctttactgtgatgcccagtttgataacttcaacattgttaagtggattttaggatgattacatacgttttaataatggcgctatctactggttcaggtggaatgtctactgaaaagatggcattcactggtaaagatgaagccgtgattaagcaaaagtgtgaagatacaggcaagcagtttatgcttatcaaagacaatccaaaatcaatgtctccgacgctgtatcctacatataaatgcttacgtattacgcatgaataaatagtaggaggctctatgaaaacatacaaagagtttgttactgagatggtcgcaggtgatgcgggcggcaatccacagaatattgcatcaggtacaacttccggggacatcgtcaataaaggacccgaaactcttccaaagaaacgaaaagcggataaagacgctgccaagaaaaagtgataaaatggccttattagtttaaggccagaggaaatattatgtcttgggttgataacgagtatgcaattcgcgcaatatctcacctacctaaatttagacacgttactacatcttcaacattcaagttaaactgccgttgcccaatttgtggtgactcacagaaagatatcaataaagcacgattctggatttttgatgcaggtcaaggattacgctgtcattgcttcaactgcgagtataacaagtggctatcgcagtatcttaaagataatgaacccgacctctatcgagagtatcttcttgagaaaagaaaggagcaggtctttgataagccaaaggctgtagaaccgtctgagaaaattaatgcaaaactccccgtaatagaaaaacttaatttctgcgagcgattagatagacttcctaaggaacatccgatagttaaatacgtgactgccagatgtattccaagcacttcttggaaaaggttatggtttactaaccaatggccttctcttgttaactccgttaatccaggaacctataagaatgagacgaacgaaccacgtttggttattcctatcttcaacaagaaaggagagattgagtcgtttcaaggacgagcactacgaaagaatgctccacaaaaatacatcacaatcaaagcccacgaacacgcgaccaaaatttatggtctcgacactattgatgagtcaaaactcgtattcgtcatggaaggaccaatagattcgctgttcattgataatgctattgcaattaccggtgggtctttagatttagctcaagttccatgtcatgataaccgagcatggattatggaccatgaacctcgtcatcctgatacgattaagcgtatgaagcgtttagtagacgcgggtgaaaaggtagttttctgggataagtcgccttggaaaagcaaagatataaatgatatgattatgaaagagggggcaactgcttctgaaataacggattatattaatcaaaatatatcgcaaggtttaatggctaaattgcgccttgacaaatacgcgaagatataggggccaaagccccttaaattaaagcaatcctccggtcataataaacgacacaactttttctaacggcattggaggaagaactagaccgtgtgtgctagctaatggaactaccacataattccatgcagctaaagcagcagtggcgattccgacgtaaagatatcttccaaatcctcctttgtctttacattcttgtttcacttcagacatgaatcctcctgctatttatgttaagtgatataatatttatctaattgaaaggatatctgtgaattaccaaaaaatttactcagctttagttacaaaggctaaatgccggcatcttgatggatataaagaacgccatcatataattcctagatgtatgggaggagcagatgacaaaaacaatcttgttgagttaactgcgcgcgagcattttatagctcatagattattaactaaaatatatccaaatgtgaaaggattgcattatgctgtaaatttaatgcgatataataaaggtgttaaattaacaagtagattaatagaaacccttaaaatccaaaactctgttcttttctcgggtgaaaataatccaaggtttggaaagccatcatggataaaagggttaaaaacaccagaagaaactaaggctaaaatgcgagcttctcacaaaggcaaagttatttcggaagaagctaaagctaacatgagcaatgctcgtattggaaggtttagtggtaaaaattctcctagatacggtttaccgaatccaagacgtggtgagatatggaactcgtatgattcgctttacgagttgtgggtttataataatagacctaagcgcacaaaatttaataaaatagctgtcaaggcaggttatcctaatatctgctatagacgtatgatagaaaacttcataagaaaggaaaaataacatgccacatttcaacgaatgtagtcaactgatcgctggtgcagataaagctgaagcccgatacgcaggtatcgtacgcaaagttggtggtgaccctctgcaagtaatgcttgatatgcaaaaatctcttcaggttcgtcttgcaaatgacaagcctggtactaacatgcatcctgatgaattggctcaagctggtgatatcgtacagtggctgcgtaatcaaaaagattacattgatgacgaattccgcgaattgctgacgtctcttggcggtatgagtaacggtgaaaaggcagctagtgctgtgtggaaaccatggaaagctgaccacgtcaagatgcaggaaacttatatcaaagacctgtctgataaagaccagcttgaaatcaaatttgaaatgattgatatcctgcactttgttctgaatatgtttatggcgcttggtctggattctgaagaaatctttaagctgtattatctgaaaaacgccgagaactttgctcgtcaagacagtggttactgatggctaaaagaatatctaagcgtcgtttaaaaattatcagaaaacaaaaagaacgggccttagtattggcccttcgagaagaaatcactcgagaaattgataaagaaatattaaagacgcttacagcagctatataaatactcctgtaaactaaataggagattaaaatggcttacgtaaatatcaaaacttttgaccataccactgctgatggcgaggttaaaggtactgaagtatctgtagcttttaaggtatattctgactcacatcgcattgctaatgcacagtatcagattttcccatccgaaaaagccgcttattcaacagtagttgatgatgctgcaacttgggcaaccaccaacgcgaaaatgtttgaagctgttccggctgacagcgaagtataaaattaaggactccttcgggagtccttttatgctatattgggaatagtatattattcctactaactgaggagaacaaaatgatatgttatactaagccctggtatcaatcaccattaaagaagtctcattttgattgttggtacagaggtgtaagagctgcagcgttattactaaaagctgcgcctgctttaattaaagcaaatgataagtggtttgaagacaacaacatgactgaaggagctatgtgtggccgacgcaaaaatctataaagtaagtttacagcgcaaactaaaagaaggttttgattctgataaagtattcactgtagcaatttacaattattcttatgacgagtttaaagaactggtcaataaatttgaagcacgcgggtggtgtcctaatagtaaatatggacttgtcaaaacagcccatacttttgatgtttcacacatgccaggaagtccaattaatattttaggtgctttacaccttaaaggatataccaatgcatatcatgagaccgatctgtttgaatatgcaaatgataaaatcgttaacggcaaaagtatcgtcattgacaatgaagacgcttttatagtatttactcagttagtatggtcatttatgcaagctgatttcgccagatttactccgagcgatttgcttcaaaaagctgctgatgcatataataatagtaacagtcaatatcgtcggatggagtggttcatgtgatggatttgtttgaaatgatggaagagcctcaggaagaggttcaggttcatccagtgatttctaaggacatcaaagacgaataccgtataattatacagaagtatggtattaaagccccagaagctcttctagatgaactagcttcaatctggtctgacccgccgccctggtctccgtgggcaaaataatttcacaaagtagtttactcttctaaaaagccatgatatgatacctctcgtaaccaaaaatggagaatatcatggctatttcattaaacccatctatttcagtaaaattatcaaaggttattcctatcgaagaacccattcgctccattgatgttcttaacttcgcgcgagaaagcaaaggattacctttatatgatttaagcgtatgggaagcattagccaatcgttttgactgcaaagaacagtcaattctgtggcagtgcatgaacaataagattggcgaagaatttcataagaaacttgactctatcgttagacgtcatcaaattgataacagtgacattctctatagaggtctatcatgccgcgaggctaaagccttttatgacgctcttattaaaggagagaaatttgacttcggaaaggtagcatcattcacaacagatgaaacgattgcccgagaatttgcaggcaaatggcattactcgacctttgtagtcattgaagtcaataattgtcagcaatcatttgattatcataccaacatgaaatcgcttttaattactgcaccagattctgaattcatgcgaccaaatgatgtgattgataacattgctcagcgcagaagcgctgacatcgagatgattgataaagaacaagaaaggatgctaccgatgggaactaagttcaaagtggtgggtcataacaaagttgaaaaatctggtttacttatggactactttagtgttactatagcttagtcaactagtgattatctagaactagggacctagacccattataccgtccgtaagacgaaagcatttttgaggaaaacatgatgaaatttactgctgaaaccgctaaagtttatactcgtttaattacaactttaggttctgctcaacgtcggcacaaggagttcaatctcaccccagaatatctgtttaacatcatgcagcagacacattgcgcatactcaggcgaaaagtttggaactgttaaaggaaatcatcctgatagcatgacgcttgaacgctggaataatgacttgggatatgtagtagggaataacattcctgtcaagcaaaagtataatactttgcgtggaaataatacgattgaaggccttgaacgaaaagcgaatgaaatcgcagcacgcatagttcgttcttcagattctgttaagccaacaagtgataaagaagcttctcgtttggaaaagattcgtgagtatgaaaaaactataacatcaattaaaactaacttacgtaatcgcgaaaatcatctttctcaatttatgcaaaaagaaaagaatggaactgcaacctcggcagatttagaacttattaatgcattgagaactcgtatcagtggtggtaagtctgaattagctaaagttgagcgtaagttatctgctgttttagcatcagttccgaatcgtccgtcagatgctgaaatccgtgtacaatcaatacggttaattgttaactcacttcgtcggttagaaaaatgctcaatgctagataagttaaaattgaaaaaaggtcttccattgactgcgtccttcttccaacttttgagaggtaaaatgtaatgcaacactatggatatgtagtagcgtataaggataaagacggatttgaccatccagtcacaactgatatgtacgatggagaacgatgtgtggtcttcactaatgaagaatcggctaataaagcacggattcgtacaatgtcggttttaacagacaaactagcaaaaggtaattttactgggaaaagcaaaaccaaaggaatgctttggtggaaaacaactgagctagtgtatgagccacttagcgatgttgagcgcgaaaaactcaaagcaaaaattaaaaatctacatgtagtgagggtaaaagtggcatgattacgtttgaccaattaaaagaaagtcaaaaagcgatttttaataaagtcattgaaatggtcaaacaaggagctaaaggtcaacacattacgattaatggacctgctggtacaggtaaaacaactttaaccaaatttatcattgacgctttgatttctcagggtatctctggcattgcgttggcagcacctacgcatggggccaaaaaggttttatctaagctcagcggaatgcaggccagtactattcatagtcttctgaaaatcaacccgacgacatatgaagaaaacgttctgtttgaacaaaagaaagttccggatatggcatctattcgagttctcatctgcgatgaagcttcaatgtatgaccgtaagttgtttaagattttgatggcaactattcctgcctggtgtattgtcattgccattggtgataaggctcagatacgtccggtagaacctggaagtaatgaacctgcactgagtccattcttcactcataaagatttcttacaacttcatttgaccgaggtgatgcggagtaatgccccaatcattgaagtcgctactgaaatcagaaacggtgggtggattcgtgactgtgtagttgatggtcatggcgtccgtggttttacaaaaggaactgcccttaaagattttatgctaaattattttaatttagttaaaacaccagaagatttatttgaaaaccgaatgcttgcgttcactaataaatctgtggataaactgaatgaaataatcaggcgaagaatctatgaaactgaacgaccattcgtagtaggtgagattgttgttatgcaagaacctcttaccaaggaacttaaatttgaagggaagaaattcagcgaaattcttttcaataatggtcagtttgttcgcatattagatgcaactgaaaccacgtcatttttaggtgccagaggtgttccaggtgaatatctggttcgtcattgggtattagatattgaaacctatggcgacgatgaagagtacgctagagagaaaatctgtgtcatctcatccgaagaagaaatgaataagtttcaatttttcttggcaaaaactgcagatacatataagaactggaataaaggcggtaaagcaccctggtctgagttctgggatgctaagcgtaagttccataaagtgaaagcattaccggcttcgactttccataaggcccagggcatctcaattgacagaagcttcatttatactccatgcattcacatggcagatgcttctctcgcacagcagttattatatgttggtactactcgtggtcgatatgatgtgttttatgtgtgaggtaatatgtttgaattgaaattagaagaccttcaaacaatgattgttggcttacaagaatctaagtttgaagcaccagacaatgttaagcgtgctattaacattaaaattgatacagttctgaatgagcttcgtgatatagcagataatgctaatgctattacttggttcacaggatatgacccaaaggtgtatctgagcgaatatattggttgccagttacgcgaaattaaatttatgctagaggctcaaaatggctaaagactttattattgattttgaaacattcggaaatgtgtcaagctcttctgtgattgaccttgctctaatcacctttgattctgaccccgaagttttggaaagcttcgatgaattggttaaacgtggtcatcgtattaagtttgaccttaaatcccagaaaggtcatcggttgtttggtaagtctactcttgagtggtggaagaaacaatcagctgaagctcgggctaacctggcctcaacgccagacgatttatcagtaattgctggaattaaagaagctcagcaatatctgattgataatggaattcacccatgggattcctttggctggtgtcgtggacagagctttgactttccgatttttgttgattgtcttcgcgatgttcaacgagcccaaggaatttccgaagaagaaattgatacatttaaagaagagccgtgtaagttctggaatcagcgtgatattcgtaccgcgattgaatcactgcttctgactcgtggtctgacaactacccctcttccaaagggtacgctcgacgggtttatcgcgcatgatagtatccatgactgcgctaaggatattctaatgcttaaatatgctcaacgttatgctctaggcctaagcgaagcaccaagtccagaagataccgatccactgagtttacctaaggggcgtggctaatggaagagtttgagttcgatgaaaacttcgaagagtggttcaaccgggaaatcctcccggaaatctctccaacgatggttctggtggccaaggctttgatggctaagggctgggatgcagggtatatgttcggagtagatgttgggtgtgaaatttctcaccgataactatttactttatgaaagagccgttatataatggctctacattaacaaactgagagaaacacgatgaaaggtttagttgtaggtgaaaacgttaaagtaattggtggtaagtgggttggtcacaatggtgtaatcgttaaagtagttaatcgtaatgacggtaaatctgggtataagatttaccgtgaagattttggtgattacatccactgcttgaaaaaattcgttgaatctagtgaaagctatctgcgcaagtgggtacacgtgaattcgctggacaatgttattacccaatcggtgagttctactaattcagccactaatctgtcgctgcataaaaatgttcttgtcactgatgagtgggaagaagacggtaaaactttagtaaatgtagtatttcaaggtaactatgcggttctgcctaaagccgatgtagagccgacggaatcacagcgtcaaggtttagtataaaaagttgtttactttgccacaaggatgtggtactattatcttatcaactactgaggagaataacatgaaaactgaaaacaccgtaaaaattactgccgaagcttttgaagacattctgttcaatcctgacttaattgtcgttcagaaagagaaaaccttcggtaaagaagagcattggacctggttgtatgtattcgcgaaccatggtgatatcgtcccagttcgtacctttgctcgtgtaatcacagttgatggcccagaatacatggagattgtgtaatgaattttaaagaaggcgtacagtacaaattcgtcaatgatgaagcggaagaagaattttcttcacgttatgagtttaatgaagactttgtgtatgaactccatgaaaatggcgggagttttactgttactaaagttgaccaccaaaataacagagtatccggaattacgtgggctaatggcacagaatgtgatgaagttggtggtgaagaccttgtaatttttgatagcgaattcaaatactttactgaagttggaacttccgcgaatgtaattccaaccgatttggttatgaatctttctattcataatcgtggtcaagcaatcgctgctattgcagcactgcagagtgcatatcaatgttaaatttagctcctatttttgaagcatcaaaattatcttatcctattcccaaccgtagcattgggaatgtcatgctgcaactttcttcagaaactggagaaatgtgtgattggattaatcgtccatggcggcagaaagaagaatttgaaggcgagtgcgcagatgttattaactgtgtagtggatgcactttggctgcatttcagaaatcgccataaaaatgatacccatgtatcagatgatgaaatctccatgatggttactcgtgcactgaatgagcaaatcatggtcaaaacacaaaaatggaaggatgctgttaatgccaatgtatgattacaagtgtgaagtctgtggaaaaaagatagaaattatgcgtaaaatttcccatcgtgactatactgttaactgctttaaccctaagtgtgaaggtcaaatgaagcgggtggtttctgctccggcagttcactacgatggattaaagagtggtgattattgatgggaactaaagcacgcattaccatgaaacccggagaaatccgggttattaaagtaggtaatataacttatagggttaaattaaaatgaaaaagattttaattacagcgcttgccttcatgatgattggatgcactgacgctgataacgcaactcgcgtgttagataacgcgggatttactgatatcaaaatcactggatataagttcttttcttgctcagaggatgattttcagcacacaggctttacggctattgggccaacaggaaaacctgttaacggaacagtgtgctcagggctttttcttaagaacagcacaattcgttatgaataaatgaccttcgggtcatttagttgtttacatggacaccgtgttttggtattatagtcttgttggccagaggagaatattatgattattggaatgacaactgcgcaaaggcgtgctaaacgacagttaaaaatggtagagcgggctattggaaaatacaggtttgcttggtggccaattaatgacgtgaatggtcgtactatttggatgcagaaatattatgaagtctgtgaagagtggatttcacttaatgaaaacaacgagtaccggattgaacagtactacggaaattctcgatatgcatacgctaacgttagtgatgctcaatggactatgtttgaacgacagcggccacgatatcccgagtataaagcggttaaaggaggccatgaggttcttggtaaattgatgtatatcaaagaagaattacttgctataattaatagttgatataattccttcactaaccgaggaaatgtaatgattaagaacgaaattaaaattctgagtgaccgagaacatatcattaagcgtagcggaatgtacattggtagttctgcgtttgaagcgcatgaccgttttctttttggtaaattccaatcagtaaagtatgttcctggtattatcaaactgattgatgaaatcattgataactctgttgatgaagctattcgtactaatttcaaacacgcgaataagatttcagttgatgtcaaaggcaacaaaattattgtaacagataatggtcgtggtcttccgcaggctcctgtagtaacacctgaaggagaaactattccaggaccagtagctgcatggactcgtcctcgtgcgggtggtaactttggtgatgatgctgagcgtaaaaccggtggtatgaacggtgttggttctgcgttaacgaatattttttctgtgacatttgtgggtgcaacctgtgatggaaaaaatgaaatcgttgtccgctgttcaaatggcgcagagaatgtttcttgggaagaacatccagctaaagataaagaatttattaaagacaagactggtactgtcgtgtcatttatcccagatttcacccactttgaatctgatggcttaactgatgttgaccaatcaatcattcacgatcgtctgatgacgttagcagtagtttatcctgatattgaatttaaattcatgggtaaacgggttcaaggcaagtttaaagcttacgcccacatgtatgacgaaaatgctgtagtgcaggattctgatacttgtgctattgccattggtcgttcggatgacgggttccgtcaactttcatatgttaataacattcacaccaaaaacggtggtactcacgttgacctagttcttgatgaactgagcaatgaacttattccagcattaaagcgtaagtacaaactagaagttaataaagcgcgaattaaagaatgtctgactgtcatcatgtttattcgtgatatgtctaacatgcgatttgattctcagactaaagagcgtctgacttctccttggggagaaattcgtagccatattgatattgattataagaaacttgctaacgctattatgaaatccgaagatattcatatgcctattatcgaggcaatgttagctcgtaaacttgctgcagagaaagctgcagaaactaaagccgccaagaaagcgcagaaagctaaagtagctaagcacatcaaagccaacaaatatggcaaagatgctgacaccactttattcttaaccgagggtgattctgcgattggttatctgctcacaacacgtgaccgtgaacttcatggtggatatcctctacgtggtaaattcatgaatacatggggaatgtctgccgcagatgctatgaagaacaaggaagtatttgacatttgtgcaatcaccggtttgacgattggtgagcctgctgaaaatactaactaccgaaatattgctatcatgactgatgcagacgttgatggtgttggttcaattttcccaagtcttttggcgttctttagtaattggccagaattatttgaacaaggtcgaatccgctttgtgaaaactccggttattattctcaccaaaggtaaagaacaacgttggttctattctcttggtgaatatgaagaccataaagatgatttcaaaggttggaaacttcgttatattaaaggtcttggttctcttgaagaagatgaatacgaacgtgttattcaagacccggtttatgatgtagtcactcttcctgaaaactggaaagaactgtttgaattaattatgggtaatgatgctgcaccacgtaagacatggatgagtgaataaagaataaatagtaagggtactattgcccttacttagaaggaattaacatgcaacgttattggattactttgatctcaggcgactatggatatctgttcgctgaaaagaaacctctgcccggaacttgggtaaccatctgggttgaaaacattgatggttctaaacatgaggtttatggtcgagttagtagggtgtggtaatctaagggacctccgggtccctttttctttataagaatggatttatatggctttaatcaagaagtgcttggagatgattctaggattcttgcttaaagttatagtgatataatttccctaaatcactgaggaaaatattatgaaacgcagttacatcccatcagaagaattattcaacgatgctatatatcgtgaatatcgtatcatccagcggttctttgacatccaagcagctgaggaattcaaagaacgcttcaaagaaatccataataaaatttttacaactaacaccgctactgctgaagagctccttgaagtagcagaaatcattaaacgacataattgataggaataaaatgaaaattaaatgtgatgatgaagtaatcattggttcttctgacgctgatgattcaacgtttactattaaggcctcgggtaaagcttttgacatcttgtcaaacaaactctataagtataaagttcgtgctgttgttcgtgaactttctactaactgcgatgatgctcataaactgaatggtaatgaaaatcgtccattttacatcaaagcaccaactcgtcttgacccacgatttgtaattcgtgattatggtccaggtcttaatcataatgacatgatgacgatgtacaaaacgttctttgaatccacaaagaataatagtaatgatttcatcggtgctcttggtcttggttctaaatcaccattaagctatacgagtacatttaacgtagtgtcttatcatgatggtaaagctacaggttatactgtcatgaaaaaccgaggtgaacctactattcgtccgatgtttgtcgatgatatgaaagaagacgaagaaactggtcttgaaattacagttccggttaaagtagaagatattgatacctggcactatgaaatcgcatatattttgcgtacgtttggtgctgttcctccgaaggtagattctcttcgtcgcgaaattgaatatttcccggtagataagaccgactggttcagcgttaatagctcttacgaaagttatggtctgtatgcagtttatggaaaaatcgtatatccgattagcggtgtagatgttaaggcagattggctgcttaatcgttatggcaaggtttatgttcatttccctcttggcgaattagacattactccatctcgtgaagagctttctcttgacgaagaaacaattgctaatatccagaagcgtgtgaatgctcttgaagaagaggtaattaccgcagatattaaagcgtttgaagcgtatgaatctgaccgtgaattcctgcgtgagttcaataagctgagttctaaagagcgtactattcttcaaaaccgtggtgttactattggaaatcgtgatatcaagcaggttgttgcgaagtataatcttgataaaattcgttcatactatgtagataacgaagtatcagtttatgtttcatgcgatgaacctgctcgtcgtaaagtgtcaagcagttcttggcatcgtcataaccaagtaaacatttctgatatttgcggggttgatagaactaaagcgttcgttcttattgacgataaagcgggtaagcgtattgctacggttcgtgctctgtgtaaatctgggttagttccaatctgggcacacattactgtaatcaaagacaatgaagatgaattacatgtcattgatgagctgaagaaaatcatggatactgatgaagttgtagtattccgtgtgtctgaacttgaagcccagagaaaagctcttcctgattacgacactggtccaaaagagaaacgtccgaaatctcctaatgtttctctgcattggattgataaagacgggtactgggaagaagaccgtcagactttagtatcatctgaaattgctgagcttgaaggttatgcaatcggtcgcaatcgtgatgaaatccacactttcccagataatgtttggtggtggaatatgagcatcacagatatgcggtctctggcagaagcgtgtggaattaagaaattctatgcaattcgtccgggtgctatgaaagccgctgcaaaagctgatggattgctttcatttgaccgatttattatcgaccaatacatcaagtgtattgataaggtagattatgaccagtacatgccatcaaatgctactggaaaccgtatctgtggaaatattgcgcattacgataaattgaatttcttgtcgagtaagtttactgcgtctggaatgaaaaatccgttcctgacaaaactaaacaaaatcgctaaggtttgccgtaccagtaaaatcaaagatgaaaacgatgatttagctttatgtaataaaatttataataaactgtctggtgatgctgagacaatcttctataaaaagattgaacagtttaaagatgattatcctgtcatcgcaagtgtcttggatacttggcggactgacagcaaactcgtcgatgatatcgtaaaaatcatggagctccttgatggagcttctactcaaaattctgaaaataaaggtgaataaatggctgttacctgtctgtctgaaatccaaaaagatgcaatcgttaaaaacttcaaaaacggtctgtacactaagaaagagctcgccgagaattatggtgtttcccgtgacactattcggcgtgtgtttaaagagcgtgaagctcgagctgccgcggcagctgttcctgctaaagtagaagctcctgttgagcgtgaatttaaatgggcagcaagttccaaattcatttcaattactgaaggccgtactacttataatgctgatagccaacatcctggatttaaatctgcactgcagaaacttgtagatggcgatatcgctggtgctattgaccacattaacctggaacaaggcatcaagaaattcgttcagggtaacgtccgaattgaagatggtacgctgttctataaagatattgaactgaaatctggtctgactgagcgtatagttcgagccatggaagatggcgaagactttaaacgttatctgcctttcctggaaaacctgatgctgaacccgtctcgtcgtgcagtttatcgtctgtttgatttcctgaatgcaaacgatatcgacatcactgatgatggtcacttcattggttggaaagtagttcgttccacttatatggactgtgcttcaaacacgtttgataactctccgggtaaaactgttacaatgccgcgtaaccaggtagatgaagacgatcagcgtacttgttccgcaggtctgcatgtctgctctaaatcttacatcggtcacttcggtagtggttctgaccgtattgtttcagttaaagttcatccgcgtgatgtagtatctatcccggttgattacaacgatgctaaaatgcgtacatgtggttatgtagtattagaagatgtaactgatcgttggggttcagaacttcgctaattataaggagccttcgggctcctcttttattatgggtgaaacatgattaatccatttaatgtatctcattctaaagttgttaatcttcgtggtactcatcatgctgctacagtgttttgtcatcatgtagttaaacatgaaggtgatgttcactatgcttggttgcactgtgatgaactcgtagaacttggtgatgattttgttgtggaaccagacacttgtaaccacgacgatcgtgtttattttggtgaattacatatcagaggaatttatggcattgatgaacaaagccctgcagagattgaaccaactccggacatttaccctagatttgaataagttaaggggtgaagcaaaagtaaaaatcattgatactgccagatatagcttagatatcgatccatctcaagatagaattgacgttcttaaacgatgcagaattgctataccggcagagtatgtggtagcagattttctcgatggatacgtgaacgatcaagttgttgaccataataacaacgatccatacgaatgggcatgggacgtactagcccacccgtactatcaaggagttagggttgaagttaaaacacactttgttcatgaccgagcaaatcataagccatggattaatgttacgactggtaaagacggtctattccctaatggaagtggaataaatctagggcccatgtttaaacataaagtcgcagactgtataattatattcgttgcagaagaagtgtcccagaatgtcatacagtacacaccgatgttcagtggcggtatcgaacagctcatggaagtcgtaaaaccttcgcgagttggtgctggcgggtacatcatgcataaattttaaaaagttgtttacttccgggattggccatgatactatggccttacaaactgaacgggagtaaaacatgagttacttagagctaaaatcacttcgagccaaacgcggaaatgcttctattaaagctgagcttttgaaagagtataagattcttgaatctatgaattggcattatactatcattgcttgtgataacggtgattcaacgtatggcgggttgtatcctaatggagctgccgctgctcgtgatgagcacatagagaaagtcaaagctctggaagaaaaaattcgtaatttgtgcatttaatagtttactttcttgttctccagtgatactatagtcttgttagctaaactggagaacaaaatgaaaaagttacttacgattctgaagaacatctttgtagtattctgccttatcgttactttcattggtgttttcgcatgggatttagttaacgtttggattaatgctttcatctgaggaaaatataatgattcgtaatagttttgatcgtcgctttaacttaatgagaactgttgttctgtctgttattgttgcggtagcgttgggaattgttgctatattcgggttcggaatttattttgctattcaagcggttgatattattcagaccgatggccttaaatctttagtagaaaccgtatgggaaggtcaaaaatgaaacgacacatcgtgtatcgtctgcttgctttaggtcttcttgtgttttgggttggtggtgtaacggcagtagtatatttttggtagtagaaggggcttcggccccttatcggagaataaactttaatcaactgaggaaattaacatgcgtaatattatgacttttgctgatctcgataacgctggcgcagaactgatcggttctattcgtaacggtgattgggcagcaggtgctccatctcgtgaaattactgagcgcgaaggattttattttttgatgttcaatgatggcaaagcaggttatattggtgcatctgctcgtttctttgtagctaaacagcgttcaaaggcaggatttgaaagtgttctttctcatatccgttctggacgttctcagttgggtcgtactctgcgctcgaattgcatgacctacggtgtgttctggattcctgctaataaaatgaaaccactcaccactggttatggcaaaggtcagcttgcattggcgtttactcgtcagcattcaagtgacgcgcagacctactctgagctgaatcgtattctgaatgataacttcatctttactttgcagaaatactaatgagaaccttcttcgtgatgggctatgtgtttctgatggccctaatgatttgctcaggaacattcatgtggtatggcctcgtgcctaccactaaagtaattggaagcattgcgttcaccgcagcatttattatgtttgagcgcatttgtaaaattgcaggagtttacaaatgattaagaaactcctagtttctgctgtagttatttccatcattcttttggttttgtactatggaatgatttacggaatgatttatattgtgcttttcatttccgatgttatagtacaaatcggctcactaatttggtaggtacaatggatatttttgacactctattaaaacaagcaggttctatcgatgatttggctaaggcatcaaatcttcgtcatcgcgatttgaaatctatcattgataatgaagcaaaagagtatgcgatttacactgtagaaaaccgtgctattccgaacttgattgatgggtttaaacctgtacaacggtttgttattgctcgggctcttgatttagctcgcggtaataaagaaaaattccataagcttgcgtctgtcgccggtggtgtagctgatttaggatatcatcatggtgaaacctctgctcaagatgctggtgcattgatggcaaacacatggaataacaactatcctctgttagatgggcaaggcaacttcggttcgcgtctggttcaatctgctgcggcaagtcgttatattttctgccggatttctgacaacttccgtaaaatctacaaagatacagaaatcgctccagcacataaagataaagaacatgttccgccagcatattatctgccggtaattccgactgttcttctgaatggcgttcgtggtattgcaacaggatattcaacttctattcttccgcatagttttgaatctgttttggaatgcactaaagcagcacttcgtggcgaaatgatggaacctgaagtacagtttcctaaatttaacggaaaaatcgttcaaacagaagacggttctgttgagctgcacggcgtgtataaagaaacttcacggaactcaatctatataagcgaaattccatacaagtttgagcgtgcttcttatgtagagaaagtactcgatcctctggaagatgcaggatacatcacttatgatgatgactgttctaagactggttttggctttaaggtgaaattccgtaaagactatgctttaagcgaagaccctgagcagcgtcatgctaaaatcatgaaggattttaaactcattgagaaaatgagtcaatacattgtggtcatcgatgagaatggtaagctgaacgataagttcaaaacttccggtgagttaattcgtcatttcgtagaagtccgtaagacattcactgccaaacgaatcgagcataaaatcgctgaaactaagcaggcatttaatcttgctcaggcaaaagctcaatttatcaaagaggttatcgcaggtaacatcgttatccaaggcaaaactcgtaagcagttgactaaagaaattgaacagaatgaactattcaaagaacattctgaaaaacttgtttcaatgaacatctatcacatcactgatgatgaagcaaagaaactcgctcaggaagcaaaacgtcttgcccaagaggttaagtactgggaaaagacaactcctgaggctgagtatctgaaagacctggaagaactatgatagaattttatttaattataggttctgtaattgcagtattaggtctagttttattgctcctcagttaatctagggaacctggaggtcatctccaggtccttccatataaatctatatccctccaaaatccctccttagaatgccccaaattattttcacaaagttgtttacaagctggttagcagatgttattatagtctcataccaaacaaattgaacaaaacagaatggagaatcacaatgtctaaagtaacttacatcatcaaagcttccgaagatgctctgaacgaaaaaactgctgctatcttggttcaggtagctaaaaaggatttcatcacttctgctgaactgcgtgaaatccttgaagaaaccatgaacgcaggttctgttaactcaaacatcggtgttctgattaagaaaggtctcatcgagaaatctggtgacggtttaatcatcactggtgaagcacaggacatcatctctaaagcggcagttatctatgcagaagagaacaagcctgaacttcttaagaaacgcaatactcgtaaagctcgtcctctgactgaagatatgaatgagcacaaagacctgatgatgagcattcttagcgagatggaagatatcttgcctttgaaagaactgactgtttaccgcagtaactatatcgcagttctggaaaaacgtaccttcggtattcgtagtcttgaagttaacaacaaaggtactttccgcatcttcggttacaagatttctgaagagcatcagaaacacttcactgaccttggaatgtcttgccgtgtagctgcaacaggcaatacttacttagatatcgcccgtactgctgaaaacattgaaaccatcatccgctctattaaggaactgtaatgaacaagtttaaagtactgaatgaacttcagcgttgtgtagaaaaagttaacttgaatgctaatatcccaactgattgttgggatgtatggttccgtgggcactttatcggatacattgataagaaattcgcaaaatgctatgctatctacaatgcagatggtaaacatatcatggatgtagataactaccaaaaggcccttgctaaatttgttccaatggcggaagctgttaactcaatggagtggttagagaaaatgcagggtgaacctgttattcgtcaaattggtattcgtgaaaagaaaagtttgtggcagaaaattaaaggattctttaaatgagcaagttttccgaacaaatgaataaatttgttgatgcttctcgtcacggtgctctaattaatgagccagaagaagttagtattcctgaaatttgctttaaagtagctgattggtgggatggacgattacttcaacgccgtatcgtttgtgcagcaaaccgttttgaattgaaaactggtggaacaattgtggttccaggcactcgccattattctgttgatatggcgaacgttctagatatgttccgtgacaaattagtttctgaccatgtccatggagacaatcaaggatttgttgaccagtggggtgagtacttcacacgcgaagaagcattaatcatcgctacacatgcaggccaagttaatacagttcgtcctaaatcaggacccgccaatgaattattctcagaggatttatactaatgattagtacattaaagaataacattacgcttttaaaaattcagcgtaaatcgcttcagcgttcgttagaaatgatggacgataattggggtacatataccaatgaagccgggtttaaaatggcagatagcaaattcatgaaaactctcatggataaagaatacatctgcccgtttagccatccatttaatggcggtgctaaaccatttcttgctgaaatgtacaaaataatgacagaagaaatgattaaagatattgactattatatcaaggaacttgaatgtaaggaagataaagcgtgagagcaataagcgccaaggcagattacttcaatagcttaaatcgttcagaaaaggctcaaattaaacggtttatcttggaattgggatatgtgcatgccggagatttaaaagcacatatccaagaatgtggtattgctaagcgttttgatattacacgcaactgcttaaatgaggtaattgcacatgtacaacccagtagcgaagaatgactttaacaaaggaggcgcgcataaagataaaaagcgcgctgccaaagaatcaaaacgtaagcaaaaacacaaaggtaaagacaatgcgcattctgaataattccaaatgtactactttaactattatttgtgatgacctagaagctctccacaagaaattaggggaccattctggattagtagcagatatccattctgaactaatggaagacctccagaatgctggctatggagactggatggtacacgattggaataatggtacctttactgtagctattatcgctaatgttgaacctgaagaagttattgaacaatttcagaaatgtgttgatgcttatgacattggagattatctatgaatactgaaactttacgcagagaagatgaagccaaggcatatcataaacgcgttgaattgctttcagcaattaaagtagaatacaccttacaagttaggcttaaagttcttaactcttgggctaatgacttagaagtaaaacatttagagcaagcagtaatgtttacgtttactcaggaaacttctaaaccgtttagtctatcagcagatttccacacgtatggaattattactattaaagcaaaggatagaggtgacattataagtggagttgagtatatcgaaagcattttaggtaatcgcggagaggtggttttagcatgagtcataacctagaatctgtcgttgaatcacaaagatatcttgaagcgttaatgaataaaatcgcgcttggaagtctgattgacttgtcctttcaagaggcaattgacgtatgtcactggatgaatcgtagggttcgtccaattggaaaggaatggtatttaacggctagagtaaaagatggtcgctacgggctctggatgtcctctggtgctgagtatatcactaccaaggaagatttgaattctcgttgggaattggcataaactggtttacaacgcggtatcaagatgatactataatcacataatccattatgttgtaggaaaaataatgactaagtttgaaattgtccaagaaattgttactgttgcttctattctgactaagttcaatgctgaacatatcatggagaagcgagatgaatttattgcgttcttgaatgaaattggaatcaagaatgagcaggggcgtcagttaaatcagagcaactttcgtaaaatggtttctgagttaactgacgaagagaagagaattctcgttgaagaatacaacgagggatttgagtctatctatcgaacaatggctatgcatagtaataagtaatcacttagctcttccaagagctctaaccgcctgaccacatatcgatgttagtctttcgttagataatgcaggtttggaattgtaccagtacatttcaacagttccagcataaacattgtctaaattgaaatacggacagctaaacatatacgatatttcaggcggttttctttttgttggtaagaaaacaaattccttatccgtccaaaaatatctacccgataaatgcgtgctatattcagcagttgttttgtcgattggatatcctcccaagtttttagaatctaccgtgctaggtaaagtcccctcataagcaattaagtctacgaagtagttcaagtttttaggtctgaacgtaaagaccgcagaaaagtctgcaccgcttgagatatgtactatctggagttgttcgagtgctgtattatcaaatcgggaatctctatccttttgaaccagtttatcatacttgtcataagtactgtcgacgtaagctgtaataagactatcagacttatatccagcaaacgccaatagtgctaaaagtacgacaacgaaaacacgggaaaagagaactcttcccgtggctccatctttgaataatagctcgagcaacccaagaaacatatcaaaaaacggtattgattgtttgcttgccatattgctctccttacagagctatttattgctctagcatatgcttaatatgctgtaaacgacagttggaaagttcgtccatcattggcgtaaagccaattccaaaaagcatttgggtctgtacaattatagcatcgtcttcctctataatctctagagctgttaaaatggaactgacttccatcttcaatatcaacgcgccaatttacattaaaattcccactgccttctaaaacgatggcatcattataaccgtcccatttactaggctctgctagcccaaaaacaaccaaattaaagcctgtttcccatatacctgataaggacccacgagaatcaagtaatacgttccacgaagcactgttcttatcattccaagcgccacgaaccttaggtcctgtcgcagggttgttacctgaaatagttatactagcattccaaacgtttcttcctatcatgttggacatccaaaagggtgttcccagccttaattttgctccagctgcaatcattgaagattctcctgttacagccttagctgagcttcctacattaggacctgttactgccatgatatctcctcaaagatggggccgaagccccataacattatttagatttaagttcttcaatttctgctttaagctctttaacagattcgactaataacgcaattactgcattatagtttaaacgaagtaatgcatctttatcgttatcagttgtaactgcttcaggaagaacttcctgcacttcttgtgcgataaggccagccgatggtttagtatcaccatttggaagctgtaaatcataaacattaccagatagcttcgacactttatcaagagcgttatcaatcttagcaatatttgatttcacacgacggtcagaacgaatttcaacgtcccagaaattaccaacaccttcaacgcgtagattagcagcactaccccagatttttacaccagtatctgtaagtgctaaccactggtcaactccagcggcgttatagaaatgccatccagcgcgaacatattcacccgactgccatgcgttaaagctatcgaaaatcgtatcaccgcgctgtaaacgtattccatttacggtgtttgcattatctgtgtttcctggtgctaagtgggctaattgcagatatccatcatttctgaatacaagctctcggccactttggttacggataatcatgtcaccgttttgaccatttgaccaaataacacctctgacatttccagcagaatcacggaaccagtagttagagtttgtaccagctgaacctgcatcacagtaaacattaccgtttttagcaaaaagaccaccagcattggttgtgtcagcggcgactaagtttccgctagaaactttaagactgctactaacatctaacccgcctcttagagtacttttgccatcaacttctaactgccatgtttttaatctggtgccagttacgtcaaggttaccagttacagtaccaccggctaatggaagataagtatcgccagcgttactaatagcagaagcaaccttatcatcaacatatttcttgttggcagcttggttattctgtgtaggagcatcggcaatttgcacatacttggtagtaggaacaataataccgccgttggcattaataaccccattaatagttgctgtacttgatacagtcaaagctctagaaactgctgagtttccataaactgtttggtttccatctgcgtcaactttaaacacatcagtgtaagtttccgaagctggattagctatggcagttgctgatgatttagcaacaacaaatgattttcctgaagcaaataccagcttagcgcctgagttagattttttaacgaaacctaaatcggagtcttttcccatcagaataaaactattatcgttagtattctttatgttttgagaaacgatcaagcttctgctcatcgcggcttcgccatttacttgcaagcttcctgaagacgttagagctccaccaactaaaacgtttccatttggctcaaagcgggtttcaccattagaagtatctgcacttcctgctctgatgtggatgttttgaccactagaagaacctaaaacaactgcgccagattcattagcccgtaatacaccggttgcggaagtagaaccaaggttcagtcttccgactaatctagcgtttccgtttgcggttaaatcggttgtaactaaattaccgaattttacagtttgtccttcaccaacaccgaggttgttacgagcagaagctgcagaagttgctccagtaccacctaaattaattggctgaacaccagaaacaacttctttccatgcagaccatgaaccattttgtccgtagcggatatatgtgccttcaacaccgccgttctttgtagtaaaggtctgcttacatgaccaatcggtatcagaaaccttgcgtaaagacagaacttcaagaacaaagttaccatcagatgtaggtttgtttgttatcttagaaccaccgccagaagatacgcatttatataactgacgagtacctaaatctgatcgtctaataatcagactattaaggtcgatagtcttatcggaaatatcaactgcctcttcagcgccgctatatgtctgattaaaaactaaatccccttctacctcaagaccgctggatttaactagaatatatttactaggagctggagtagaaactgcagtttgataaccaaattgcacgtgtccttcaggagtaactttaagcattgctacggcagcaccgctaccaactttgcgagcaagagttattctgctatacttatccgaattctctgaaccaaaatcagccattgttccattagggttttcgacttttaagttagcgttaatagtcaagttaccggtcattgtgtcgccagttttacttacttgcttattatcgccagcagtgatgtcgtttttaatggaagtcaaatagttgttaaggttaccaccaaacatcgaaccagaggtaatattcccgtctttagtcagcattgctgctccaccgactttaactgctacaggaacatcaaatcgaccgtcagaacggaagctaaaatcaccagcagaaacacctccagtagtttttgcgcgaatattaatttgtcctaaatccgctgtatttggagttgcccaaattacaccgcgttcattggcgtttgttctaaaccatacatgagcatttccgcttcctgcattaacatacactgatgcagtaccggtgccggaagcatgtaaattaggtgcagctaaatcaccggtcatggtgtcgccagctttcttaacttgggtatcgtttgtcagattaccaagtccgacatcagccttagatggcttatttgctgtaccataaagttcgttgtatctaacatttccctcagcaagacttctgtcgttagctgcgtatacgcgaactttagcgctggcgtagtcgatattaatagctgacatggtatcgccagcattcataaaaataccggagccatggctataaagaccattttgaacactaacaccagatttagtaacaccacgccagaaagtaccaccatatgcttttaaacgggtcaacatatcagcattagaggtaatgttttcgattgatttaccgccattaccgcctaagccataagcaccaacttccatcacgtttccgttagattcaccaacgtcgcgaacagcagcagtaccaagacctaagttattacgagctgctcctgcgctagtagcacctgtaccaccacggttaactggaagagtacccgtagtatcgccgaaatctggttttgcgtaactgtcaaaaatctgtttcattgaaacaagaatacttccagctggtccatatccaccagtgtcttggttggtttcatagataattactttaccgctatcttggccgttgtatccagcagtgtttagcactgtaacataaagcccattgccgtatcgaggaactttagcgtaaaaatcaaatgaagcctctgaatctgtagcagcatcatttttaacaacgtaatactctggaatctttcctttatcaggagaaccaactcgacgccattcaacccagttatctaaattgttagtgctccaagatgttaaatttcgtcctgataacgtgataaaatcaacgtaatgtctaccgtgcccagaatcaataccaccgctaatcattaaatccagttgcgaagaagccattcctggatgctttattgtagctacttttacccagcgagcagttgacgcagttgcagcagaaatagtatattgccaggcttgacgattgttttctacattcgtcagaagagtaccggatttaccaggacctcttccgctcatagcgtaatacacctgtgaatttctgaacgttaaattactgtcattagttaattgaagaacacccgtgcctctttggtttttaatatagacgtcgttagagcctacacccatttcaagaacaagagtgcttccactgttaattttaacagtcttattggtagataatcttaaatcgccaggaagagtcgtattaccagagccgtcaagcaagaccaattttcgggcttcaacgttgcctgcaccgcgttgtacgaattgaatagtttcagcgccatcatcaatagtaccgatttcaagaataccactgttgcttgtaccgccggcaccaatgtaccagccatcattagtagcacatttgccaacgatatgacgagttatttcaccgctcaaatcagtagtttcaaaactaattgctttattcggagaaatggttacattgtcttttaacgtagtagttccatcaacgctaagagttccggaggtatctaagaaaggaacccctttaccggcgagctgtactacggcatcattttcatctttagtataaatggcaagagtacgcccatgtgtattcaaagcgatttcgccacgggctacgatatctgcacctggtgctttattctctgtgctagttcttttaaattgtatttgttttaagttttgatcggccatggctacctcttagtatgtgccaaaatctattgttaccccgcgtgaaataacctgatctaatctaggagcatattcaccggatgttgctttatttactataactacgccagcgttagccctaagtacaccggtcatggtatcaccagctttcttgactgctgcgttagctacgttgctaacagtatttattcgtccatcaacataatctttacgagttaaatcgtctacgccagatggctgttgtttagaagtaaatacgttagcggtaattctaccagtctgtgcagttaagttaccatttttagcaatttcaactatgccgctggaatcttccgttccgccgccgcgcaattgaatttttgaattccctccgatgataagaacttcaccattactaccaccgactctaataccaacatttgccaacggacccatgcttaacttgccagagccgccatatgctatttttacttcgcctgtatacgtaccaccacgggatttggacacgaagtcgttatcatttgcttgaggtttatctatctcagtataaaccttcttacctctataagttagggagtttcctgccggcacaagaggaaaagtacccgcgtgccaaataggatttccgccaactgttgaacctgcttttaaatcggccatagtttatcctcttatatattttctatttatacgaaaaaaggaagcccgaaggcttccttagtctgatgtttctctgaacgattgaactggaataacaccgctcggatcgacttttgaatttggaagttccataatcatagtggttcctccttcaacgcctttattcattcttataccattcacaccaaattcttgaacaacactattcagtttttcgctatgagaggtttgaacaaatacaaggtttttgattttagagtcaccaactacagacgtttttggatatcttgataccacaatagtaaatccatcagcgtctgtaggaacagcggtaaatctttcaaatcttaaccatctatcagctccattttttggaacttctaatgatacgtttgaagataataaagatgagcctttgaaccatcgcaggctagctctagtagtagaaccagcatcaagaagacttttagatgcatacatatcacatactaaaaatacagaatccccaggagatagtccataatcagctattttgcttatagattcattttgaactggatatcgcttatattcatatccagtagaatccgagtactcattagtgtcttcaatggaacgataagggcagcctgtatatcctacatcgccaacgttatcatatacagtatcgactttagctctggaatcttctttaacctttccatcatttccgtaaaatgactcaattaatatgcgtccttttgctgctccgagcactcctacataagcagagtttggaaatgatttggaaaaatcagaacctggccaagaagcagaccacttatttttaaaccacctgtctattagcgggctggattgaaatcgttcatgtgtcattataatatacaatcccgaagttaatccatttgcatattctacaaacgctttgttattagcgttgttatcatcagtggtaacgtcaaatgttttaaagttaataaacctgtcaccattaacttgaacaacattaatccccctccgtaaggaggaggtcatatcaaaggcaccgttaatattcaattctggcttattcggaacagcattagaatgcgtagcataagcttttagccaatacttcacagagtttgcctcagagaggattcgtgtttccacgaaatcctcgccgaaggctgccattaaaattggttcagccattaatcacctacccattcaaatttgagagtttgatttggacggtctggccagattttaactggaccaagcttaatccattccaaaacttcaagggttttaacctgagttgatactgagctcggagctccgatatcagctgcagttggaggagtagcagatgtaaatactcgcatccaatcatcaaacttattaaggtttggattataaatcctcatccacacagtatgcgcgaaacgcttatcagcagtttcggttgtcggaggataaggcgtccaaagctgataagtattgtttgtagttacaccaacctgagttaaaacaccaccagctgcagttttttcttcatacccagtcactactaaagtgcttgggttaccagggtcaatcggtgttctgattggaaccatataaccacgaagacctttcaatttagtagcgtctttgatttcagcagtccaagaaccttgtcttattacagtttcattcgttggcacataccaggattcagaacccgtaatgacgatagcagaactatttatgttaagattgccggtcatggtatcaccagctttcttgacataacggccatcagctaatcttgcgtagtttttggtagttaaaattggatacgatccagttgaatcctgtgcaaaaatttgtgtatcagcgtcacgggaacgaataaatgcggactgtgattgggcaccgaatattgaattcaatccctcgacagcaagcatctgaacgtccttaaccataacagttccgccaactattgcatttccagaagacctcagagttttagttgacacttcgttaggaacttctaacgtaccgttaccgccaaatgtgtaggtctggcttgcagcagtagttcctgttccgttttttacgcgaacttttaagtttccggctgaagctgtttgaggctcagcataaattataccacgctcgcttccgtctctattttgaaaacgaacatgcacaattccagtgtcagcagttggagaaattttaacttcaccaccattagcatatataacattcttgacagaaatattattgctaaatgaagtgtcctgactaaatgtccaagctccagaaatagtctgcgctatatcgcgacgagcatatttgtctggtgtttgaccacctaacattcctgtgtcataggctttaccgagacgaggcaagtaatgtttcagtgtaaggttcaattcatacggagacactgcgacgcccttagaggcatacccgttatccggaagagttgagccattggtatcattacctttccacgttccatcgcctgtagatagcctcacggtccctctaacgctgtctgtagcttgccatgactctgttacctgaatagtctgtttcaagtaagcaggaggaacaattctatcacttaatgtgcctgcatcaacttgtgcctgtgtagcatactgagcaagaccgatagctccttcggttgctgttttagcatgtaacgcggcagcagtaactattttcttagcgtcggttccagttctaacctcagcagcagtagcaagagtggttgtacctctttgagaagtacttgcttcctgtatgttgatggtataatggtcccagaggttcccagtaatagttaagccagaactagtattaacttggatacgatcggtattagcaaatttatcgaacagtaatttagggtttaccattactgtacttgaagtaccagcttcaaattcaccctgggcaccaggtgtcgcgaagcgagcaataccagtacgattgttagttgctgtacggtcatttaatgttttaggtgtaactgctttattagtcacgccgccagcattaacttcagtttgtgtagctatttggattaaaccaattgctccatcagtagcaacttttttatgcaaagattctggtgtaacaaccgtaggaatatttgaagaagcaggagttccgtttctaacttcgctatcagttgctaaccagactattcctgattggtttacagtagctttatactcacgaagagtttttggagtaactgcatttttgtaatcagaatgatcgaatataccggtgccagcagaagaacgatcagcagttgtgttaggagcaccaccagtttttactaattgaataacacctaaccgtgaatccgacgtagtacgataaagcagcttcttaggagtaacaattgtaaaatcgtctgttcctgcatccattttagcattagtcgcaatctctgctaaacctctacgagtttcagtagcagctctttcgttaagctttttaggagtaacgattacattatccaagtaagaagcagttgttgactgattaacttcgctggaagttgcaattcttgctataccagtttgggtttcagtagaacgacgtccatttaaggtttctggcgtaattgctaattctttttctgggtttgactccgcattagcttgagcctgcgtagcaagagcaataacacctaatcgggctctagttgtattgtctttagcatcaactcgttctacggtagggtcagattcagttacaatccaatagctttttccggatgctttatcttcaatatatgcaagcccaagaacaggaacatacgatgtagttccgttaaaggtaattgagcttgattgcacccatgctgcatcaggtggatactctgaacgttttggaaattgcagtaaattcaaattgctagcgatagtatcaccaccagaagctttaattactacagtctgtcctttgcgcatataattcattgcgattgtgacagtatccccaacagctacgtctgtaggcaaagtaacgttaattgttttaacggtattgttatctgtgccaaatacagaaatatgctcattaggcattaaagtaacatcagaagtaattattcttactctggtgcgtaaatcattttcaaaaatacgccagattttgtcaatcgagtcatataccaaaaatccggtgcctgaagtacgtacttgaacctctgtttgcccaggagtcccaattgagatagttgggtcaaacgtacgcacagtcatatggttaattggcgatgtaccgtcaaggtcagtaaaattgatgatatcgtttgaattagcgaacaacggcagagtaataaaaatctctgagttggaagtataacgacgaactacgttatcacctgcctgaacttgcgtcggaacaatcccgttcggaactaccatcttggcagtatcgccaaaatctgttaaactcgcacgccatgcaccattactaaacgtaagcataatttgtgaatacggacgtgtaagtcttacctcacgcagacgcgattcaccaaatacgatagacgcaccagtatcttgtgctttaattaagattccgttatagccaggacgcccgccaatatcacgaactacgatggtatcgccttcatccggtgctaacggaagcagtaatgtagcattacctgcagcgttagagtcaacgttgatgaactgaccagattgaatttcaaactctcctttacggacggtataaatccagttcgggtcaacacgtaaagaagtccaattcgcctggttaaaatctccagcaggctttggaatatctttatttgcaatccagatacgacgtccataagtcacagcaaaatcagtgagatacccacgtgtcgggtcatatttttggatagtgttttcttgaataacgtactcgacggagacgccgtcggttttaacgttgcggtcagcaagtgccacatttataactttatttccgcctgcgtccaagccgttcgttgcacggaaatgttgtttcagtaaatcgctcatagagtctcctatggggttatgcttcattatagaagtatttataatggctgtactaactaattgaacgaggttcaaatgtctgatttaaattgcttattcgccgaagaagaccaagtaaaagaaggcgtcattttaattgacttgtcacaaattgcaatggcgacaattcttcatacgtataaagaaggtgacaaactaacaactcctatggttcgtcatcttattctttctactttaaaatttaatgcttttaagtggaagaaagatggatacactaaaattgtcatctgcgttgataacgcagttaatgggtattggcgtcgggacgtagcatattactataaaaagaaccgtgctaaagcccgtgaagaatccaattgggactgggatggatactttgaaggtcttcgtactgtaattgatgaatttaagcagtatatgccttattatgtcattgatattgataaagctgaagctgatgacagcattgcggtattaaccaaaaagttcagtctcgaaggccatccagtcatgattgtttcttcggatggtgactttactcaattgcataagtatcctaatgttaagcaatggtcaccaatgcagaagaaactggtaaaatctaaaaccggttctcctgctttagattgtatggttaaaattattaaaggtgacaagaaagataacgtagcttctattaaagttcgttcagatttttggtacacccatgttgatggtgagcgtactccttcaacgaaaatgacatttgttgaagaatgtcttgatgctggcgaaaacattaaagatttgcttactgaagaacagtataagcgtttcttggaaaaccgcgtgttaatcgattttgattacatccgcgaagacattgttgctaacattttagattgttataataactatcaattaccgggtcgtggtaaaatttatagctactttgttaaatccggtctgtctaaattaatgaaagaaattaacaacttttaaggtgaatataatggctaagaaagaaaaagagcaagtagtatttgatgaagcggtacatggacaggctctgcgagatatgattaaagaagcctcaggtaataagttgaaagcagaaagctatcttgaacttaacaaagacattaaagaccgcgccaagaaagagcttggtgtagaaggcaaattatttaatcagctgcttgccctgttccataaaggtacacgcgatcgttttgaaactgaaaaagatgaagtggtagaagcttatgactctattttcgcttaaagacgagggggaggtatccccctctgaatccattaatcagctgttagataagcaagctaacggatttactattgagtctatggtaacagaacttggaatggggtatcttgaagcaacaactcagtggttagaagaaaattctattcctgagggaaacttcaatagatatattccacctgcaatcatagaaaaaattatgtcagaagcattagaagaaaatatgcttcgaccatcatttagtcaaacacataaaacgaatagtctggattttttattatgattcgtctccgcatgcctggaaataataacagatacgttaacggtaagagcgtttatcttttatatttaatgctcaaacaacactttgccggtcgatatgacgttgttaagtataactgggttatgcgggtctctgataaagcttatcaaaagcgtagagacaaatatttctttgagaaactcgctgagaaatatacattaaaagagttaacactgatattcatgagtaacctcgtagctaaccaagatgcttggattggcgatatcagtgatgctgatgccctcgtgttttatcgtgaatatataggtaaattgaagcagattaaaacaacgttctcggaagatgtaaagaacatttactattttgccaagaaagttaatgtagataagcttcatgatatttttgaatataatgagaaagtcggaacatcttatgtgttcaaacttcttcagtcaaacgttatatctttcgagacattcatcatgcttgactcgtttttagatataataaatactcatgatactgcaacggataatttagtttggagtaattactccactaaattaaaagcttataaaaaacttttaaacgttgacggtgctgaagctaagaaactctttattagcataatcaaatcttgtaaagaaattagtatataattaatctatcgtccagttgcaaggacccatgttgcaacaacaactgttaaatttaaaaaggtaatcatatgtttaagcgtaaaaatcctgctcaacttcaacaacaactggctggtctgaaaggtggttcttctttctctaacgaagacaaaaacgaatggaaactgaagaccgataatgctggtaatggtcaagcagtaattcgcttcctgcctggtaaagatgaaaactctctaccgtttgtaaaactgatcaatcacggtttcaaacacggcggtaaatggtacatcgaaaattgtacttctacccacggtgattttgattcttgcccggtttgtgctcatctgagtaaaaacgattcttataacagcaacccagctgaatataagcttctgaaacgtaaaacctctttctggtctaacatcctggttattaaagacccggctaacccagaaaacgaaggcaaagtattcaaattccgtttcggtcagaaaattatggacaaaatcaacgcgatggttgaagttgatgttgatatgggtgaaactccggttgatgtaacttgcgtgtatgaaggtgcaaacttcgtcatgaaagttaagaaagtcggtggtttccagaactatgatgaatgtaaattccttggtcagtccgagattgcaaacatcaatgatgaagaaactcagaaattcctgaccgaaaatatggctgacctcagcgaaattgttgctccatctcagtttaaatcgtttgaagttaacgaagccaaatttaaacagattatgggtacagcagctcttggtggtgccgcggcaaaagcagcagctcaagccgataaaattggcgatgacctggattcctttgacaaagacctgtctgattttgaatccaaaccgacctcttctcgttccgcagacgatatcatgggcgatgctggtgacagtgttggcgatgacgatctgaatgatattttgaacgacctctaatataaagggaccttcgggtccctttttctttattcctccaaaaaatatttcacaaaattgtttacaagccagttgatgagtgatactatatctacatcgaaacaaaacgagtagaggaaaacatcatgggtaaattaaacattgatatcgtagcaactcctattatcaacaaagacggtatttgtgtagatttggagtatgcagatggtacacgtttttatgacactgaccatggtattgattttgacttgattatgcgtcatggacctggtggtggttggccaaatattgacctccgcggttctagagaaaaggttattgcatatcttgaatctctggaatgggacgacattgattactttatggaagattttgaagaataattgtttacaaggagctatgcttgtgatagtatagctccataatctactggagaataaaaatgaaacttcaacgtcaaagcatcaaacttggttctgaatatcgtggtaaatggaatttctgcatttgcgacaaaaacccagaagaattagagcgtgttgaagaagtactgtgccagatggaagctccattcactatgggtggtgaaactgtctattggaatgattactgtgataactgcccatgctatgaagatgggtatggctcaggcttctggattcctgttgaagatgttgaagaattcaaaaaagcatttaaacttgctaaggccaagaaatgattgaggctgaattagtagttttgttaatttctgttactgccgcttttattagcggcattatattaggattatttttatatgtctaaattttgctgaggtttaaatgattcaaatagtttatgcatttgctcctacaaaaactgtagacggcaaaaacgaaaatgctttcggtttaggcgatggtcttccatggaaacatatttcccaggacatgaaaaactttgctaatcgtactcgagatactatcttgatttgcggagcaaagacttttatgagttttcctaaacctcttcctggtcgtaagacaatcgttgtccaagacatgagtcgtgcgttggcaactgctaaaaatggcttctttgcagatgcttatgtaagtgaattagaatttatcggtttcttgggtggtgacattatggccgctcatacttcttacaacagtactatcacttttaatagagaccttaattattctatcataggtggtgccggaatcatccagaaggcatatccatatgcagatagggttatccaaacaaccatcagaaaaagtcatagagtgaattctgatgtcactctacctgctgaatttgtagcagctcctacttggccagaatcaggattcattactaaagaaaatcactggtatcatattgatgaagtgactaacatttcagaggtggtctatgagcgcaaactatgatatcactcagctatcagaagacaaagtccaaaagaagtggaaaagatttccatttaagcatggtattcatcttctagttttcagttataatggtcttagcacttataacggttcaactacagtatataaccgaaatggaaatatacctattgaaattgagcgtgattataagaagatgttcatcggaatgtcacacggtaatgtgacggttaacgatgatgtagtgtctattattggacgatttgaaaagcgtggagaccagcttttctttactcctcttcaggaaaaatttaatgcgtgaataccaagaattaattaaagatatttttgaaaatggatacgagactgatgaccgtactggtaccggtactattgcaaagtttggtactcaacaccggtttgatttacaagaaggatttccggcagtaactaccaagcgtcttgcgtggaaagcgtgtattgcagaactgatttggttcatgcgtgggtctactaatgtgcatgaattacgtcttattcagcatgactcattactagaaggtaaaactgtctgggacgacaactatgaaaaccaggcaaaagacatggggtattccggaggtgaactgggacctgtgtatggtaagcaatggcgagatttcatgggtgttgaccaactgaaattgatcattgatcgtatcaagcaacttccatatgaccgtcgtcagattgtgactgcatggaacccggttgatttggataagatggcattgccaccatgtcatttgctgtatcaatttaacgttcgtcaggggcatcttgacctccaatggtatcagcgttctgtagatgtattccttggcctccccttcaacattgcgtcatatgcagcactagttcatatcattgctaaaatgacaaatcttaaacctgggcatttggtattcactggtggtaatactcatatttacctgaatcatattgagcaatgtaaagaaattcttcgtcgagaaccgaaagaactttgtgagcttgaaattgcattcccagatacgtatgaaacttggcagactagttctcaggttcgttggttagaacaatttgcacgtcctcatcattttgaactagttgggtataaatctcacccaacaattacaggaaagatggcgatatgaatattcgatttgttcgtaaaggacaccagtctaaaacagtattaggcgagatgtgtgatgcattctctagcgatttgcctgaagttaatgacaagatagtttttgatgggaccgaacaaagggttctgtctattgttaaatcatatgaatggtctataggcaaaacacaattaatctgttggtttgaagttgatataacatgaagatatgtcgggtggttaataaataccattccgacttcgatgtaaatatccaacgtggaacaatgtggggaaattacgtcggtaaagattgcgataatcgtcctgatgctattgcagcgtttaaggacgattttattgctaagattcggaacggagaaataaagcgagagcacttagaaactttaagaggaatgagattaggatgcacctgcaaaccgcttccttgccatggtgatataatagctcttgtagtgaataaactttttaaagatacatttgaattagaggacttatgcaagtaattaagagctcaggtgttagtcaagaatttgacatgcagaaaatcattaaagtcctcgaatgggcgtgcgaaggaactaaagtagacccatacgagctgtatgaaattattaaatcccatctgcgtgatggcatgagcactgcagatatccagaagactatcgttaaggtagcagcgaatagcatttctattgatgagccagattatcaatatgtagcatccaatgcagcaatgtttgaaatccgtaaacgtgtttatggacagtttgaaccgcctgcatttattgaccacatttcacgttgtgttaacgcaaataagtacgataaagaaattctaagtaagtggtctgcagaagaaattactttgcttgattcttatattaagcatgagcgtgatttcactatgacttatgctggaacaatgcagcttatcgagaagtatctcgtaaaagaccgtcacactggtgaattgtatgaaactccacagtttgcctttatgttgatcggtatgtgcttgcaccaagatgatggcgaaaaccgtttagcaaacgttattcgtttctatgatgcagtttctactaaaaagatttcattgccaacaccaattatgtctggtgttcgtactccgacacgccagttcagttcatgcgtggttattgaaggtggtgatagtcttaattcaattaacgaagctgctgcgtcaattacgaaatacatcagtaagcgtgcaggtattggtattaatgctggaatgattcgcgcagagggttcaaaaattggattcggtgaagtcaaacatactggagttattcctttctggaaacacttccagacagcagttaaatcctgctcccaaggtggagtccgtggtggcgcggcgacattgtactatcaaatctggcacttggaagttgaaaacctcctcgtacttaagaacaacaaaggggtagatgaaaaccgtattcgtcatttagattatggtgttcagattaataacctgatgattgaacgtttgattaagaatgattacatcactctgtttagtcccgatgtgtgtcttggtactttgtatacagaatacttccgtgatgcacaagcattccgtactttatacgaagagctggaaaagaacccagacgtaagaaagaaacgtattaaagcccgtgaactgtttgagttgttccttactgaacgtgctggtactgctcgaatttacccgtacatggtagataacgttggtgaatatggtccttttattcgtgatgtggctacggttaagcaatcaaacctctgcctcgaaattgcgttaccaacttcggatgttggccaagaagatggcgaaatcgcgctatgcacactcgcagcattcgtactcgacaacttcaactggcaagaccaagaagaagttaacgaaatcgcagaagtaatggtaagggctttggataaccttttggattaccaagactatcctgtagacaaagcgttaaaagctaaagaccgtcgagcactaggtgttggcattactaactatgcagcttggttagcaagcaactttgcttcatacgcagatgctaatgatattactcacgaaatgatggaacgtattcaatatgcactcatcaaagcctctgttaaacttgctagcgaaaaaggtccgtgcacgctttacaaagaaactcgatacggacgtggtgaactgcctattgactggtacaacgaaagaattgaccaactcgcagctccaaactatgtctgtgactgggaactcctgcgagaagacctcaagcgatacggtatccgaaattcaacgttatctgcgcttatgccatgcgaatcgtcaagccaggtatcaaactctaccaacggtattgaaccaccacgcggaccagtgtcagttaaagaatcaaaagaaggaagcttcaaccaagtcgttccaaatgttgaacacaatgcttccctttatgattatgcctggcagctcgcgaaacagggtaataagccttatctgaaccaggttctgattatgcagaaatttgtagaccaaagcatctctgctaatacttattacgacccggcgaatttccctaaaggcaaagttgaaatgtcggtaatgatggacgacttgctttatttctggtactttggtggtaagactctttactatcataacacccgtgatggttccggtaacgatgatatgattcaagattctgctgactgcgcggcctgtaagctttaataaaagggaattataattagaccacggatggttaacaccacagaataggaaatagaatgagtacagtttttaataccaagcaagtagatatcatgaccgaaccaatgttctttggttctggtctaggaattgcacgctatgatattcagcgtcataaagtattcgaggaactcattgagaagcaattgagcttcttttggcgtcctgaagaagttaacgttatgatggaccgtggtcagtttgaaaaactcccagaacaccaacgtaatatcttcactgataacttgaagtaccaatctcttcttgattcaattcaaggacgggctccagcagcagttttatctgcgcttatttctgacccaagcctagatacttggaaccagacttggacgttcagtgaaactattcacagccgttcatacacgcatatcatgcgtaacctatatgtagacccagctaaaatctttgatgaaatcgttcttgacgaagcaatcatgaaacgcgctgagtcaattggtgtttactatgatgatgttatagcgaagactcgcgcatgggaaaatgccaaaaatcgctgctttaatcaagataatatcgaaattaaagaagctaaacgtgatttaatgaaatctctttatctttgcttacatgttattaacgcattagaagctattcgtttctatgttagttttgcgtgtaccttcaacttccataaaaatatggaaatcatggaaggtaatgctaaaatcatgaagttcattgctcgtgatgaacaacttcatttgaagggcacgcagtacattctgcgtcaacttcaaactggcactgatggcgaagaatgggttgagattgctaaagagtgtgaacaagaagcaattaaaatcttcatggaagttaaccgccaagaaaaagattgggctatccatcttttccgcaacggtggtcttccgggtctgaacgttaaaattcttcatgacttcattgactatctgactgtatctcgcatgcgtagctgtggtctgccgtgcccaatcacggatgcaccaactcgtcatcctattccttggattcgcgaatatcttaactctgatgcagtccaatctgctccgcaggaagttgagataagttcttatctggtagctcagattgacaatgatgtcactgatgatgttctaattggatttaaaaagtacttataaggaaaggggcttcggcccctctttattatgaatgatattgctaacgagttttcttttataaaatatgttcaacttgagttagaaccagattttaccatcaaaccaattttgatagcaaacaagttgaatgtagtttatgccatcgcagttgatgatgaactagtttacattggtaagacaaaaaatcttcgtaaacgtataaattattatagaactgctattaatcggaaagaccaaacctctgattcggctaaatctgccaagatttttgaagcactaatggctggcaaaaaagtagagttctatgctcgtcagtgttttaatcttttgattaataatgaacttggcgagatgtcaatatccactatggacttggaagaaccacttctgattaagaagttcaatcctccatggaacacacaacatactaacaaagctaaatgaactatgttaaagtatatgataacctaatagcaaagggtaaattacgaggcaatgataaaggaaaattaaactattatactgaagctcatcatatcattccaaaatcattaggaggaaatgacgatgtttctaatttagttttattgactggacgtgaacatttcattgcccatttgctattatcaaagatacataataattctaaaatgaattatgctctttggatgatgtgtaattcttctggaaagaattttaaagttcattccagattttatgaaagctctagaataaagcattctaattatacatctaacttattctccggaaagaaacgaacggaagaacatagaaagaatttatctaaagcactgaaaggcagagtaagtccaactcaaggaaagactcatgccaaagaaacacgcgaaaagatatcaaaatctttaaccggtaaaacacaatctgaagaaactaaactcaagcggtcagaaagccaaaaaggaaagaaaaagcctttgtacagtccatgcccgcattgtggtataataacttcaaaggccattgctatcagatggcactacgataattgcaaacataaggtaaagaaatgttagagctatataaaaatttaatgaatctgtgtgaaagctcagaagttgcaaaattcttttataaagattttaccggtcctatggatggtaagttcagagtgttttcatatcactacgcaagctacagcgagtggttaaaacccgatgctcttgagtgccgcggtatcatgtttgagatggatggcgataccccaattcgaattgcttcgcgtccgatggaaaaattcttcaatttgaatgaaaacccactaacgatgggaattgatattagcgatgtagaatacattatggataaggctgatggctctctagtatcatcttatgttgatgatgggtatctataccttaaatcaaaaacctctctttacagtgaccaggcaagacaagcttcagctttgcttaacagtgaagaatattcttcgcttcatcaggttattcttgagctagcgctagatggttatacggtaaacatggaatttgtttcacctaataatcgtgttgttttagcatatcaggagccacagctgtttgtgttaaacgtccgtaataacgcaactggcgagtatattaaatatgatgatttgtacgctaatgctaagattcgtccttatttaattaatgcttacggaatttctgaccccaaaacttgggttgaaggtgttcgtgaacttgaaggcgtagaagggtacattgcagttctaaacactgggcagagatttaaggttaaaaccgaatggtattctgctcttcatcacactaaagactcaataacgtcaaatgaaagactgtttgcgtctgtcgtatctgcaaattccgacgatttgcgttctctttttgctggagatgaatacgcaattaagaaaatttctgcgtttgagcaagcttatctagattacctaggaaagtcacttgagctatgtcagtcgttctacgatgaatacagaggtcgtgctcgtaaagattatgctattgctgctcagaaagcaacggttaatcagcgccatctttttggtgttatcatgaacatgtacgaaggaactgtagatgtggataaactgcttaaagacctcgaaagggtgttcttaaagtactgggcaggatatgttccaaaagagtacgaaaaagaaattgaaatttctgaagaatagttgtttacatcctcgtcagagtgtgatactatagacttacacaaactgatgaggatattgaaatggatatgcaagcaattactttagatatggttgttaacaaatatggtactcattccgatggaatttttgtgtggaatggtaccaagaaggtgggcttcgtcactgacctacggacgcacatggcgcgcaaggaagctgctcgtaagaagcaaaaagagtacactaatcgtgtgaacgagcagcgtgccgaagcccttcctgaagctgtagatgaaatgattgatttcctagataatcatctcgcgaagtatggtgcagaggtgttcaagaacatcacccagccaaacgttcatgctaacggatgcaaatgctatgtaatcgttgacccgatttatggcaagcatcgtcttggcattatgcatcgcgagctgaattattctgagatggcagaatatgtagaagcttgcttcaagtgttctccttcggaaagttctgatcgtcacatcctcatttcgggattatcccgtgatgatatcgtagaggttatccttaaactatgctcaaaataaacacaacttggttgatgattggtgtgttagcgttatccgccggtggattgaaatatctttcgtggcgggtagaaaatcttaaagctgacctcaaagtcgtccaagatgaatctgatcgacaagcaaaagaaatagaaaacattggtgtttctataaaaaatctgcagacaacatataaaggctatcaggaaaaccgagcagctcgtgatacttctaacgctaagatgaataaagattctaagcgtggaaacgtagttgcagccaaacctggattagttgaaaaacagattaatgcaagcttcaataagtttgcagaagatatccaggaggctaccagatgaaacgaagtctattagccatgggtattatcagcttacttgctggatgctcttctagtgcaccagatgtcccggttttacatcctgagtggccagacccaattcaaaaatgggaaggacattgggaagtaaaagtaattgacggtaaagcctgggttggtatgccgtttgaagagtcgcaagaatatcgtatctggatgaatgacattttacgatatactaaagatgctaatggaatgatatgttattatcgttctgaccttaaagaacctcgttgcgttaagtgatggtattataatgaaccgagagcagtatgaaacacttaaaggattaattgctgaaaatgaattggcgtgcatcgtgtttggacgcgcagctgaaaattatgacaaaaatgatatactgtcaatgaataagccattgcgagcaattaaagaaaaatatcgtgctaattggggtgaaaagtctaaggctcttcatgattttattgacactcttaaggatgtataatgaaaaaattggttttgacacaaggggctccaggctctggtaaaacaacctgggctaacgaatacgtagcagctaatccaggttggtatgttttgtctcgtgatgatttgcgtgaaggcatctttggccttgataaacgtaatgattacaaatattctaagcttcgtgagaagtcagtatctgtatgacagttttctatggcgaagactctactcgagatggaaaccactaaaggtgtcatcattgctgatactaaccttaatccaacgactatcaagaagtggcaagagttggcatacgaaattgatggtgtcaagtgggaaattaaacgctttgacgttccttggactgaattgcttaatcgtaacctctatcgtggcgcgaatgcagttcctattgaagtgcttcgtagcttctattctaagatgcatccatatgatttgtacattccagacgaatcattgccaaaagcagttatctttgatcttgacggcacgttagcagataacaatcatcgttctccttatgacttggccaaatgtggtaaagaccatccaaaggaaatggtaattgaatttcttaaaatgcttcgtaacaaaggatataaaattcttactgtttccggcagagagtctggtactaaagaagaccctactgtttatcaacgcattacgaagaaatggttgttggaccatgttggcgaaacaggcgaacacttccaacgtaagcaaggcgattcacgcaaagacgatgtggtaaaagaagaaatcttctgggaccgaattgctgatcgttataatgtaaaacttgcagtagatgacagggcgcaggtggttgaaatgtggcgtcgtatcggtgttgaatgctggcaagtagcccacggtgatttttagaggaaagtataatgtttccaaagtattccgaagtagtaaaagtatcatttacgcaagttgttgctaatcatttaacagatgagtttactccatctgaagtagccaaaatgcatgcagagtttttatctgccatgaatgcacttattccaaacggcgaagttattaaattttctattgaccggtcaggcggttcatctgaagttaaaatttcttgtggcgaaggtgaacacgactggtttatcgttggaattattgctaattttgaaacccaacaggttgaaacttatgttgtctgatgctaaattttcgcatgatgaatttatttcgaaggttaaaatcttcgcacaggaagtagcaaaccgggttcctggaagtaaagtgactctccgacgagagtcatcctttaactatgttgatgcttatatcattacagttaataatggaaagagcaatcaacacactcaattggctttaaccggaacaggccaagttgaaatgactaacattttaggacatatctaatgactttacgtgaggctgtagaagctcttttaattgaacatgctcgtggaattagggcagaaattagccaaaatggtattcgtctaattaatgctgttattggttctgaccaaggcgtttggtcaattccgcgcgaagaatatgatgctattttgtacagtaacgttgatgttaaggaaggccaacctctttatggttatgtcttttccgatgttcttgaacgaggaaatcatccgtttccagatggtacaggcattcgtacttctcgagtagagagttttgcttctcctaccgacgagttaaaattggttaaaacaaataacacaacttatctggtgatttaaatgaaagcgtcgacagtactacaaattgcgtatctcgtatctcaagagtcaaaatgctgctcgtggaaagtcggcgcagtaattgaaaagaatggacgaattatttctactggctataacggttcaccttctggtggtgtgaactgttgtgaccatgcagcagaacaaggttggattggtgaaattccttacaaatctacgggattgcgtcaagacggatttcaagtcaaaaaagtcggattgctcaaagaacatcgagcagcccactctgcatggtctaaagtcaatgaaatccatgctgagcttaatgctattctttttgctgcccggaacggcagtagtattgatggagcaacaatgtatgtcacactgtctccatgtccagattgtgcaaaagccatcgctcagtctggtattaaaaaattagtatactgcgaaacatacgacaagaacgaacccggctgggacgatattcttcgttctgctggaatcgaggtgttcaatgttccaaaacgtaatttggataagttgaattggtataacattaaagaattctgtggaattgaataatgaaacttagaattgttgaaattaataaacttaacctaagtggtgatgttgttatatcatactcagtagaacgccggtattggtttaaatggaaaccactagcaacatttaaatttgaagatcaagcagttcgattattaaaagaattatccaagcgcaaatctgtaattatcaaaactattaaagagacatcaaaatgaaactgactactgaacaaaacatccatattcgtgaaactctgaaggctgtgctgagcatgggcgaatcccagattgtgtttgaaaaagctgatggcactattcgtactctgcgctgtactcgtgataaagacattattccatctgatttggtagaaagcactactaaatctgctcgagcagaaagcactacttcacttccagtatatgataccgagaaagaaggttggcgctcatttgcctttgataaacttatctcggtaaatggtatgaaagttgagcatctgctgcagatgatcggtaagtaatttgctttaaactgaccatgttaatataactacatggtcaaacaataaaggtaacacatggaacttccaattaaagctctaggcgagtatgtaattctcgtatctgaacctgcacagcaaggtgatgaaattgtttctccttccggtattattcttggaaaagaagaacaaggacaactgccggatatgtgtgaaatctattctatcggtgatgatgtaccgaaaggatttgttgaagtcggtgatttgactccactgcctgttggtaatatcagaaatgtacctcatccgttagtagcagcaggtgtgaagaaacctaaagaaattcggcagaagtttgtgacttgtcattataagtcccttgcatgcgtatataaataataatatgaattgggcgtcggacaattagttacccgagcaattctacgcggtggatgcccgagctaaacctcggttaccgttcaccaaattttaacctcatttgaggaacgattcaatgaacaaacaacttactaaagctctggaactccaacgtaatgcatggaattccggtcacgaaaactacggtgcttcaatcgatatctatgcagaagcactggaagttctgaaagggtttaaacacctgaacccagcacaagctgaatttcgtgatactttagaagcgatggatgaactgaagtatgctaagcatcttggttctgctgctcgcaaagctgttcgccactttgtggtaacgctgaagtaatttgtacgcccaccatgtgtacgcatgggtaacgtatgatgtggacgttgttggttatccccacgtaaaacatccgaaaccatcggtgatttgctaccaaagtgcagctagaaaataaacggcaagtgcatgctaccccgaggcgatggccaatcgggagtacgcctcaaggcctatacatccatcggtgtatatcttatccccgagaaatcggacccggaacctttaagctaacggtgtgcaacagataagagtttaaacgtaccctttgagggcttgcgggagctacaaccgaaagaactgtcgaaagaagttgaacctcggaagaacgtgctcccatgtatttctccaaaatggaagatgataaaatggctaaacaagctaaagcaaaaactgcagtaaaagaagttgttggtacctctaaacgcgctggctacaagcgtgggtcgaacaagcgtatcaatcagacggttgagaaaatcatgcgtcgggctcgtgcggttcttcgcgatgatgcttctcgttttggtaagccgaaagcataagttcagggactccttcgggagtcccttttttattttccgcagaatgaaaaaagttgtttacttctaggctcaacaaggttactatagacctgtaccacccaaacagatacaacggagaataaaatgaataccatcaacctgaatgcaactatcaagactaaagaccatgacggttataaagctcagactgtccacgagaaaatgtggattttgtctaaagttcaaggtgatatcgttccatgcatgacaccggacggtccatcagatgatttctgctggcatatcacgctaaccaattggttcacaggttctgtatatgttctgaacactccagttgttggtcgtattcgttctgaaacttacacagatgaagaagacggttactcagaagatgtaacctggtatgaaaatggtcgtaatcgtgccgatgctttaattgagcaaatgaaaaaggtcggtaaattaaacatggataattggactaaacagtaatcttgactggggcttcggccccatctttgaggatatcaaaatgaattacagcaaaaaccgagtatattgcatttccccagaaacttaccgtagatggaaagacgctaagaacacaattaactatctcattgccaccgttgtcggagttcaaggctggacgccgttagaacttgattcgctgggacgggtcgttaagattaaaaccgaaaccggtaaaatcatttcggcaaaaaccataggagatgaatatgaccggtctctgtcatgtttattttcttctcacgagttagaagaaggacgtgttgtgcaaataggagcgtttgaaaatcaaagctctgatgaccgctatgcagtttttgaaatcccatcaacgttcgttaaacctactccagtggttaaagatgggcgtagcgtcttcactttaaaagaagcaaaagaaatcatccttgaactaaccgatatcgtccccgaaactaccaagtatgaactgtttaaaagcaccggatttgcagaagtaaaaactgttaaaactgtagaggttaaaaatgtctgaagtttttgaataaaagttgtttacttcttgggtggtctgggttactatagacctgtaccacccaaacagataaacaaactacggagaataaaaatgaacttcactaacttcaaccgcaaatacgtacagaacaatgcttgggacgtttctactactttgctgtgggaacacaacaatggcacagtagctcaaatcgatatgtactgggaagataactacgtattcttcagctttgaaaatggtcctactctggatattcagttcaacggttctgaaatcaaagttggattccatgatgaagttcgtaaacgtgatttatcttcacatccgtcttggaacacaaatcgtcagctgcttgttaaaatttatctgcgccacatcctcggtcgtaaaacaaccgaagaacaacgtgaagcaatctgggatatcgtttcaaacgaaatcaagttttaactaactcggggcttcggccccactattgaggaaatgataatggaaaaaggtaaattctataagcttaaaaagactccaatcttgtctccaggcgctcttatcaagggtgtttttgagcaaatcggtaataatccgattaaaattaccagaacctttaaatatgcggaaaataccggattagttgaatttgaaatcattaagccagatggagaatgcaaacgcgttagtgtagatgaagttcgcttttcccatatgtggtgtattcttactaatcaagagtttcagcattattttgaagaaaccatctacaaagaacctgaaccgaagaccgacgatgatggaagcaatgattggggtgtttggacatcaaataaaggaaatgatacctacaatggcggattaacaaaggaagaagctgttaatcttgcaaaagtacaacgcctgaatgcaactaaagacacaaaagttgtaatcatgcaaccttttgctgtccctgtggttcacgttaatattcgcccgttttaagaggaaattgaaatgattgtatcagctttctatgattcacgaaagaaaaaagttgaaaccattatcagcgatactcgcgatggtacacctgctaataaaaatggcgtgaaagcatacattgataagtattgccctcctgaatttcgtatggttgatggtgtagattctctgagcattaatgttataaatgctaaaattgaattcattaatgcaactatgccaattgggtattctgacagtgatggctcaaatgccaaaatgccgaaagaaaaattcataactaaattttgaggaaatcaacatgattgtatccgtgcctaaacctaaagctggtattttttcttgcagtttgaaaaaccacccaatggttgatatcatgtcagctgatgttaaacaacacaccgttgagtatgaaattgatgctccggatttctttgaattgcccgaatgggcagtgagacttgatgcatgaaatatcatatcttcagtacagtaagattagcaaatggaattcctggagttgtatgtgatacggctccagcaattaaagcctacttggttgaaccttggtatgaagttaattgggttgatggcaatcgttcaatccatgcagaatccgagctttatccaattactcaattaagggctgctaacgacgatgtctattaatcctcacttcggtcatatggttgcccgacgtatcaccagggaaatgctaaagactgttgagtattataatatagaattaattgatatagaaccctcggacactccagggttaatctggttcaatttcaccggtgccgcaaatagcgtcgccaaatttaaacaagcattgaggaatttccccgaatgtcaaaacctgtaattgcgaccgatgttgatggaatcatcgttaaatggcaaagtggtctgccttactttgcccagaaatataaccttcctgtagagcatatccttgatatgatgactactgaaaaattcattaaacccgctgagctgtttgattgtgaagaagaactagctgttaagctgcttctgaagtacaacaacagtgattttattcgttatcttgctccgtatgctgatgctttagctacagttaataagctcaaagaaaaatacgattttgtcgctatcacggctcttggcaactcagtagatgctaaccttaatcgtcgtttcaatctgaatgctttgttccctgatgcatttacagaaatcatggtctgcgattatgatgaatctaaagatgctttactggaaaaggctaaagtaaaatacggcgatcgcatcgtttgctatgtagatgatttgcctaaacacattgctgcagctagcaaagtctttgaagacactgaaacccgtgtgttttatatgcctcgtggtgagcgagaaggttcagtgactgctcctggaattatggttgaagattggcatcaaattgtaacttgcctggaatctctgaaattcgttaagaaaccgcagaagtctctttctggattgtgggaagaagctatcaaagaccaaattcgtaaagagcaacatccttttaattggcctccacgacaagttccaggagattggtggaaacaacctatcattccgtttagtcctggtccgcatgttcctcctggaaacgactggtggaataatggtcgtattacatgtgataatcaccaaattaattgctaacactctgggtatggtataattgccataccctaggaggaaatatgtttgtagttcatactaaggttggtaaacgctggttatcatgtgattatggccatgttaatcagttttatcgttggaatccaatttggcgtgaagcaaagtcgtgcccgatttggaatgaatgcatcaataacgggtttgtttatatcgatggattaacttatcatcgtagcgtaagcgaactttcaaaagaattaggtgaataatgatttttgatatcatcaaagcaattgaagatgctaagggttctaaagccaaaacccaaattctcattgacaataaagataacgttgatttaaagcgagcttatctgctggcgtattccgggcgatttaaattctttattaagaaagttccagaatatactcccgttaaatatccaaatgttccttcaaagacgttttcagatggtctagattacctccaagacattctggcagcacgagtacttactggtaatatggcaatccaggggctagtagatttgctctctaagatgaatgagggtgatgctagtgtactggtacgggttcttcttaaagatatgcgttgcggcgcttcaggttctattgctaataaggtatggaagaaattaattcctgagatgccacagatgttagcatcagcctactctgagaaagcgctgtcatatattaagttccctgcattcgcacaacttaaagctgatggagcccgatgcttcgctgaaatccgcggagatgatttagatgatgtgactcttcttactcgttccggtaatgaatacctgggtctagataaacttaagcgtcaacttatcgagatgaccaaagaagcccgagaacgccatcctaacggtgtgatgattgacggcgagttggtatatcatgtcgaagtgaaagaagaagaaaacgacctgtttgatatgtttaaagagcctgagcttcctgagttaagtaaagctaaggaattccaacagacggctcgcacggaatcaaacggattggctaataaggctattaaaggaacaatatctgccgaagaagcggaaggtatgagattccaagtttgggattatgttccgcttgatgtagtatattccgaaggtaaagttcctggatttgcttatgatgtacgcttccgtgcattggaaatgatgagcaaaggctatgacaaggttattctaattgaaaaccatgtcgtacataacatccatgaagctcgggctatctataagacatacgtagaccaaggtctcgaaggtattatccttaagaatatcggtgcttattgggaagataagcgttctaagaacctcgttaaatttaaagaggttatcactgtagatttgaaatgtgtcggttcgtacgagcatagaaaacaacctggtaaaatgggcggcttaatgttcgtatcagaatgtggtcgtattcgtgttaacgctgggtcaggtcttaaagataagcccgaagaattacatgaacttgatcgtactcatctatggaaaaacagagattctcttccaggaactatctgggaacttgaatgtaatggttgggtaactgctgaaggtcgtgatgatggtacagtaggattattcttacctatcattaaacagcgtagatatgataaagaagtggctaatacattcgaagccgcgtttggtgttaactttactgaggcaacaggaataaaatgaaagctttatacgaagtgattgctaaatctcttgacggacgtggtggtatttctgttcacacagaagttattgagtttaataacattaacacattaagaaacttcaaagaaaacattgaagagtatgagtctgtaaatggactacaagtttggcgtacagtaacaataattaattaaggccttcgggccttttttcgtataaatagaataaacaaacgaggatatgtcatggaacttttaaatgaagttttcgatgaagagaatagtaaaatctatcccgtcgagaacgttaagccaaaacttaaggtaccacaggtctttttgattaaggtgccgggtaataacaatttaatgattcggttagtacaagggtcaggtcaaggtgatgcagttaagaacatcaagatgggtgataaattcatccaggtctatgttttctctgtgtcggaaaaaggtaacatcggggcgcttaaaggtggtttaggccaagacccgattggtgctatcaataccatttttgagaccgtcaacaaagtagttaagcaaattaaagctgatgcggtaatgttccgctttaatccgaagaaaatgcaaggacaggataaagccattcaacgcattcttgctcggttgattactactcgcaccggcggtcgtttcaatctaatgaaagatatggcttactacaaaggtaagtatgcttattctattatggttcgtaaaggtaagaaacttgaagagattgaaggaattcctgaaatttcagaagaactttacaccaaagtagattccaaagtaggcgaagtttatgtgtctaaagaaaccggcgaaaacgttaccaaagccgaagcattggctaattccattggcgaaaaagaagacaagaaatctgaactcgctgtaatgagtaaaatgaaagtgtctcgaaaagatttaatccgagcacagtacggcaaatttgtttcatatgttgatgaagattggccagaaaataaacgcgaacgttggtacgaattaactactaacacaccggttcttagcgcagaaggcgatacggtagacctccaaaaagatatcaaagccggattagaaaaatcaattcctttttatgttgatgatatcaagcactatcgtgttcgtggcggatatggaagtaattttggcgatgcagttgagagattatttgtaggccaaatgtcgagaatgcatgacgactggaaggttttcattccttcggggtcagacaaaatgaaaatcgctgaacaacgaatttcagacgttgctgacgttattgctcaagctaaaaatcctgcatctatggaaacaatgcgtaaaatcgttgaagtagctactcgtggatttgatatgcctccagctgacgatttcggagctttacgtcaataccaaaatcttgtcaattatatgatatccgcttatgtgtcaattgttggcgattctatatccaaagcaattgaatataaccgtgaaatgcattctcgtttaagcgaagaagaaagagatgcaatacaccattactgtggttctggttattcatttgttaataactatcttattggcatggaaagcttaggcgatccaattattgacaagaaaattcgtccgctcgattctgcctttgaaaaaggtttgcgtcttgaaccaggcactcttttgtatcgtggtcagcgaggaaaatatgaagactttaaagataacattgagtctaaaatgttttatttccagaactatgtttctacttcgttaagtccaattatctttggtgcttattcaaatgctggtgattcattaatgccagacgcacctagttctgatttagaaaacaaagaaacaactatagatgcagtatcttctgttattggaacagacaacttggaaagagttgatagaggcgaggaagttgcctatggcgatgagtttaagtttggattcgttatccatggggccgataaagttaaggtagttatcccgggtgtcttgtcaagctttagcgatgaggctgaagttattcttcctcgcgggttggcaatgaaagtcaacaaagtatggggaactccttttagaaatggagttggtgtagcgaataacaagacattcatggtagaaatgacggtagttccgccagagcaaatcgatgaatcggttcatctctatgatggtgacatcttgatggaacagggcaaagtggaacctcttgaagaaagcaagttcaaaggctttttaaatgagatttacttttcgccagaccgttctacagataaggttagctacacgcgtaccatggagctactggctggtgctatcaacctggatggtatcccagaaaaacttgcataaagttgtttacttatcacaaggacgtgatactatagacttacacaaaccaatgaggaaattgatatgaaacacgtatttcgctttaacggtattgaatggtctgctgatgttaaagatgcagagaagttcaatgaagaagttcttatcatgcttgaagggtttaacgaaggtactccgacggttcttattcaagatatcttccgtaagccaacagagccatcgtttgtagaagccgttcttaatggaaaggcagaaggtatcattcctgttaaagtagtttggaccacaaacgaaatgaaacttcttcgcactgagccagggtttattggctgcattgcataaaacaaaggggccttacggcccctaaattattctacttgttgtagtagtgatattagaaattccaccaccagccccgcctaaacgagacaatcttgaagcagacgcactcaagccctgatttggattaatcgtctcaattttctgaatagccttatcttccaaccaatccatagcagcttgttttccaaccgaacccgtttgcatgctacggtaagcaaacgtgacatcaaacactgctatcgtgttttctccatcatatgtaaattcgggagctccacacgctacaggcatagcccctgagaacaagcatacagtatgtggtaatccatttctagcatgaaggttaacttggatatcacattctacgtcttgtggcaatcctcgcagaccagtcactgggtcttcaacagcatttacccaatcttgcattgcccggtagttgcttgcttctgggtccatcctaaatgaaagaaccagcggttccatatctcttcctgtgatttttatattaggagcgttatggaacttatccatttcatatgataatctgttctctggtattttagcagaataaaccatcaatcctgctgttggaaatgccatattaaagaaatcgagcagataagtacctaccgtaaattctcctaataatgactgcaccacacgttgagtcattgcgccaatcataaatgtattcacacctgatttacgaacaacttgccgagttccttgtgtcactatagttgttataccctgattgaattcacctggggtcaatccaagccaatttccatctaaacccatattattatacagctctccaccaaagtcgtttagaagagcctgggttttactagagggtacagtagcgaatacaacagagaacatattagttctctggaaatcgatatcagccgcttgactcttaaattcttcgagagtaaacattattcaatacctccgatataaacgttacctctattaagagtaagtatttcacgcatagtaatttcaagcgtaaatgtgcttggaaggttaggagcaattgctaaaccattgaaatgtccgttcggcgttttatcaaagcggatactctgaatttggcatggaccaaatatatcctctctaccatccattgatgtagaatatccaaaattacgaacagtccaaatcgttgggttagaaactacaataacattgcttaaaaacgatgttatttgctcaaacaccgtgttttctactttagccccatctggagctgcggatttaagagttcctttataccattcatcaatagcagctttaacttcttttgcgtatgatgaatttccagtcacaccgtaagaatagtagttaaaaatttcatagatgcgaataatttgtataaggtcatctgcagacctaggagttaaatcccaagtaaacactttcgttctattatcaggtccggcatacatactacgggcagtgttataaatttgttcaccattatcggccattaatccctgcgttaaagactctatcgacccaaacaccgcagtagaagccacgttgcttaatacaccagtagcagtaccgccgccacgtgtaacaagagaatccccaacatcattaaatttatggctaactgaatcaacgtctgacttagaccgcggtaatagaatattagctactggtgcagtactagtggtagaacttgatgaattagccaatgctgacattggtgaatcgaatacagacgataacattacatctcgtctaaatgaacgcaaatcaggagtagttcttcctttaaaatcatatgctgtgaataataacccattgcgatataagtcatgtactctcatatcttgggcggaatcattcccagctgaacgttcagctgggaactgcgccaccttagtggttggcgcattcgtcagtttagatttaccttgggaaattcgagttcctgattttttgatgttttcaaggccatcggccagttcttcaaaaatcattatttttccttaagaggttttcatagcgccttgcattccaggagcagctgttgaagtctgtggaggcgttctataaacgtatgtgctattcttatttacagcggtattaacctgaataggttgcgactgtgtattagattcacgtgtacgagcagcttcacgactatccgcagcggctttaatagaagcagactgtttaacctcaggttgttctgctgcaggtatagcttcggcagttggagcaggttctgatattttagaatcaaggagtttttgcaattggtctaattcaacctttaagtcttttgcaacttctggagataatttctccaattctttatatctggtggttgtgctttgtactgcatccttagcagagtctaatcgagtggaatcagatgcgtcagttttttctacatacgcttttgttctcttcatttctgcttcagcattattacgagctgtgatgattttgaggcgttcgtcttctggcaagtctgcatacgctgactgctttttctctccgctcagcagtttgttatattcatcgtcatcaatctgcccggtgaatttttggaacttagcagaaagctttcttttccattcaggttgttcgtcatattctctttcttgacggtcaacatattttgctctcattttagcatcttcttcatcgagttctgctccagtaacagtttgaaatctgtctaaagcagcgccttcaatgttatctgccgaatcgttaaatcctaatgcgcgtaacattccagcaagaagcttactcattccgagcataatggtttctccgagcttatcaattacatcaaccaaacccgagccaatggcttttgctaatccgccccaatctcctttgacgaatgattttactatttcattcgacatctcgcttattgcagttaatagcggaccccattctttagcctgcttgttaaattcaacaaagttcttttcgaataatttagtccaataattaaaatgaactttaattaaatctataagcattatcacacccaaaaccatggcggcagttttcgccatttgggccaaagcgctaacagtataactaaacagcatactgctaattttatctgttaatgaaatagtttttccaaaaccagatttaacgcttttaattaattctccaaattttaggtcaagaaactttttattcttgtcctcagtttcctttttaggctcagctttttcctcttgctcttctgtgctaggaaagaaatccgcgtcaggacgtctgccatcctgaggaggaataagtctttcgagtaattcctctagcggctgctgagtaggagcatccgggacttgttctgttatcgtttctaatgatgttccagtaccagtcttttggacatcttgctgaacatcatgctttttagataacaagtcggcaagtttcgtgagcttatcattaattaatgatgcagtatcattaagttttgatactgcatcagttgtgcgctcagaagcttctgcggtcaattcgacaccagctgaaacatcttctactgatttgataatttcgtttgatttagtttctattacatccgaaattaaatcagtagatgcttgttggtcgtctaaacgacgaccaatatcttctagcgtattaatttgagcatcagcttgagactcagcctttttctgtggagccgagtcagcaataactcttctacgcattgaattcatttctgatttcttagtcattcaaatatttccattacgttaagcatgcctttgattggtccttcaggtccatcaatggctatagtgtttactaagtcatcagcccactttgtcacaaaagctggaagcttcataaagtttatatccattggttttccatctactgattcaagaaattcgctcaaaattgaatctactgaacctagtttggaataacgaggaggagctctgaatttgaattctttaccatctaacctttgagttaatcgctggcaaatgtaaaccttattcaaatcgtaggtaaaatcatctttaacaacagtttcttttattctgttgttaaatgctaataaatgtaatacaacaatatcagattcggctgctgttaatcctggacaaattgaatccaaaagaagattcatgttttcatctggacccttaacatctttcatcagattatggtgctttaaccccagttttggaattgatatcgtcttttcatttattactattttcttaataggaagaatcacgtttaagttcatttttcaccttaatcaaatctacaggttcaagggcagagccatttgtgaacatatataagttagttatagatgtgttatttgatatttcatggataacttcatctatataaaagtcagttctgaactggtcctttaaatcaacaaagttgattttcattcctggagttagttcaaaattaccgtaacacttagtttgagcatacccgtcatattgagccatcgtagaaatgcgtagtgcttcttcatagccattcctaaaaatcatgtcagaatatcctcctgacctattaatgaatacgctgttttggccttctccattaataattcgggtaacatctttgtccacaaacgagtgtgcataaaatgttgcgtttttcatgggatttctattatatctgtttgatttaacaagccattcaaaatcccatgctaatggatattttaatcctgcagcaaactgacctattgtttgaggagccccgaacatgaatacatttggatcctgggatatcattgattcataatccatcatgttaattccggtgatatcttcccacgcaaaaataaattgatcgttgtctgtagaaatgcctacatttctaacatatcgtaagtaatctttgagggtactagtccagggaacccgtgggacgtaagcgttaattccgttgataggaggagcaatcaatggttggtcaacatacattgcacctatcatttcttttatagtttcatacgcagaactaaaaaacgctctgctgaacttgagattcattatgtcatgcagtgttccaagctgaagggtgataatgctatcgcctttatcatcaacaccaactgtaaagtgtttaatcccataaattcgggtttgtgttctcgatgtgttactgtttgcaacagatatttgaactagttcatcaccgttcatacgcgtgtgcatatttttcgagtcataaaactgaagtaggccttcgttagtcccgcgtaatgaatctctcattgttaatgtaataaatgtagctgctaattcaacgaatctattagctagccacgcatcatatccagaatataattttatgcttatattaggatatcctaatctttgtgttgtcatgatttaaggtccttttcaataagcgataaggttatgccacgctcaataggcagcatcttcattatagaattcaagtcatatttaccttgagaaaccaatctatggttaatttggtaaaatgtgaaaatctcgtcaggatgtagcaatagcttaaagatatcaacaatgttatcatattttaatactgtcgtggtatcacagcatgacgtttttagctcaaaattaaacggcttcatctgcgataaaatcttttccaaggtttcaacatctatagcatcgataacggtcaatttattgctatcgctcaattcattccacgcgtattccccagatgaatccttcacagatataatgttatctaaaatcattttacctgtatcgtcaattatttctatgggttttttgaacttgagcgttaatccagcaacctctactttcggatttgtcaacggaggctgattaagattaaaaagatactgcttatattttccgcattttgggcacttcattctgacaggtattttggttttaccaatacttgaaagaaataccttaagaaatatataaggacgatactcagcaggatggtcatgaaaataatcatccattaattctgctataagctgtttttgttcttcttcagacttggtgttcatgtcgtttctaaccaataaaaggtctctataatcttctactgtaaatggcttaaaacgttggacaccatctggtaattcgcatctaactatattggccataaggtaatcctctttatactatttataaatatttgaataagaggagtggatatgaacatcacatacaaatttgaaacaagaataaatggcaagaatatccagtgccgagcttttacactagaagaatacgctaatttaattgcagcgaagaaaaacggtacaatcgatgaatgcgttaaagcattgctcagagaatgcactaatgccactgaattaaacaaacaggaatcggaattacttatagttatactttgggcgcatagtataggcgaggttaatcatgaggtgacctggaattgcacctgtgggcgtaaaattcctgtgccattaaattatacacatgcgcaaatcgatcctccagaagacctctggtatgacttaaagggatttaaaataaagttcaagtatccgaatctttttgacgattcagacattccaatgatgatatcaaaatgcatagattatatcgtggttggaaatgagcagatttactttaatgatttaaatgatgcagaaatcgatgatttatattctgctattacaaccgaagatgtagttaacatcaaaaatatgctattgaagccacaggttcaattggcagttcccattacttgtgaatgcggaatttctcacattcatgtaattaaggggcttaaagaattctttaagattatgtcatgagcaatattgataaattatattctgaccttgacccagagatgcgacttgcttgggataccgatgtgtcaaaaacggtaggagcacgatcggttaaaaatagccttcttggaataataaccacaagaaaggggtctcggccatttgacccagcgtttggttgtgatatcacaaacgaattatttgaaaacatgactccattaactggtgatacgataaagcgtaatatagtctctgccgtgcgtaattatgagcctaggattaaccgtctatcagttgatgtgcttccgttatatgacgataatgctataattgtcaccgtgcagttttctatagtagacgaccctgatacgctagaacgtatacgcatacagatgcgtagtaatgctaactctagcagtagagtataatggtactagtccttccaaagaaacagtagagtggagatagaatgagattagaagaattacaggatgaattggataatgatttgattatcgaccagactaaactacagtatgaagcggctaataaccctgttctgtatggtaaatgggtgcgtaagcactcgacttgtcgaaaagagatgttaagattagatgccctcaaaaagcaaaatcttaaagcacgattggattattacactggccgtggcgaggttggtggtgaagtatgcatggatgtgtatgaaaaatcagaaatgaaaactgttttaagcgctgataaagaaatcttgggtgtagatactaaattgcaatattggggaattcttttggagttctgtagtgatgctatggatgctattaagtcacgaggttttagcattaagcatattattgaccttcgtcagtttgaagctggcgcgtaataaataaacttgtaaactaaggagacaatcatgtcgaatacggtatgtgtcgtctgtaaaggaccaatcgatgaagcattggttgtccaaacagacaaaggcccggttcatcccggagcttgctataattatgcgattgaattgcctgtcactgaagacacagaagagcaattgcaagaaacgcagcttttaatttagtctagtgttgatgtagccaattggctttgccccttcctttcggttggggcttttttatatcagaagtcttcgtcgtcttcatcttcagaatcagcttcaagagcttgtctacgccccgccaaagcatcacgcacaatgatatcatcagaatcagcaagagtagtttctttagagcgcttatcgtaatacttctcgagttcttccagaccatctaaggtctggcaagcattaattttactcatgaagttatcgatagtagcctcacgaattgtggcttcgtaaatatcttcaaatttaatcatagatttaccgttttcattacgtagttaaatttttcatcagcatatcgttgaatacgctctaatgcatgttttaagcaatagtttaaatgtgtgtatttctttttagcattggctgacttcggctttacacccaggtcatcaatgatatcccacactgtagccaaagatttatctttatgcttacgaagaacacgaccaatagtttggagtacgataatcttcgatttaactggatgggctaaaattacatgatgcaggtttttaacagaaataccggtagaaaatacaccgtaacttgcgacgataataattccctttccgttttctgccatagcctttaaagcattacgtgtttcggtattaacttcgcctgacacataatagacatgctcatgaccagcagctttaatcatctcgaatagctctttaccatgagctacatgtttaaacatcacaaaggcattttcgtcacgcgctgcaagtttagtagcaagattagcaatccaacgatttcttttcttaacattggtgatgaatttaatttcttcttgatacgtttttccttttaaagcatttgcggctgcatctggatatcttaagaagattgtattaattttaagctcagttacttgtccgtcttccattaacttagaagttgatactggacggaagatttcaccaaacataccaacatattgcatgatattagctttgccgtctttaagagaaccagacagtccgtacttaaacatgcaatttgtaagacctgcaatgattgttgaaattgacttacccgttgcaagatggcattcatcattcatcatcatgccgaattgagaaaaccattctttaggctgcttaacagcggtctgccaggtagatacataaactaatgcattcgaatcacgagcagtaccacctcgaatacccagcatagcattacgaggaaataaacgatagtcacaaaaatcatcaatcatctggtcaactaacgcagtagtaggaacgatgataagaaccttgccttcgtaattttctacataatatcgagcaagtaatgcctggataagagacttaccagcagatgttggaagattaagaattctacgtcgattaactagaccttcatatacagcatctttctgataccagtgaggttcaatcttagttaatcctgaataaatttctttagttgacaaccaattatcaaaatcctcccgcgaaagagtttcttgctcgaatatagttggatcgaaataaaccttatatccgaattggtcggcgaattttctaatttggccaacaagaccaaacggtaagagacgattataatctagcagacgaattcgtccatcccaatgtccatagcgatatttcgggttgaatctgtatccatcggcttcgaagctaaaatagtctctgagttcatagaaaatcgagtcatcacactcaatatgaacatgactaaaatctttaaatttgacttggatgtcgtgcactgtactatcctcagtttataaatacaatcatatttatacattacatgaggcacacccaatgctagataaagactatattaaagaaattcaggcactcgataaaaaagaagctaaagacaagctcgacgaatatgccaaaaccttcggtattaaactgaagaagacccgctcatttgacaatatggttgctgatttggaaaaagaactggctaaattggccgatgagcctatgccagaagacaacgatggtctatcaattgctgatttaatccaagcagatgatgaaattgaaggaaaatcacttttcaatgatgaagcgtctgatgaagcaaaactactgtttgacgctccagttaatgttggtattaaaattcatgatattgacccaggtttctataaagaaacccctaaggtaaatgacccagggtttgaagtaaaaacaccttctatcaatgataaaggattttatgctgaagctcctattggagacagcgttattcatatagatgatgaaggacaagttaccaatattccggttagtatcacggaccccgaagaatttttcaaagcaatggacaaagtagttaaaattattaaaacagacgaaatcattgagcttcctgaaaactttagtccaaatatgcaattgctaggtaagaacccaggatatattactcttccatggtggatttaccaatggattaaagataacccagattggaaatctcggccaacgtcgtttgaacacccatcagcacaccagacactgtttagtttaatctattacatcaaaagaaacgggtctgttatgattcgtgaaacacgtaattcttcatttgtaactttaaaataaggaacagctatggcttatagcgtatctattgctcctttggctgcttcggcagtcattggagcaacaaccaattttactgcaacaacttctggagccgcagctgaaggcacagaaacgtttgtatggacagtaaatggtgtaaaacaatcttctgttaccgcagctatgaattatgttgctgcaggacctgcaggtagtaagaccgttaaagtagttgctactgttactccggctgaaggcgatcctgaaacggctgaagcagaaacaactcttaccgttaataacaaaactatgcctgcaattactttaactttgagcccgacttctgtttctaaagaaattggtcaatcccaagtagtcacagctgatgttactggtgccccttcaggagcaagcattgcttatgtttggaaacgtggttcttctgttatttctggccaaacgggtaaaacaattaccttaaccgagtcaacggaaactagctacacactgaattgtgaagtaacggtttctgccccagactataataatggaactgcaactaaaggtattgctgtcgcttttactaaaaagaccatgagcggtgtttctgttactttgactcctgagtctattacgaccgaacaagggtctgaagcatcttttaaagccaacgttatcggtgctccagaaggtgcaactggggtttattcttggaccaaagacggttctcctgtagaaggctcaacaagcacgttagtgattgacacgtctgatatagggtctcaagtgattgaggtttctgttgaggtttccgcagaagattacaccccgattacagtcactaaaactggcgatgtaaccattactaaaagggtagccccggagccagacggagaacttccgtatattcatcctctaccgttccgtggaacagcctatatctggtgtggatggtgggtaatggatgaaatccaacgaatgactgttgagggcaaagattggaaactcgacgaccctgacagcgattattacctgcatcggtatactctagctaaaatgctagatgattatccagaagtcgatgtacaagaatctagaaatggatacattgttcatcgtactgcgctggaagcaggtattatctatccgtaatattcgggagccttcgggctccctttttgctattcacggattggtttattatgtcctcgtcacatagatgaggttattatgaaagcattacaagctcacttgatgcatgaaagcggaaaggattttcaagaaattgcaagggcgttagatatcactccagcggaagctgctaaattgtgggtctcagttgagaaagcacacgaacggtttaagcaaaaagaaaaagtcgtttatcggaaacgcttaacaaacgttggtataaaatctcgtcataagaaacttgttaaacacatgaggttattatgaaaatgcctaaagtagacccaattgtagtagaacgatttgaagaaatgctttctaagaaatttacgccagctgctaatggggtaaatgtctggttgtttgcatctaaatttgttagtaaaatgatggctgttcagagttcttactactataaaagtggtgcacgtaaaataacggatttgattaatgaacggtatggaaaaattgattggatgctgatggataaagatattccattagtacttgaggttggaagcaaaagtcaatttgaaatcatgctaactaaaagcggatatatcatgtatcgcttcgtgccgagcggctattaattgctttaaaaatcgatgtggtataatgggctcaggggaaatcctctgataccattttgaccaagatagactcctggttttatattatttattgagagaaaaattatgaaccttgccgatagaatggctaatacagccatcaatattgctacagaagaattgagtgcagcaaaagaagaagtattaacccagattgagaaaaccgctttagcgggtcaacgtgagttaattatgtatcctagcagtttagttaagaaacatattacaagtgttcttaattatttgcatgatgaaggatttgttacaaattataccagtgcccagcgtaatggtgatactgactttatgaaaatcacattctaaggaaattataatgtttgcaaaatattctagtctcgagaatcattacaacggtaagttcatcgagaagattcgcggtgctggttttgatatgcatactgttgagtgggtggctcgtgagaagattcatggcactaactttagtgtgattattactcctaccgaaatcgttccggctaagcgtactggacctattttagaaagtgaaagtttctttggtcatgagattatcatgaagaagtacaaggattctttcgttaagatgcagaacatgctgaacgccatggatttagtatctgttcaaatctttggcgaatttgctggcggtggtattcagaagggcgtagattatggtgagaaagatttctacgtgtttgatattctgtcagattctggtaatgaaaaagtttattgggacgactacgtagtagaatcgtttgctactggtcttggtcttaaattggctccacttcttggtcgaggttcatttgccgagctatctcagtatgtgaatgactttaaatctattgtcaattactataatgagcttgttgacacgactgaccttgaacatgcaaataaacatgtgttcggcccacaggcttcttctgaaactggcgtagctgaaggctatgttcttaagccggttcatcctaagttcttcaataatggtactcgtgttgctattaagtgtaagaactctaagttcagcgagaaggctaaatccgataagcctattaaagcgaaggttgaactcaccgagaatgataagcgtgttctggaaatcttttccgaatatgtaacctggaaccgcgtaagtaacgttctgtctcatattggtactgtaactgctaaagatttcggtcgtgttatgggtctgactatgaaagatatcattaacgaagcagcacgtgaaggtcatgatatgttattcgctgataatccttctgcggttaagaaagaaatcactactttgattcaaaatactattcgtagtaaatggcatgaggttgtagaataatgagattggcgcttattggttcacgagaagcgccacgcagagttctgagtctaatgactacaataggtcaacgcctctcggaagaggggcatttttcatattcaggtggagctccaggttcagatgaagcgtggttggcgaaatacgataggtcaaattcttgtaggattattccttattctggcttttgtggccatgttcctggtacaggtgttgttgtatggtctgaattatcaaacgaagccaaaatcaaaagcatcattaaggcgagagaagttacgtcgtactgggatgaatgctcgaagatagtgcagactttattcgcacggaattctatgcaggtattgggcctagaatgcactgagcctgtagataaggtattatattgggcgcctgagaaaagatgcgggagtgtatctggagggacgagagtagctgttgatatagctcgcaggcacgggatagaatgtgttaatctatacgataagaaagtgtttaaatccctcgaggaggaatactctccgaagtttgacatatttagtttatagcaaaaagggagcccgaaggctcccataaattagtccgcaatcagcttaggtaacttaacaccgagcataacagacatctgacttcttcctgccatcttatccatatccgcagcattaatcacacgagcttcgtcctcgtccaatcctacagtatatgggttaaccgacagcgcgtaacgaaccagtaaagctacagaaggctgcaagctagctgggtcaacaataactttaaatgcaccaacatgctcagggtcgtctaaatcaagaccttcggtatacggcgcatagaataatgaacctacagtttccttcccaccaaattctgccttaacaccaacaataacgtaatcaatcggactgttagtatcacaatacagtggaaggccgttattcagaatgccatatgcgttttctggaatagtcccatcgttcttctgcattaaccaaccagaagctgccagtaccgctgcacaacgagtagatgctactgcgtaggtgccagaataagaagtattacgttgaactgctgaattcatttcacaaatgaaacgatacagagtacgaccttgttccggggcagaatcctgcttagttaaatctaatacacctttatcggatacaccagctactttaaaccgagaagaaaccgtaatcaatgattgcaggatgtctttattaatgtcttctgccatttcagtagcaagtaaatcatcaataagctctggagcatcgaacccgttagcttctaagtcttgagctaattctacagttaaatccgttttaagcttacgcgatttaacctgggtctgccatttatcaattttaaaactggcttcggtgattgggtctgaatcaggtccttcgaatttttcagtgactgcagcatctgacatcatacgaatattattagctgctactgcttcagatacaattccaaattcatcggtttctgctgtatcggtaaacgggctatctttaagtactttaaagaccacattctggtatttgaacatatcgtctttattgaatgagtctttatttgccatagtgagttcttcaattgactcacgttctggcgccccgatttgacctgcataagttgcacccgtattaaacgtcaggtcaccattagggttaagatatttaataccatacagtgctgctacaggctgtttagtacgctgtgtagcaacaagatcggtatagattaatttagtagttgcgcgcgttaatgcaacgagattagggcgaccaattaagttgctactcgttgtagttgactcgcgcagaagttcgttgattttagccattgcgctttcctctgtggatttataagtttatttatatccattaaaacaactaaagggagcccgaaggctcccttattggtattagatacctttaacccatacacgacggaagtaagcattcttaccaacagagttgacgatagaaggcataccagaggtaatacgacctttcggctgttgagcagcagaatcggcgaacgggttaataccgataccgtaacgggttttgaaccccatgaccggttggaagttcttcggatcggaaccacgcagcggggtcagtgcaacatacggagcatagtagataccagcatccatttcgttagcacctttataaccgatggtgaagtaatcctgacgagcatactggtcgatgtatacacggtagcgaccacccagaacaccagcaaatactgctttagtggtgtcggtattataaccacgacccagaccctgagctgccggagatacgttggtatcaacagctgccagtacgttaactacgttacgggaagcgataatgaagttaccttcaccgcgaccggtctgacgagcgatttcagcggattctttgtcaatctggaacagcagagctttaaagctttcacctgcccaacgagcaccgcggatatcaatcgggtcttggaagtcgaatacaccagctttagaaccaacggtctgggtcataccagatttaccaacctgagcggagtagttaatccagtcaacaacttcacggttgatttccagcataatttcggtagccaggattgaactcaattcagcatcagcgtccataccgtgaacagcacggaggtcctgagccagttcgatggaatactgtgctttcagctgacgagatttcgcttcgatagtttgtttatcgatacggaagcccatttcattccacgggttatctttagaaccgttaaatgcttcttgcagttcagcaacagaagtagccataccttcggcgatttctacaactttaccagcttccagagcggcagttactgcagcgtccagtttagcagcatcagtagcgccagcgtctacagtgaaatcttcaacaacctgcagatgagcacgaccggtctgtgcgaaatcgtgaacaacgatatcaccaacagtcagagcatcaccggctttaactgcttcaaatttctcggttgcaccctgaccagagaacattgcatccggagcgtacatcggatggaaagcttctttagcaccagcagccagagggtctttgccgtaaacagcgcggagagcgaatacctgaccggttgggttagacatcggctgtacaccacagatatcgaaagcaatcaggttagggatagcacgacgaaccatacccataactgccgggccaatctgggttacagcaccagaggtctgaccagctgcgatgttctgtgcatcataaccatggtcaccgccaatttcggcttcagacaggaaagaaccaaatgcttcagcgattttttcatcgcggtattcaggagcctgattaatatcagcttcctggttttcaaaaatcttagcgatcagagcttttttgctagcgccaacaatttccggcagagcttcgttctcaagcagcggctgccatttttcgataagtttattctttttcatgtgttgtataaccttttaaattaagaaagacgagccgcttgggccacataagcatccataacggatggggttttagtcgcaggagtttcttctactgcttcagttgtgaagtttaaaccgtctgcttctttgtcgatagtatttatatcggcagattccgttacagactgctctacagaaccctgcaccatttcaacaatagctttcagcttagttgaaaacgagtcagaataatccataccctctgtcagagaaactactttctctttttgggtatcagtcagttcacgggttgcttcttggatagcatactcacgttgggcataattgatatactcatcgcgcttagaaacttcttcaaataaacgagcagtttctgctttttgctcagcaagttcttcttccatctcagctactacgtctactgattcttcaggaattacaacgttgtgctcaacaaacagctctttcataccgacaaacatggattcaaacaggtcagctttaataccgcggtcaaccgccagctggttttctgccatccattctgcagcgatatggtcaaagtatttagaagcagcttctttcagctcttcgcgagcttcttctttagctttttctttttcttcttcaactttttcttctgctttctcagcaatcttttcaatatgagattctgccagagctacggcgtgttttttgactgttgcttcgaatacagtgctgaagttagctttagcttccggagaaagctgaactgattcgaaaatactgtcaagagcgacggaagcatcgatagttttagcttcggtcattaaaagttctttaagcatttttgatgtcctgtgttaagttacataattatttataacgcttttaacttctctgcgagagccataaaagcatcatcagcactattggcaacttgtgccgaggtattttccgaaatttgtttcggttgtacccatgcatccggagcactaggaccccaaactgcgtctacaccaacagtcaggcgaaagccttcttgtacgatgttatatccttttcctgagtctttcaaagaaccgagcccgcggcttgatacaccaggaatccaaccagcacgaatgttagcggctaatttatcacctggaccgtggtctccttcgatgattcttgctcgcccataaacatcgttgcctttccaccacatatcttcgataatgattgcggcttgcatcgggtcaacatttgcacgaggtggatggtttaattctcctagagcctgacgagtagcaacctgttccttaatataacggcttaccgcagtctcaagaatgcgttttggataaagacgtttattacggtttactacttctgcctgcataaaaacaccttcgatatacagaccaggttttaagccagattcattttcgccttcaacgataatagattccagcatgggtttaccatcaattacatcgcccggttgaccccaatgctcaattaaaagttgttcattgaggttttccattaacttagccccagagcctgacggcgtttaagtgctttcttacgtttacgtaatccacgaatttgagcagatggattagcacgttttgattttactgctttacgcgcgatttggcggcgtttagctttagaaagtccggttgtttggaacgcgttacgctcacgtgttttacgatccttagtacgtgtaatagtacctttagaatcaacgtgcttaacgataaattcatttaattgtagagattcgttaattgaacctaaagcaattgctaaatcaggctcagaagtaaccatgttctctacaattttatttatatcatctttagaaagcgctgcggacaacttatcaaaacgtgcctgtgcttcaggaagaaaagcttcgacagcgtcgataactaattcatgattttcaggcagtataagcattactcgtcctcttcgtcgtcgtctttctcagacttatcttcatcttcgtcgtcttcatcttcatcgtcaacgggctcttcaccctcaatcatgacagacgctgcgataaattttttgcgctcttcaattaaaccagatgtccgttcagccataattgcaccaaaagcttttttggctgctacgaggtctctggattcaattgcggaaatataattttccattagaaatcctcttcattttcttggtcttggaagcgagcctctttagactctaattcaatttgcttggcttcttgttcaatttcttcgtcagacatctgaaggaaatctttcattgctgtcttatgagaaatatacttgccgataaacggttcagccattgtgagcatattgattctacgctccataacttcagcatctttcaactcggtgaaatatgaatctttatggaacacaatcttaatattatttatttcgtcttcccactcatctttagacaaaacttttttaagaattagattagtgcgaagtggatcaagcataatctcttcgaatttatgctgtaatctacgaataaatttagcaaaatcaagctcatcgcgagtaattgctgtgccagcatcaaactgcacaccaccttgattatttgcatctggcatgcgcgaaagaggaactcgcaatgccatgtataacgctgttctaaagtaacggacgtcatccatatcactcatacctgacataccaggaagagtatctacttcagtaactgctttaccatctctacgctgcaaccaatagtcttctgtcattgacatattatgctgttggtttttaatcttaccagttgacgcatcatatacaacacggtttttcatcgtgttcataatatgctgcatgtgtgctgccgctttacgagaaggcatattaccagtgtcgatgtaaaacacacgacggtcaggagcacgagtaatacgataaattaccaacgcatcttctaatagctttaactggttggcaggtttaacggctcggtgtaaataaccaatgatgttttgacctgagcaatcaactagcccagaatgtgcatatactatagcatcgcgtggaattttaattttcgttccggcggaatataatctaccatctgcgtaataactttctttgccagtatcgtaaatgaaatactctttgtaccccttaacgattttagtgccagcgtcatcagcggtaacgatttcacggatgaattgtaagttgcgcgggtcaagacgtctcagttcctgaattccgtctttcattttcttggtgttgacgattttgtggaagaatattcttgagtcaacataccaacggcggaaatggtcggctccttttcgctcgaaattaaggcatgttaaaactgtattaaattcttcaagaatgcggtctttaattgcttgactgaagtcggtagaatctaaatcaagagaaactactggatgaccgtcttcgtatacaaccgcgtcagaaactatttcttcaacagcattgtcaacttcgtagttattcattaaactacgataagtgttgattaaatcagcggttgttttcattccaggttcattggaaccaaacatcatttggttgaatgaattatactggatttcgttttcgtttgattcaacttcacgagctccatcatcaaattttggagcagtgattgactctaggtcattgttgatttgttgcttatattcagcttcgtcgcgtttttcccacggagcgaataagtccaaaatatgaaaggccattggagtctccgaaattatctataagtatatttatatcgaagttttgtcagatatttaagcaaataactcacagaacttcgatacggggccgaagccccataacattattcccaccagtcaatagcaaatgtagtttcgaacgtttctacctcattattcgaatcccagtccatctgtacttcaccaacgttagttggccacagaccggtaatggtgtgttcatttgtgatagttttgccatcacgactaaactggcgtaccgtagcaacctttttgtaatcggctggagtcataccagagatatcattgccttgagcgtgggcctgagcctgccaagcaataattgccttacgtacttcatgtttatcatcgttatagatggtaacagtccagtcgtcataagtacggtcaccggcaacgttaatcttacggttcatgtacccgactggaactttttctacgatacctgccggcatcggtgctgctttacatttgaaactgaagttacgacccagataaggaatttctacctcaaacaggttaggacgtgcaaagtcaccagattcaaacgcacgggtgatgtctgttaattccatcgttgtttcctatagatatttatatagcctcttgattgactacatcatcgtagaggctattaaagtgtgcggtaatataatttatcatctaaaggttagatgaccccagaatgtcctggggttcatttcaatagatcccataaatcaatactagatttctttgattttgaccgattttcttcccaagtgattatctctaaattatcaatgcttcctataatttcaggaggaactttgttgtaaaacccatatgcaacagaaaccttatggtctaattgatacgctccaggtattccacatagtccaatcttatcaaaattttcccatgtagaataaattggtttatgcttagaagtttctcttctaactttactagcatattcattatattctgtcttgtttggattccagcgaggatggttttctcctgtcatcgaagacaacactttacccttattagctgttccaatagtatttcctatcttaaattttccgctacggcaatcatagcacacgtcagtgtctctgcaataacgctgtgaatattgttcaccgcatttatcacaaacacaatcaacatatatgtttgacccgggctcaagatggtcaacactgatatcaattgaataatatttgaatccatgcctaggcgaacccagaggaggcagcttgtatccaagttccgaaaagtatttaaaatttttaggaattatttttactttaacaaatttagagataatcacttggttttccttaattgcacataatatttcatatgtgcaattgtatcaggatttagcgaaaatgtacaatttattgtggtccgatcaactcatcgaaatccgctccagtcgctgtagcaacaaagttaagcgtaatataatttatcgatctggctggtttgatgtagaagctcgctacaaactcgttgcggtcgataactgctggagtgttgttcgtggtatcacatacaactcggaagtcatatacaccacccagagctttaatacctgcgaggtattggctggtttccatacggaaagaactacgggtaaagttatcgtttaattcaaacagctgccacttagaagaatcaccgatgttgttcttcagcatgttaaacaagcgacgaacgttaattcggtcaaacggagttggaacagtggttgcagtcttatcaccaaacagaatgaaaccttcacctgtaccttgacccgttaccgggttaatacctgcttgatacatacggtcacgatgtgcttgacgaggttcaatcgcaagtttaatgcagttcagaatctgaccacgacgataaccagccggtgacatccaaggctgagcaatatcatcagtgcgagcacacagacctgcaatatcggcagccagtggaacccaacggtttacgtcgttatatttatcatactgatatttatagttaccatcaattgccgcgtacgtggtattaatgttcatgttagcagaatcataagttccatcgccttggcgccagtcgattaaattatcaacagcacgagtcagaggaatatttacaatcgttgaccttggaggcgaaatgagtgctaaacagtcttgacgctcatctgcaatagacgaaacatgtttttgtactgtacttgcgatttcatcggtttcaccggcacaagcaccagcaatcagaaggtttacacgcaatgcttcacggtcaccaaataaatcccagccttgaattaaatcgccagcagtaactgattcattagctgaaaccccaccacccagacgaataacaccggaaaatccttcaggccatccttgcgcggtagcaaatatataacgtgaagaacctttggagaaataatcgtccataaagatgttgtttccgtagatgtctttatcttgacggcttgttgataacaccgttgattcaactaccgcaccatctctacgaacaatgatagcgtactgtgtatcggtctgaggaccatatccaaatacggcttttgcggttgatgcacgctgtccaccactcggataaatcgtcagctgttcgcctttatcaaaagcggcttttgatacaatttcaatttccagttggtttccgagctcgccaggatacgcagctacaattccaggcattttatattgcgcaagcgcagtctggaattcagtttttgtcatttcttcatgggcagtttcaggttcagttaacagaactgttgaatcagaaataattttgcccagagtaataacagcggaaacaccagaactctgtgaagtaatagtagttgtccatgaatcacctaaatccggatactgattaatgctttttgcatatgcaataatttttgccgtcggaatgaacaccgacataatttttccgtcactatctacttcagtaactgaaccagtgtcatctacagtttggtctgcatatttaaccgtaattttatcaccaacttcatagttactaccagcagttgtgatttcccactcaatattatcaaccagtggagatgcgtttttggcagcttcacgattaactacacggactgtacgtagatcattaccatattgcagaaagttcattgctgacataaagtaatcagcagtttggttattaggaccaccaaacatatcaaccagttcaacttcgttagtgatttgagtaacttgatatgcaggaccccattggaacttcccgacaattgcggcacgacctgtagcgttaagtactaccgtgctctgtacgctcgtttctttgagctcaattccaggagagactaaaggcatgatatatcctcaatgttgtttgctttttattatttatacaaatgaaagaccatgttcttgaggcgcatattctgcgctattcacggcgtcaacgaacactacaggagcgtaatcgtcgttcatatcttctaattcgcgtttaaaaacttcagatgctaaacgcatttcatctttatccacgaaatcagcaaatttttgctgtgttgttaaccatgcgaaaattacgagtgacataattaaatcgtcatgatatccatcttctgccgcccaggatactcctttctcagagaaagtacgaaattcttgaacagtagcacgatggtgaataatgagtttatctttttcgataaggtcttttagtgcagaacatccgacggcttttgaccttttcgtctgtttcattcctaaatcaactattgaatcgcaaatgacattctcatattctaaatccatataaagactcttcgctacagaaacacctgtagagttaagttctatatagatcggagcttcgttgtactccattagatatttaataactatatccgggaggattaagtgagaaattgtattagaatgtaatactccaacttgttcccattcagatgtagtcacgtcaataatatttagtgcatggtaatcctgaccgcgtccttcagcagagtcaagagttgcaatatatttgtggtctgcttccgcttctttaaatttataaaacccgtgcgagtcaggagtaacttcaatccaatccatattggcaagtttcataccggaaatgagagtaccggatgtgccatgaaattccgcacagtgctcttgtttaaactgttcaagagaagaagcactgatagtttgaagtgaccattgccacccatcatcaaacatatcttcgtcgttatatagacgttctttaaccgagttccaaattgcagtataaggcgtaaagccggatttaccttcaacagctgcagtccaaatatcatagaagtggtttaatccacttggtgtagtcgtgataataattttagaacgacgacctgatgaaataacaggttggatagcaagccatgcatctatgaagtttggaataaacgcacattcgtcaatgtaaatcattgcaaatgagttaccacgaacagcatcaggactcgaagcgtatgccccaatagatgagccattatctaattcgattgagcctttgttccattcaacaataccaggctgaagaaagtcaggaagtaattcaattgcttgcttagtacggtcgagaacttccgcagacattgagcctttatgcgcaagaatacctactgctttatccttattaaaacacacgaagtgcgcaagaaagattgctactacagtagttttaccaagctgacgactaaggttacaacaagtcatacgtttagccgccatgatttctagcatgtccctctggtaatcacggagctggactttgatagtaccgtagtcaatatgcgtaattgcacagtaggtctctgcgaagtacacaatatcgtctcggcatttcttccattctgcaactatttcacgagtcaactgcattttaatatttgctcgtttaaggtttggcaatcccatatagcgggtgcgcttattatttttgtccttaaacgtttggaaatgagctgggtcttcaccttgcaaacgaattttaactatcccatgcaacttaagatagtcttcaaatttctcaggataccacttatcatcccattgcgatttaaagaaacgaactccgttttcgattttcgtttccatttcagacgggtgacgaataaccgtcagtttcccgtcatttaaaggatgggcatcactcagaacgttaaacggttgagtctgttccatttactattttctctcgagcttcttgtgcttcataggcatcaccgaattcatccatcatatcagcggtagaccctacaaagactgttgcgttttgaatattcattccttgttgaggattagctccttttccagtactaacctgctcagaagtaatgtctttcatttctttatgaagcttaagaatttctttgttggttgtagtcatctgacccataagagttgcaaatacttccatatgtctaggagagtcagcattcttagcagtttccaaaaatattttagctgcgtccattaacatttgttgctggaagtgcatgttcttgcgaacgaccgaatagtcatcttcgaggtcaggtttacggtcatttggattagatttaacttcaactaattcaagtttttcataaactggaatttcttgtccttctattccaggaattccttcgatgtctaataatttagccatatctaattgtaattcactcatttttcacctctcggtccaggagcctccggatttaccggaataggaatatcgtgagaataagtttgtttactagaaccatcccaattttcgtgttgaacatctcgtggagtgacttcgctatctactgattcaaagtttccttctggagttagctctttgctgttagcgaagaaatctaaataaatggttctaatttcgccgtcaacctcggcaacaggaggatataaccatccattgacttcaaacatcagcgaccattctaatctacgacgagtgatattatctccatcaacagcttcatccggagaaaatgactgtaatacaattctaacatcacgattaaagcttgtgtctttgtcgtaaagttcagttatagtcgtgttaaaatgcggctgaaaataaggaacgatttgctcgatgatttgatacatatcatcttgattgcgtgtataaattcccaattcaaaaatcatcttaatcggagtaggattatactgagatgtaatttttgaaggggttttatatgatttggttctattcaactgtgatgttttatacatcgcgttgtattgcatatcaaccaagtgcaaattcattcttggcaaaacagtttctatctttgctttattctcggtagactggatagcagtccattttccgagttgagaaaggaacttttcctttgaagcataagtgataggtactttaatatattttagtccagtgtcttcacgccaacgagcaatttgtacatgagaaaataaatctccaagcaatacaatgtatcggcgtaaggacgaattataccaatgtccaaacatgatttctcctaagggacccaaaggtcccatctttattttatttattcaaaaaatccgtcatcaaacgaatctgctttaggaggagactcaagtcctcttccgttattaacataatacggatgaacatattcagaggcttctttattaattgcatcgctttctgcgtattgtacgtcagaaatatcagcaagagaatcaatgtttttgattggttctaaatcaagttcagagaactcaggaatgataattccttcattgcgctgcaattctggttgaagctgctcaccggaataaatgtatttctgcgcagtaatcttacgttgaacattttgacctaactgataaaatggatcatatggttgaacccaattaatttcaaacagcgaattatccatcgggaaataaatcaggtcacctgcctttggttctgaattattggtttgatgcttgaacaaattaggattaatagtcaaattgacttcatcattaaccatcataccaaatttactgaagaacgtgttatcaccagaataaccgtcaaaagagtctaagtaagcagcaaatttccaagccttggtgaatttacttgatgggtcttctccgaaaagcaaatccggattgttatattcgcgaggaaggaaataaaactcaattcctctcatttgaatagcctcagctgataaaacatctgctaacgtttggctatttctgtgattataaaaattcacataaggattgagaatttctgtctcattagttttattgtatcctcggtaatcctcaaggcgagcgaataaactagaattaaatgtagtcatcttttaccccaacagaataggacaacccgggtcaagtaaatcaagttcctctcggagcctctcgatttcttcttgggcctctactttaagtgtttggccatcaactgtaacgccgccggctaattgtagcccttggtgtttaaacagaatttcaccccacaactttttagtcagtgctgtagcataatcttttacccaacgattattataagcaccttctctatttgtattaccttcacctgcatattggccgttattgcgaaggttaggattctgatacctatctcctaagccccaatggtcggaagtttgttcaccagcgaagccgtaacctgcagtattacctaccatcatgtcggtattcataaatgatttagtccagcattcgcaaacaatgatgtcccccttcatgaagttgcccattactttaagcatttcattatcagagttataccaatagtctggaagtggggcaagcaaatcctgcatcattgaccaataagtcattaattgagtaaaatagcccaggtcagcaccgaaagcgtttggtccataactcttattacagcttgaccccattccgccattaattccggccattcccattaaaaagtcagtaaaccacggataggtagcattaccatccattgaagttaatgaacctacatttgttctaacgatttgagtgacagcaaatacattacgaccacgcaaatcaaacacaccatttaaaaatcttgcgttgtcagcttcatcttttccaatataaaaaacttgatagcctttattcaatccgttaaagtggtattcaccatacaactctaatgctcgttgaatacaatcataaatttggtcttcagttacttcgacattaattaccggcgctcctagacgtcgaagtatagcgtctttaagcgtttttgggttgtatgtgttgtatgacatataagctcctctttatattctatttatacgaaaaagggacccgaaggtccctttcattatactgctggatgaatagtaatatccaatgatttaatactaacaggaacttttgattcttctgaagcagctctatacacaattttgattgcatcgccagacgaaaacttaataagtttcttggttttcaacagttgctcgccggttactgctttaacacctaggctataagtaaacacctcaatgttattgacgagaataacaatttggacagctttatctgaatcagaagcttcgataactgtatcagtttctacacaaaatacgccatcgtcatcaacaataatatcatcaacaatacgaatgccagcattaaatgaagcagcgaccaatgagttaggatttaccaatgcatcagaacttaaatcaacagtgaaatcttctttactgaattcacctattgatgaaggcttcttaaaccattcgccccgtttacggaggtatgctccagtctgttctacgtcagtaactgcagtcacgaatttatcttgcaattctactacagtagcgtatacaccatcccgttgaactggattttctgacgaaaagtcaccattcatttgagtctgtaacgtaaatacagaaccttttaacccttcgctgttattgccaagttctacttgaatgtcctggatagcagactgctgagagttttgcatcccttcaacattggtcattctcgctaaaattgaccccggaggaatcggctgtccgccaggaacaataccaacttgctgatttatccatgctacttgaccctgaagccctgatgaagtatcacgtcctacaacatcagaaatgtacccttggtcagttgaaagagaactaatttttccttcaatagtatcaggcttatcagaagaccccaaacgagcatcaatattattgacacgaggaactaacccggtttgtgcagagttaagtgttgcgtcaactatacgataatcgttttctaatctagtagtacgagctccaatttttactggattggtaaaatcaatggcttggttaatagcaaagatttcattattagctgcggaaatagcatcagcgttattcacaagccttgcataaattgaagctgacgtagctccggatttaggaccaacttctttacgcaggtcgtttacttcaatagtcagagaacctacgtctgaatcattgtatgcatcctctagcgcctgaatacgctcgtcatgttttactatagctgacgcattgttgatgattcggtatttcataccagaacccggagcgtcttgcttaggctgtccgttaacatcttgcccaggatacgcaccaatttcacgtttaacccaaactatattatcacgaactgttctgtaataatcatctttactagaatcataaacacctacatcctcttcgagaaaatcaaggtcagttcgaagtttttcggtgtcttcttctaatttaagaatttgtccatcatgcttttcaatattctttttattgatataaacctgctcaatggcgtcagaagaacctgtaatttctaacgattttttgatttggtctacatctacttgaatattttctacagcagttccaacgttgttcaaatcgttatgtacctgaaccacatttttctgaatctgcacagaagctctattcagttctccatcatttccatagcgggttgaagccccattaagaggctctgtattttttatccagttaattctctgttgaaaatcgtctggaattccgtctacaaacggaagcgagtctactaattttgtcatataattccctatcggttggtgcaaaacgttaatgacgctgaataattatcgccacggatattttcaaatggctcaatttgaactctggcgttaggaggaacatcatttataatatatgagcctgtagcatatccttcaaatctccacgaatgaccatttctaccgcccttggtattctctatattgagtgtatgttctcctctattttccccgttgacagttattctaaatctccaaattctattgtcatagccgtcgttattacgttggaattttattgtgagagtcagcgccaatctagaagtggcttcatatggagaattacacccaaaccagtttccagcaggaatataagttccaccttctacccaagtaatattaccgacacgcgttccagctggcatatatcttccatccgactcagggcgtgtataacaattgatatcgttattggtaattgttatatcgttatcaagggtttttccatttattttgcgagttttaaagacagcatcagtcgcagctgcagcaagtgaagcatctgatgttggagaacctgataatcgggttaatccatatttatccttggttgattttaacgcttgtagactttttggagtaacagccaaattgttagaagtagctgaagccacatctgagtctttagcaaattttactataccaaatacgctgtcagacgcttttgatgccatgaaggtttttggagttactgcgtatccatcgtgaacagcacctgctgctacctgggcttgggttgcgacacgaactaatcccaagttgctttctgttgcagaagtataagtaggaggattaacgctgaactttccaatcatttctacaacacgcttaggagttactgcggtggtttcatcagttcctgcttgagcttgagcggcagtcgttaacctaacagttccatctacgttttcttgggcttttacggttttaaacacatggccaagagcagcagctgtaatagttctatttcctgcggttaatgctgcggcttcagtattagttgcgtatcgggttaagccaagaattgcggtagttgcttcaggccgggtaattgtggattttaatgtagctggggtaaccgcagcattacctacagttccagcttcaacttcggcctgcgtagctgtacgaattatacctgctacggttggagatgctgcaggtaatccaatgtcagttcttgcccagcttccaatcaacgctagcgctgattggacgtcttttgtagcaactggccattgtgtatttgctgggtcaaatatcgtatatttggccaaatcactgtagtgattatagttattctgggccattatcccatccttctaaaatagtggaatgtaaatgtgtttgcaccgaaggttttagtttcgttaccaatagcgtcccattgtccataacccgctttagcaggtgaagtaacagtaaactcaacagttaaaccatattttttatatgtttcaaaattatggttctgataatccagatgaataatatcaacatactgaggagttgcaggtgattgagtaacttgttgaaccacttttccaactgcttctaattcttttaccttatcataccacctggtagctactgctgcaaagtcatcaccattcgcaattctaattggcaatccaagaatgtgaattattactgggtcgccaacagaaccgtcttctttaggttctaacgaaactacgcctgaaaaagtagcgcgtgtaatttgctgtgctggttgtggagatattccggtgtcattacaaataatagttccaatttctgctgactgtaatgacattaaatcattaatagcagcttcagtgtttggataccaaacacctaaatccatttgttcaaaggttaggctccctataggagccttatttcctaccgcaatattctgcgggtctacgcgatattctgaaaaggcagttaatcttgaattaactttagccccttcacgagttttagtttcaatcgtcattttaacctaccctaatccaacgataaacggtgattgttggctgaattttagtgatgtcatttggaactacaccgttgtttaccgcaacagtgtcttcacggtatttagaataacctggaccttgtgcgtctgggtctaattgacatccgccaataactacgctgccatgttcagggtctgaaattagaactttgtctcttgacattaactcaggaatgtgttcttttcctaatgtaaacgtcaaatctccaaccgttccacctgctgttaatgatggctgaccattttcgtttaagttattgttgttacgcgaaaaataaggatcagatgaatcattattccaaccagcagtaacacggccttgtgaataaagcttccacaccccaaatcccatatagtcagcagggtttgcgtggttgtgagcgttttcataaatcgtgccaatcggataaattacgtcaaaaaatgctgcaatattattgactttaatcataatatcgtcagcaaccggacgcatatttttctgattaggttcatcataatttgtgtattcaatgcgattttttagagttactaattgctcagcattcatatacacttggtcggtttctgccatgatatcgtcaatatccatagtagtaccgatgttattattgaaccaacggacggtaagaaggtctttatcttcaaacgcctcaccaaaaataatagcttcgacgttagtaccagttgagtcaaattccagtctatagtcttggttagaatttacccattgaccaccattgtttatacagtcttctgcatatccaccttccgcgccttcacaataaaataaaggaagacctgcagttccagcttcgagtaattcctttccgttcaatgaaatttcaagcgagttaggatttacccctacgcccggaagtacacccatgtcatccagagtgattctgcggagagtagtaaggttatctactatcattgacccaggaatcgtctgggatgtagtctgggctgaatctcgtatctggatagccaacttgttgtatgaagaccgataaacaccaattccatctaggaaggtttcaaatgttattacttccccttcaacacatggaacttttaaacgaatgtctttaccgtttaattctaccaattgacctgctactgttccaggagaaccgtaatcagcattggctttatccataacgctggtttcaccgtaatataaaatattaccacgacgatatacattaagcgagtcttcgttatattctacgccatcaaaaatgttaagaaagtcagtctgacccgcagcagcaataattgattttttcgctacagtacttaagttaccgttagttagcttatctaccgttttattttcaatatattcccagcggccaggggcgcaataaaccaattccaaatcttggaagttagtattgaaaattttaggagaagctgaaccttttaatgtatcgccttgagcaggaataactgtgattgggcttaatcgccaggttgaccaaacatcacgaagtttaataactttgttatagtcgttggctgtaccctttggaagctgaacgttaactcttgctgcctgggtattaatagcaaaggcctgaccaaacttagcatttaaagtagttccagtagggctagctttaaaagttttccatgcacctgctgcaaatggaactgaaccatcacctaactctgaatataaatcatcaaagttgttattaattttaagaccacctttacggaggtaatcaccagacccatcatctacagattggcctactatcaaattttgtttcattattgagatacccctacggtctgtgtagcaataactttaactgccaaacgtgcgtttccataagatgttgaagctgtgcatattaaatctttctgcgcgttaatagagtatgaaatagaatacatcttttcattttcagatgattcaccgcttcttaacactgcatattcagtgtcaaatactcttccgtttggcgctgatgaagtaatagtcgggtcaatcataagcatgacttcagatgattgccttttgatggtttgaccacctggatttgcgctgaagcttaataacaatttaacagtagagtaatcatcgttatatccaagccgaatattaataggagaacttgttaaattatatgtagcttctaacggtgaatatgtgctgccaaacatacttgaaattgaataatcccaaactgcagcaccgttagctttgacttcaacacaccacaattcaattctacatcttggcgtgttgataatcaactctcgcgatccatctttaaatgcatctgctacaccttcgccgtttgttgttatttttatggatctagcttttgatgctgagccattactatttacaacgaatacagcttctcccgctttaccttttgaaagacgaatttgaactgccccttctgagcaatcagcatctatgcatgaacccatcggaactgtaccggccgagttagcatcaccaaattttatcttttgataataacttgttgcgtggattttttggtttaaagctccaccaccggctgcaaataatcgttgatcagcgaaggcgttataaatggcgtcgaagttatcattaattttcacaccgccatcatacagaatgtcgccggtagaagcattaccaatctcaccgacgtcaattatttttttacccttatctgtatacataggttaacctcatatcaaagtatagtcttatttatataaaaatggggagccaaaggctccccataattaaaactcgaaaattaaatttaactcttctgtttggtccattgaacgtataataggttgtcgattttccatgtaaatcatttcacctgactgtctttcaagaccagaagcgctataccaacctttttcagccttaacgttaggagaatttggcattggcttaacttcaagcggattagttataattgacaactgcctaaacccagtatttcccggaagactaaactccggaaaataaattgcatcaaggtatgctttaaatctaatcgtattacacttcatacgatagattaggttaaagtcgttttgttgccaagttaagttgttttgaaatccccaacgagctggagattcttcaatctcttctggccaaggaactacgatatattcatttgtacatctgttaattgatacgtcggctggaatttcatatagatattcccaaagatatccatcgcccaaatcgacagtaccatttgcatcaccacgcccacgaggcgctgaaccggaaatagttgatggcgtccatttacccccaagcttaatacattcttctttgcttgtaagattaccaattgaacacattccattctttggaacatcaatacatctatataccatccatccaaatccagcatcagttctgttatatggcgcagagttagcaacaacgatatcgccgattaaaaatgtgcgtggattaggatatcttgtatctccccagtctcttcttggaacaacacagtcaagcatagatgattcaattttgactgcacccatcatatttgtccaaatatcaaccacaccgtcttcattatcggccgggtatggaggtgcaaacccaggttcagattcgttatctgaccacggagtgcttttaccaaatgaaacatacaacgtgttttggtccgttcccggaccaattgatttataaaatgtgtacatcttttcagttctaaacttagatgtaatgatagcacgataaatcgtgctacgcgttgaacttgctcttgttgaattactcatcaatttttacctgtgtcggattttcaggatcgcgaggattacctgcatcgtctttaagacgttggttaactaaatcgcgataattagcaaacgttactgctgattggtcaaacgtaggacttaacggcttacgtcgttgtccagggttttgtccagcgataacactattgttattttcttgattatagttagcaggtaacgggaaaggttcaccagcttgagcacgtgaagaatacctaggctcattggttattgggtctctttctattgtatcatctgaagcgataatagcaactctatcaggataaactgatggcagtcctgcatcccatttatagttcttgagtttatttatgatagtctcaacatgcttcatatttaagccactattgataaacattgtcagcaatgttataccaatgaaaccgaaacctaccggatgaacaaaccttaatacatcgtcgcggaaccgagaagtaggaagctgagacttaattttcataacatagtaagaacggctgcggtttatataatcaatgttattactcagcatatcctttccacgaacaccttgaactataataccctcaaagtccgtacgctctgatttaatttcctggccttcaatgaaccgtcctgataagttatgaatagtaatacgccataacagacgaccatcccggtattctctctcgatataagtcacattactacgaccggaagcagtataaatcgtacgaccaactaaatcgtcagaaatatttgtactttcaacaataatgtcatattcggtagtgttctttgactcaatatcgatttcgacgtcttcgttataaagaagtttaaacaggaacttatatgagtcttcaattcctttagtagcatagaaatcattcttgcgtgcttcaaagaaacggacgacagcgtcacgagcgtctttactcagataaatgttgcgtttataaacttctgaccacagatattcccatgcattttcttcgcgaggatatttgttcttaacaagattaacgagactgttgtaatgtgttccatttccatctgaaaggaattggagatagtacttacaaaagtgttcaaaattactatcttgtagcaagtaactatccggcatcattttagtaagatacggacgtaaatccgggtcacgcaagcctggagtatgttcaggagtccaatcttcttcacgggtttggttctgcagaaacgccttaaacattacatcagttggtttccagttaagcgttacctggtcacgaacacgataatcgaatgcataataacctatcagctttccatctggctcgtgaaacatgataccagaagcatactgcaaaaatccgttaaatgaaaccggagggcaataaaacgttgcgtcgcctttatcccacacttccgaaagaatacgctcggtagttccctgcgccgctgcatctattcttttctgataaagaatatcattataaatgacaactgcatggtcagctgtacttatccagcatctgttaccttcacgagccatccagacaaaccaaggctcagcataaaacctcatcggtccaggaacaaatgtttcccatcttgaaaattcatctgctcggaaactcatcatgtgataatgcttatcagagtgatactgaattgggttaacatttttaactgcggtagaaattagttctggatatttcgtctcaagctcaatatcctgagcgtactctgttgtcttaaaattggctgatgaaaagaatatttcctttccgtcagttgacatagaagtccataaatgctctatacgacgtttttcttcatcggtattaccaaatacacgcttccaagtatttgtgccttcctggtaaacatagacgcctttagttgcagaatccacaacgttccttgggtctgttgggtctaatcctaaggttttaacttccccggtaataagggcaaagattttgcccccaacggaatccattttaaagcatacagatttaggattgcctgttatatgagatacttccttttcaaataccttttcaccaaatgtcgggcttaaagggtcagtatctattggagcatcttttaatttaactttacggacagtgtcttttgcaacaacatacaaatagtcgtcattgcaggtaaacgcttcagcatatttggtaacgtcagcaggcaatgatgcatacgttccgaataactctacttcaaagccaagctttaactggtctcccaatttagcaaatgtaacttcgttatcgctaaacttaacttcattcgatgaccaacgtacgtcagatgatttccttccgtaaaagattttatcatatcctaaaacataagaagtagttttagattgataaattaccactctagaaaccggatttccgacacggtcattaaataactgaacgtattgccaattctgtcctttatcatttgatactttaaccatatgttggaatctttcaaacagatacaaaattccgtctatttctcccagcatagttctatttttatcaacacacactgcttcaataggtccctgaatttcatgatatccagattcacctacaacgaagttttcaatagctgataaatgagaatattcaggactaaactgaaaagactcagtcatcaaagatgccatcatggcagatgtgttgaagttaacatacgacatgttgtttaaagaaaacttctgtttaatgaattctttcactaaactgaattcttgcatatgctcaaatgtgtatgcgttttcttcaaaagtttggaactcttctgtttcaacccattcagacggctcaaaccctgctgacgtagtttgaacacgcattttataataagtaagcggttcaatacgattttgttcgaaccaatcattatccgcggtataacccagtgaagaccaactcaagttatcagcggggataacttcccccgctctgtttcgagtttcggccagttctacaaaatagtagaagtttgcaccaacgtcatcccaacgaatattgacctgattcgcagatagcttatgaattcgtaagctggtgacgaacggtgcaattgtcattgagtaataggctccaatttaatagttgtgtattgaggacgaaggtcattctcaaatacgataagtgttccatcgcgggcgaagacgatatcctgggtaggagtagaataaagctcaatactctggtcttcaaactgaagaggatcggctccaatagctccaaggctccagtaaatattatcaccataataatctacttcaccgattttgtaccaacgagttctttctccattagtagttctatcaaaatcgtcttcagtatatggctgaatatgagtattctctttaatatcacctggtttaaatggtccaatgaccatatttcctttaccatttttatctgggtcagttccaacgatattaactggatatgaatctgcagttggagtgacagtaaagaccaaatcaccagaacgtaacgtccgcggagtaatagtattatagtatttaatacctgcgctaggaagagtgaaatagttgacaatttcacgaaccatctgaatatcaacagaagaaccgatgattgaatggtcagtatcatcaatataggtcaataatttagatttactgaaatttttgttaaacatttcaacttcatcaacgtaatatctattaattgagtctataatttttgactgtaaccactgctcagattcttgtaacttattcagcgcataagaagctttaatattatgacgaatgaataagtaatctgggctcattaccgaaggagtaattggagcaagacagaaaggttttagataatcctgaatgtcttctcgttgaacagcagttaactgcaacccagattttggtttaattgcgataaatgcatatccgggtttgtcctgatcagtaaagcattgtactgcttgtacgatagaaccaaagcgtgaactaacgaatgattcatagtcagttttagacacgcatcgcatctgagattcgcgcttaatctgggcgagctcacgaatacgctcgatgtcttcaggttcaccaccgccatcagctccaacataatcaggagaatctgaccagttttcaatgattttgtttactacgatatattgcagagtatcagcatagctgaaatcagttgcgccattcgcagattcaccatcagtacgaatatattcaataactacctgcgcgcccttagtaggttttaatccaccaatgaaattactttcaagaactcctcctgctacagaggcttctgccacgccttcaccaaagaagaattcggtatttccgtcgacagtttcacgcatataataaattgttgaaatggatgaagcatgaaccattgacctgtctgtccagttagtccattcagcgccatcaacccacagcttaacctgcttacggtcaatcgactgatcacgaataacaataggtttcttcgggtcatatgacaattgagtacgaataatacgtccttgtgccaaattgacaataggaagatacctattaactccttctggtgctgaagtatctcttaaagcaataacattttcggtaacaacaaagttgtatgggtctactgatgaatctcgtgcatatgctaaaaacttggttccacgaggtatttttattgctggctctggatttggatgagttacctcaagcataatagatgcagtagccgctgatttggaacttggcaaatacccgttttgctgagctgcttgaacaacggaacttctcaagttagctgttccaataaagctttcgtataaagcagtattactaaattgctgtatgtaaagcgtgttatatgctaataaatctaatagcacatttaagcgcgaacccgcaaaatcaaaatcttggaactctttttgaccactaagccagttaataagctgatttttaatttcgtcgaatgttgctccagtaaatgcgtctgggatagcgtttgcagtacgcgttaactgataatttaaaggttctttaatagccattagtgtatgaatacctttgagcttgattgcgcgacagtgtcgccgcaagaaattggatcggccatttgaacagcttttttgcctgttacaaataccttggatgtgcgaggttgaacaactcctccatgcgtatcatgagggtcaaccgtcttggtgtgtggggtaattgagtcgccatcaactaataccgctattccaccagtgaatactttactttgtgtagcatttacttctgtcggaggatacgcactatgcccggcagttaagcatttattaaatgatagtccagccatttagttccccgcatatacataagcacgaagctggtcgccccatctactccagttgcctttaactgtttgagagtaaatcttttgctttttatgttctgttatgattggagcactagaacctccggatgaacctccagacgattcttctgtcactgtatatattatctcaactgtataggtaaatgtcttctctagtgttctgggggctttccacaggtataaatcagcagttttgggattaggtaaatcctcccacgctgaagcggacttcagctcatcgccttcacggtatttaagcacatcgtttccaaaagtaaaaactgagttataattacctttataataggtttcagacacagagatatcagatactggttgatagtcgataatatttattgattttaatgtttcgttggtagataattgagcagtaaagtactgctcaacgtattcaccttctattacttcgcgtaacgtggtattaataggaagtatatcagccatgattaacctacatcaattcgtgaaccatcaacagtgtattgaccttgggcgattgagctcatagaagccattgtctcagtccaagccccgccaacattccaattcacagtacctgctacttgccaagttaagttaccaccgacggttacgtcgtggttgccatctactttagtagtggcatcaccgttgacttggatatcagcatttccttcaacgactatcttaatgttacccttgacaaaaatagtaccatcgccttcaatagttttagtttcatttccacgtacataaagcgtgttatcgccatcaatttgctgtcgacgattatacatgttataataggtctcgttccctccaacgttaaccttcttatccccagagattaaaatatttccatcaccctgagtcatgtcatataaatcggctacagtttttctggtacggcgtccatcgggagctacttcttcgtatgaacctgttgggtgaacaatacgatagcgttcatagccaggtgtatcatcaaactcttggatatgacctgattctgtttccattgtgtgaacatatggatactgaccattatatgaagactcaggttctttgaaaagaattcttgaatcttccggagtccatgggtcttcaggattacctccagactttggttctacgtaagcagcagacaggttttttccttctggctttggagcaggaactccatatgattccatattacccgttagaataatcatggaaacacgagaagcacgaccttttgtctgattaaaccaaacagagtttcttgcttctgtataagcggttttccaatcaccaatgagcatggcatcaagcattttaccaaattttgctaaaccacctacacccatttgaaaactcatattttctaaagccatttgccttgatttgttgactttagcatatacaggtcctacacgtgaattcgttttaatatcagaaagcattttatcgcggtcttgcttaaataacgcgactgcttcgtccattgtaatgataccgggatttcccgtaacagtacgaccaacctgattagataaagttttattaatgacagacatatcacgtactttttgcgccatgataagatgcccaatacctatagtaggatatccttctgtgtcccaatagaccttcaatctaagaccttcatccctattaagcatatctgttattgtaattgcaggatttgggtcttcaggaatatcacttaagtcagcatcatcaggattaatgccaatgtctaaatttctgtcctgaatgatatttggtatagcactatacccagtttcatcgccttgaactagtgggttggtatctgacccgacctgtctaggatattggcctgtaggatcagaaaagccttccgtgtagtttggcttcgtttttctatgcgcagaatatgttcctattactagtcctgctgttttgaattcatcaagccataacccaaacactgatgttccttctaccattccggttatagatgagccaactccagaaatcccagctgagttggtaggctgaatcactgacatccagggaaggtcttcagtaggaagacctgttatagctccttgcaccttttcaaatgggtgaagcccataaacacgtactcgcactcttccttgtttcaacgggtcttgtctgtcttcaacaacaccggtaaaccatttcaacgaatcattcatttcaatcatacaacttctccaattgtggtctgggatttatatcgacctgattcatattcactgtcaggagccttttccatttctcgtataatatcagaaagaaatgcttcaatatcactaggattgataatgtttatttggcgcagtttttcattttctataatagagtcttcataaatgtcaacaccagctaaagccccagtatattgagggtactgatgattaaagtcccctttatcataccaaatgcctgaattttcaggatattgctcgaggttataataacgattgccgtttgcatccacgtgatagagtatttggtctccacctacatctgcatatttttgttgtgcaaattgatagcatgcatcctgggttttaatccaatctctaaacgggtcatatacgttattacacattaaaagaatccagtacaactgactatttccataaagaatatatgctaattcttctggtctaggagctccacttatgtaatatgtttgtaaaagatagttttctgctacagtgtcgaaatatttgcgataattacgaaatatgtcagcggttgggatagcttttgccttagcaccttttacggtctttgcagaataatctatcggactaaaaaatgagaagagcatagtttatcctcttataaatattaataacagtatttataaagttgtagtgtacatgacgagtggtttatgatattattaccctactaactacttaggagaatagcatgaattaccgtaaaatttatgaccaactaattgcaagaggcaaatcccgcaatttagaagggtacaaagaacggcatcacattgtgccacgatgcatgggtggaagtgatgataaagataaccttgtggacttaacagcagctgagcattatgtggcgcatcagcttttagctaagatttatccaaataatcataagttatcatatgcagttcatataatgtcttctaaattagcaggaagaaataacaaatcatatgaatggattcgcaaaagggtttctattgctaactctgccgtattaacaggaaagaagcgaagtccaaggtcaaaggagtggtcagctaaactgtctgcagctcttactggaaagtctcagacgctagaatcaaatgaaaagcgcagtatttctatgacaggtatttcaaaaagtgataccatgaagaaaaatatgtctactgcagccaaaaatagaactaaagagcaccaaactaaattaaatttagctaacaccggaaagaagagatcagaagaaacacgagcaaagcttagagctgtttcagaattgcagcctatagtaacatgtcctcactgtggtaaatcaggaaaacctcgtggaatgaagtgctggcattttgataaatgtaaggagaagcctaatggcttatagcggaaaatttttaccaaaaaacataagtaaatataagggggaccctcgtaagatcacatatcgatctacttgggagcaatttcatgatgcggtggttagataatcacccagacgtagtccaatggaattcagagtgcgtggtaattccatactttagtaatgcagatggaaagaaacgccggtatttcatggatttctgggctaagttttctaatggtcaacagttcttttttgaagttaagccaaagaaagaaactagacctccggtcaaacccacaaagttgacgacatcagcgaagaaacggtacattgatgaaatttacacttggtctgtaaacgttgataagtggaaagcagctcaagctactgccagtaaaatgggtatagaatttaggttaattaccgaagattcacttaaaaaattaggatggaaaggctgatggctatatttgaatttatcactgaagctgcagaatcgcctaaagctaaatcccgtagtgaaaatcaatgggtagcattaggagttgaatactctgctgctcgtaaaaaaggcatgacgtctaaatcattcgctgaaagcaaaggaataaatcctgctacgttcagtaaagcaatggctcgtcatgcatcaagaattaaaacggcaattaaagtagcagaaattgagaaaaaacctgctaacaaaatgaccaaacaagagcgtgctcttgtgatggtaaattcatttcgaagctctatcaaagataaaattcgtaatgaaggcgcagcagtaaacaataaatctgctaaatggtttgcagaaactataaagaaaaatatacgtggtcattctgtaaccaagcctcaacctggaaagctatatgcttacatgtatgacgctaagcacaaagacactcttccattctgggataaatttcctttgatagtttatcttggtcttggaaagcaaggtacaaccacattgatgtatgggttaaaccttcactacattccgccaaaggctcgtcagcagtttttagaagaacttcttaaacagtatgctaatacgccagtgatatctaataagaccagattaaagataaactggagccaagttaaaggatttgctggcgctgacaaaatgattaaagcatatattcctggtaatataaagggtgctttaattgagataaaaccggctgattgggcgaatgtagtcatgttaccactgcagcagttcatgtcgaaaggcaaacgctactctgctacttctgtatggaaatcataatgtctactggactgtttaatcaaactaacacaactaactttatattagaggtccctgatgggggcctcacccaagcgtttaaagctaatcttcaaacagctgtagttcctggaattcatattcctgctactgatactgtaggttcgcctcaaggcatgcatcgtgctaaattgcctgggtctacttttgagtttgacgctgttcctgttagatttttagtagatgaaaatcttgattcatgggtacaaatgtacaaatggatgttaagctgtcaaaactacattgaccgagacaagtctggatggaataacggcggtgaaggatttcctggtgcagttttaatgcatgttcttgataacgataaacatgatatagtattaactgtccgctacatcggaggttgggtgagtgatttatctgaaattgagtattctttaaccgaagaatccgacccagcaatggtatgtgtagcaactttgcagtacaaatacattgaagttgaaaaagatggtataataattactggtagaccttctgtcaatgatactcgcgaatcccagtatcaacagaaagttatgggaatgcatccttctatgaggtaataatttgaagcttttatttttgattggtaaaaaacgtagtggcaaagatacaactgctgactacattatggataactataacgcaacaaagcatcagttagcaggtccaattaaagatgcgttggctgatgcaatgcttactgagtggtatcgcgatacatcacgtcagtttcctcgcattactcggtcaatgattgaaggtattgattacgatcgtgagcaggatttaaatctgtctactaaagacgtgattcgtattatggcgaatgctattgaatatgtccatcatgatttgcctttacctggggtggtttatgatagcaagcgtaaaattcttgacggcgatacgatggaagtcatccgtcaagttgtaataaataaacctgttgagccatggtcaattcgtcgtctcatgcagacccttgggactgacattgtctgtgataagctcgatcgcatgtattgggtgaaacgattcactttggttatggctgatacttttggtgattatgattatttcattgtcccagatacccgccaagaccatgaacttgatgtagccagggcgatgggtgctacagttattcatgtagttcgtcctgagcaagaaggttctaaaaaagatactcacgtcacagagcgtggacttccgattcgcgaaggcgatatcgtaataactaacgacggttctctagaagaactttattcaaaaatcaacactatattaggaattcaaaaatgactactgaacaactgcaagcccaagtcgatactttgaaagttcgtgtatttgacctgtctgaaaccatccaaggtctgtccgctctgcgtgcacagtatgaagaagtactacagaaactgattgctgtgtccggcgttgaaatcagtgaagacggtcaggttaaacttgatgacctggttgcaaaaatcgaagcacagttcgcagaagaaactactgaagaagctgatgcctaatgaacttcagtgattttagcactggtctatatgtagctgctaaattctctgagaaaactcttgatgctattgaggaccttcagcgtgagttgaaggtccctaatcctgtacctcgtcataagattcatacgacgatatgctattcaagagttcatgttccatacgtttgcgcttcaggaagttttgaagttgctacatcaggtaaacttgaagtatgggacacgcaagacggacgtacactagttcttaaactagattcagaatacttaaaattccgtcaccaatatgcaagagctctgggagcaactcacgatttcccagattactcaccgcacattactctcagctacaatgtcggtccagctcacttcgagggtgaagttcaagtacctgtagtgcttgatagagagtaccaagagccactaaaactgaactggtcagaagatttgaaatagaaatttatttcacaaagttgtttacaaccggtcctagtggtgatactatagctccatcaaaaacaaactaacaaaacggaagcaacatgaaaacgtaccaagaatttattacagaagctaaaagacaggatgatgaactgccgattgttacaaaaaccgttgacgggacattagccgattttaaaaaagttcctagtgataaactttctaaattgactggcagcatcggtgaaaaagatggtaaggtaactttttcagcccgaggttctgctaatcttaaaaagcttttaaaagccgctggcgctgaataaagttgtttacaacgggttgtagtagtgatactataaccctatcaacttgaggagaataaaatgaaacgttgtgaattaattagaaatgttgcatcaacaatctgcatgggagcattaggttttggcattataggtgcagcctttatgtctcttcctgaaacagtatcagtgttaagtgttgcatttctaatgggtatcatttctttcataatggataaaatagcacatgaaaaagattaagcagtggttcatcaaaaactatgatttaaaccgtgaagaagtaactaagtatgattatgttactttgggtgtaggactaggtgcactactggcagcactgcattcatcactacttgctattgcagtgcttcttattttggctcactacagctggaaacgtaagtaatgtacgcacttttaacttggtctaattattatcctgctcctggctctgaccaaatcagaggtgtctactctacggtagaagaatgctatgaagccctccagggaacgtatcaagactattttgagatactgaattcccgatttgagaccgttgctaaaggttcaactgaagcatacaaagattaattgtgaggaaattgtgatgaatatcagagctgcgtttaatactttctatcaagagaattataagcttcttgcccatgaatactatgatgcacaaggcgttccaattcctaatgatttagttacgcctaagcatgtcaaaactgattctcttgacaatgaaatccagcctggtgatttggtatcatactattgcggcgggtcactttctgcagcaagcgttggtattttgctaggatttacgcctaaaggttatcgtgtggttccgttccatacaagtccaattcctgagcaccgggtattgctctctcatatggattcaccgcatagggtattcctggttaaatcaaagagctcaccgattgtgtaatatgctttaggttttctttgttattattaatctatcaactgctctgattaatttcagggcagtataaataaaaatatccattggggcgttagaccgtaggggtagcgggacagactgtaaatctgttgctcaaaaggctcgggtggttcgactccatcactccccaccaaatttagggatactagctcagttggttagagcaccggacttttaatccgggtgtccgaagttcaaatcttcggtgtcccaccaattcgggtcgttggctgagagggtaagcgacggactgttaatccgtgtcagaaatgactaggcaggttcgatacctgcacggcccgccaaatgaagaagtcagaagacgttctgataaatcgtcggcatagaattccctgtgtacgagttccctcaacgataactacgtgcttataatttcttacggcgttgaaagttcgctttcagggatacatcttagaacagagtgctaaacaagattcatctggtaccaaggtgatgagagttctgttcccctttgcttcggcatcgtgccagagtatctctgaaagcgaattatggacctatagtttagttggttaaaatactcccctgtcacgggagagagcacgggttcgatccccgttaggtccgccaaataagaacgtggcagttcttgaagatgagtttgagtcctgtaagataatgccgaggacgaagctgtttgttcccacggaataagctctatattcgtaagattatatctttagcgtgttctacatcaagctacttgttagtacttcaagaacccggataaatgcggggtaacttcagttggtagaatgttgggctcatatcccgacacgcgcaggttcgagtcctgcctccgcctcttttgtttactttatccgtaccatgtgatataattatcacatagttggtatggagaataatttatgtactatttgatttataaaataaccaataacgtaaatggtaaatattatgttggagcccataaaactgatgacatcaatgatggctacatgggttcaggtgtattaattaaaaaggcaattctaaaatacggaattgagaactttaccaaggaagttattcattattgtgaatcatctgaggagatgtatttaaaggaatctgaaatagttacaccagaatttttattaggaaacgtatataatttaaaacttggtggcgaaggtggatttgactatgttaactcaacatattggactccgtcaaaaatgaaagcaagaggaatacttggaggaaattcaaccagtaataaaattagaaatgattctaaatttaaactgaatttttcggataagattaaatctggaattacaccagatgcacgttcccgcattgcagacgcagttaaagctaatatagctaaaaatggaaatccgtttttaggtaaaacacactcttctgaaactaaacgaaaaatttctgataaactgaaactagctcaatccggttcaaaaaattcacaatttggcacaatgtggattaataatggaatagaagctaaaaagatttcaaaagattcccctataccagaaggatggtataaaggaagaaaattagtaaataaataattggactatagacaagcggttaagtcaccggcctttgactccggtatctctggttcgaatccagatagtccagccaaattaatattcattcaacgcgtctacaggggttgaactgatcattcttctcttaatttcgtatgaagtcctcatgatggatggagtgaatattgatgtggccgtagttcagttggtagaactcgagattgtgattctcgtagtcatgggttcaactcccatcggtcaccccaacaatgaaggaatggtggaaaaatacacggtccgcaaaacgctgtggctgtcgctaagcgaattgtgtctatatgacacttccttcaccaattaatggagagtagcgctagtggtagcaaaccggacttgaaatccgggccatcggaaacggtgagggttcaactcctttactctccgccaaatttatgaaagttaaacgctgcccatagcagtggtacatcaacaatcagatgattagctttccatgggagtatagctcatttggtagagctctcgaccgataatcgagcggtgactggttcgagtccagttactcccaccaaataacaggttcttagtataacggctattatgctgggctccaaacccagtgatgagggttcgattccttcagggcctgccaaatttgcatccatcgtataacggctattataggtgacttccactcacttgataagggttcgattccctttggatgctccaaattactccgtatagctcagtctggtagagcgctccatttgggatggagaggtcgaatgttcgagtcattctatggagaccaaattaacggtatgacacaatacaagatggcgtaagctgagtagcgggattgcagtctcgttcagatatgctatcgagtatgggtgatatattaaacacatggattctgcaaagtcaatgtgactcggttcgaggccgggcataccgtccaatcgcttgccattgagaattatattatgaaatattacggcttcaaaacatcccatttcgggaaagcatatcgtacagaaaacattgatagacgccgagcatattacgaatcactgcataaagcaggacgttctcgtgcacgacaagaaggccaaaaacaagcgaaggaaatagaatgaatatttttattggtgttgcgaataaagtaaatgctattacggtgaaattacaatggaatcgtccaactaattttgctttaggattatgtaaatctgaacgtgatttaatgcttcatgctgattttgcatatacttttgatgaacgcaaaggtatgtgggtctggattaaatgcagatacgaagcattaatcaaatatgagtacttcagtgagcgtgatattcaagaagttattgcttatcattctggctgtaaagtaagtaaactgcgtcaagttattccgtttactaatgcttcaaatgtagaagagctaattactgattttaaacgaatttatcaggcgaaatatgatgaaagattctaaaggtcgagacgtacaagttggcgatatcgttttctacggagaacgtacatataataaaggtggtcgtggttctatgcgctgcggtcgtattactgatattgcttcaggattggctaaagtagataacgactacgttgcaatgcgaagcaaatcattcgttaaggtttctcctatgttcgcaacaatgtgggaaaacggaacgattttcgagatttaatgctacaagaataacctgttattattactacatcaaaacaaacaaggaaaaagaatgaaacgtatcgcactgattgttgaccaagaagctatgttcgctgctaccggcaaattccatccggtgagtaaatttgttgctcgcagcgagaaaatcgttggtctggtagaaactgtcgcaggtgatgtaattgtttctattaaaacgtctgaaatttctccggtagttaaagtagcagttgaaaatgacttctgggaagtagctgattttatgtgtgagtaattctgcctagcaggtggatagcccgacaaggcgccctcttcggagggcttttataaaagtcataagatttctataaaggccctgtagctcaattggtagagcgttcccctcataagggattggttgcatgttcgagtctttgccagggtcaccaaattatcaactgaggaaattgaaatgcatattaaatttggacaagttattcctaaaggcttagcaatggcaattaccacttgggaaaatgatgccgatcggtattctacccaaatggtttatggcttagaaaaagaagagattaatcaagtaattcacgttcttgaatggttctcttctaatggtcgccgcggtgaataccttggaaataatgattacaaccatgaagcaattcttgaaaagcttcatactgaacagaagtatgtaactcctgaattttccaagaaattctttggtgttgatgttcctgcatatgattgctcagacgaagagtttgatgcttatttagataatcattattcttgttcaaatgaagttatgtatgctattcaggcttggctaggtaatccaattgaatatgactatgatttcatgcgagtatttgagaaagtagaaatctttgacattaaagaagaaattcgtattcctgatgctccggttgcattccatattggaattacgtataagcagaaagaaagcccattaaaagttgattggttgaaatacgtgaaggaaaagtaatggatattggttcaggtagttcatatccatcatgtgctttgagtaattttgctcctcataaatttatctatgatggcgtagaatgtgcctcaatggagggattcttgcagtccctcaaattttcttcgcctgaaatgcaagcacatgtatgtacattagttggtaaatcggctaagttcaaaggtaaaaagaaacggtggtggccaactcaaacactttattggaaaggtgttcctattcaccgtgcctcagaagcgtatcagaatttactaacaggagcatacgatgcacttagtaaaaatgaaggattcagaaaagctttggctgctacccggaatgctacgctcactcacagtatgggtaaaaataaaatttctgaaacgattttgactgaacgcgaattctgtaatcaactttatcgtttaagaaatgctataaataatcagtaatataattatcttgttcagtgttgaaatcggtagacatggtgacggacaccttttgagctcgcatattgcatcatatgctggcgacggtggtaaatcgctgacggaatcagtcgtgcaggttcaagtcctgcctgaacaatctcggggcatagctcagctggatagagcagcggacttctaatccgcaggtcgaaggttcgaatccttctgcctcgaccatttcgcatcgatggtggaactggtatacacaggagacttaaaatctcccgccgcgaggattgagggttcgaatccctctcggtgcaccaaattatgaagaatgtctcagtcgtgagaggatcaatggtgaaaagccatggtgttcctgctgcaagccttaagtggacagaacagccaacctagtgacgtaggtaattcttcaccaaatatgccgatttagctcagttggtagagcgcttcacttgtaatgaagatgccgcgggttcgactcctgcaatcggcaccaaattctggtatgtgatagctcaaataggtagagcgtgaggccctggtgctgaatggcttgtaggttcgattcctacccataccaaaaattaatgaggaaaatatgaaagtatatgctgtagtaaaaaataactggaactgtgaatatggctatgaagaatattctttgcctcttaagatttttcacactaaatccgaagcaacatcatatgcggaagaacttgaagcaaacgattcctattatcagtatctagttgaagaatacgatgtaatgtaattcgaagggaaacttgcgtataccctcgttgagtcgtcagatagaagagaatggttcgtccattgccgctagtcggttgttcactgtcgcaagcataacctcctgacgctatacttctttggatgagactgatgcctccgagtccaaagaaatgaatttcgcaggtcatctgccagtgggtgatgctgtcgattattagagccctgtcttcggacggggctttttagtataaatagtaatttaatcgacactaaggatttttttgcaatgaaatttaaagattttttaaccgaagaagagctttttgaagcagctcctggccgcatgactaaatcgaaatggcgtgacgctctggtattggttccacgtggtgaacgccatgattttagcaaatttgcggcttctgtggaaaagatttatggtattgggattagcgatcctaaagactatgctaaggtagcagctgcctttgaaagtttaggcggaaaggttactacacctgcacgtggagcttctccggcacaagcaccggccgcaaaaccggctccggttaaagcgaaacctaaaaatattcctggccttaaaattagtggagaccatggagacatcattggttcaggtgaactgtttaaagctatcgataaagctcttccgctagtaagagataatggtcctctttataaggcagttcaattctatttcgataatctgtggaagtatcgtgaatcccaaggtgctaaaccttctgcacgtgaaactcagcatatcggtgaagtgaaaacgcttttagctaaactgaatcatcaccttgttgaactcagtcgtcagacagaattatcgtacaatgtataataaaatgtaatcctacagccctagaattcatctagggcatttttgtatccccggctgtataaatccattctaacttccagaaagttcctccagatgccctaaaatttttgcacaaagttgtttacttcctctatcaactcggttactatagctccatcaaaacaaagcagagtaacggagaataaaatgtctaaattcaactttatccaaattgaacgtggttataacaattacggtactcctgatcgttatcgcgcgatttggattaaaggtgaacatgaacacgcagtgttcaacgtagcagaaactcgtgaactgaaagatttgattaagcatgttcgcaaagattggcctgctgttgaagagtactacgttcgagtttaccatgaagaagctgctaccgaaactgttcaaattaaattcgcaaaaactgctagtgctttaaccaaacgaattgaagcggtaattaactgctaataattttggggagttataatgaactccccacctactgaggaaatagtaatggatacagcaaatatagttccaaaaactcttgctgatatacgtcttgaagctaaaatagctatcgagcgcctaattaaggcaacagtagaagaaggcaaagaaactgttcttattctcgggttagagtcatacgttactgattacatcgagatattcgagcgcagcaaaaatgaacagggtctaatcattaaaccatatgtttatgattggattaatccgtacgaataaaaccaccataactattgaaaggaaataaaatgtctattctgaaaaaacttgttgaattcatccgttctaaattcggtacctttgttgcacagaacacttctgttgaagaccagtataccactgcggcaaatcgtattattgatgaaatcactaaactgcgtaccacgcatgttaaatcggtaaatgaagaaaagcgtctgctgaaacttgctgacgaaaaagaccaggcaggtgcttccaaagagcgcgaaattcgtcgcttgatggcagaaggtatgaatgtagaaacccatgctaaactgggtcttctgtatcgtcgtactgctaaggctttacgtgataaagctgccgaatataaagaaatgcgggcccaaattgaagaaaccgtagttaagcttgatgaccaacgtcttgatttggcagtgaaactcgaatacatccgtgagacccgtaatgcttctgctctgggtattacctctgctgatgacgtgattgaaatcgcggaactcgctaaagtagatgtacaagacatcatgatgaaagttgaaaccttcagcggtactcagcctggtattgaaaccaccactgctgatgtccaggaatatctggaaagtctgaagtaattttatcggggccttcgggcccctaacttggataataaaatgttatatgaatgcgctggagatattccaatggcaacacctcaaattaaagaattaattgcagcaggattcccaaaagaaatcactgatattcttgagaaatttgcttattctgatactcggcctgaaaattggaaaactcgctataacgggtataacaccacagttttaccgcgggctatcgttcttaaagactattccaagctgaaaaacttaatttctaatatttcgtctatttccgacggagttaagcttgtagatatctttgcacttcggtacggaatttattctttcaacgattctccatcaaatctaacatcagctcgtactaatgccgatggatattttacttctagctccacaacatatacagtagttatcgagattatctataataaaactagttatcgtctcggtattaatctggttaaatacgtgacatctcaggatgattatagcaattatttaaattactgtgttaatgaattaccaccaaaagtcatgggtatgtttgactctaacaacatggtaggcaaacaattaatcattgatgaatttatcaaatactgccgtgagagggtgcagaaatgagtaacttatatctgccaagtgaacctcccgtttataattatgtctataaatttgatcagattgattatgcccttgttcctggtattggtgcaactgtcggcgcaatgtgtacctttgccgcgattgatatcatgcatttaactgatattacaccggcagtgttattcggaattctgcttgcatggtggggaactagtttgctcatcatgggattaattgaatgttcccgatgggttaaatggtctcgcaataattataagcgtaaagctgaatggaaagaacagtgcaagaatttaactcttgaatggaaccgcaaaaagtcgtttgagtttattaaagaggtgagaagaaaatgaatgaatgtaaacctgacgggttttggaaccaagatgggctggcgccagcttttggaatcgtgacatggattttatattgtgcttttgtaattgttggagggacattctttggattgaacgtctcagagtttatgattatgcttttatttttaggtgttttcgcattcagcctcatgtggatgctaattatcgcgttgattaattgctgcacatttttagcttaccgtatgaaatacaagaagtggaaagaaaaagaagatttcaacacctggattaggagctgcagaaaatgattaaaacttgttatcgtggaatgattaaagatgatgatttcttgtatttcttcctatttctgcttatcctgttttccttctcaacatttgttggtgttgggatattctgggggttctacttcttttcaccagtatttggtgatacgctgtactatctaggttggatgtcaggggttggaacctggtttgcaatgcttgctcgttggttgcaattcgtttcccagcgacagcggggcgtatttgataagcccaaagtaaagaaagaaaaatctaaagatgattctcgtaatgaaactttatcctggattaaggagatgaaataatggctgttgcagtgcatgtaaaatttgaaaatggtgatactcgccttctgtgttacagcgataatgaatcactgagcggtatcgagatttcacttaaagaagaactgcttggtattaatggacctatctgtgatttctcggtagagggttcatataattgtgatggtgtactagagtctatggtctatactgccatggaagatattcttgaagaaagttggaatgaatgccaatgaaagagctcagtgcaggaatcttattctttaccgatgacaaacggcttttcatgggtcgtatgacaaatacatatgtccagggcagaggctctagatgggatattccgaaaggacatgttgagcctggtgaaacaccaaaagaagctgctattcgcgaatgccaggaagaaacagggtttactgggtttgaccaggacctcttatatgacctcggacgacatgattatgccagcaataaggatatccatttgtttggatatatgctccctgtgagcccagaagtgtttaagaattgctgttgcacagcttaccataaagatgaaaatggaatttctttcccggaaatcgacgcatttgctttaattaaaccttctcaatggaaatatgtgatgggaccaagtttgtataaaatcatgacacagatgtatagcacagcccagtgaggttactatggaagaagctgttgaattaggcattccacacatttataagcatgaactacgatttgttcgtgacggaagatggattagcatatttcatcctcgagataagttgtcacgtacactaatgaagtcacggtatgtcttcggtgacggcgagtatacaaaatcagcatattatatagcagaacagctatatccgggatttagtgaattgcccgaggacgatagaagagattatgtgtggtggaaaggtaaatggacaccatacgagaagtgtagccttgaattattcatagccaagtgcagggccaaataaatactcctataattaataggaggtccttatggatatttttggcatgctgcgtattgatgaaggatacgatagcaaaatttataaagataccgaagggtattggactattggtattggccacttactgactaaagacccgtcaaaatctttggctatttctaacctggacaagcttgtaggtcgttctactggtggccaaattacccaggctgaggcagaagtaatttttgcaaaggatgttgaaaaagcaattaagggcattgtggctaatgctacattaagcccggtatataatatattagatgatgttcgtagagcagctctaattaacatggtattccaaatgggtgtaggtggtgtcgctggattccctgcttccatgaagctcttagctgctaaaaaatgggatgctgctgccaaagaactggcaaattcacgttggtatcgtcagacacctaatcgtgctcgtcgtgtaattgaaactatgcggaccggaacttgggccgcttatcaaggaaaataaatgaaaacttatcaagaatttttaaatgaatcccgtttagcaacagttggcgtaatgactgaatctgttggaagtaatcttctgaaatttaaaaaaggtcagaagatgacagccacgctagaagatggtacagaaattgaaatggacgttgttggatataactacgtagtagacggcaagttatataataagagccatgctaagtttgattcattcgatgatttcacctcttctattgaagatgagtcttctcgcaaagcagtagcatctggcgatgcacgctccttaatggcatttggtcatgagcgtattaagtctaagcagaacaaacctggtgaagataactttgcattagtaggttatcagtctggcaaaacttctaacggttaccaacgtactgttaccatgtacatgcgtaatggtaaaattgcattcgtaaacgatcgcggcgctattcgttacgctaaatcaattaagtaagcaatttcctaataaagccgaacacgacctctcctcatgaacgtcgagtcctctgagtgaagtagcttttcctacctgtaataaggtcgagcccaagtgcggtaaggggtttacatagtgtgtcgatggattaaacatgtgccaaggaatggcccctttaactggaatctaaaatgaaacacttaactcccatttatttgaccctgatgcatgctttcagagacgctgcagacagacgattgaataatcccaactacagtttttatgaaccgtcttgccttatgcgagagtacggtacccttcgtctagacggtggaagacaaaccggaaagaccgcagccttatgccaattcgctaccgattggttgcttgaagatggttcggttataatcttatctactcgatacacacaatcatctgaactgatggaaggtattctacgagaatataattcatcgcatttaattaataaattaccggctaacgagatagctaaatcaattgttccgatgacaatcagggaatttctatccaatgattcctcttataagtttagaggaagaaagtttggaagagcattaattatcattgaagaaccaatgaaagttcccgatatgatgaagttctatgatatgtaccaggaagctatcagatggtctatgcctaatgataccttacctttatttttcgtgataggaatgcaatgatgacacagacagaaattgttgatatgattacagtaatggaaaatacaggattttccgatatgaagcaattaataacaatggttacggctggaaacctgcttgagtacaagcgctacaagtttctgtctggtccgtttaaaggtgcagaattcatttctaatgctcctaacacgaagtggatgaatcgctatcctaattttagaattgagtttatatctggcaagctcaaaggcgtgattagttcaagcttaatcacatatgaccaacgcattcaagagaaaacaatgcaatggctgaaattgttataaagtgtcctccacatttagttgaaagcttctgtgattggttcagtaattctggtgagcaagatttttatgaagctcatcagaatggaacttggaatgaagccacaaaacagtgggaagaagctacaacgtatataggcactcgtggatatggagttgatgagcctattgaaattgtagagtacgataaagaaactgatgaagaaatactttatgctaatgatgccagagaacgcttatggcgagaatctgaattagaagcagaagttattcgtcttaaagaagaattaaaaggaccaacgggttttgctacatggaaagacgctgctatttctgaacgtttagcacgggtaaaattaatgccagaaggtaaaatctcgtacttgcaggctgcatccaagttccattctactgagtggaatactatggacgtaattaccgcgtacatgcgtggttggaataaagaatctaattaagaggaaatatgaaagcatatcaaattcttgaaggtgaacttaaaggcaccatttacatcgaagatggtgatgacgcacgagtaatcgtttcaaaagttcttaaagaagatactattacggatgctgaaactttttatggctacaaggcgcgtgaagtagaaattgaataccagccaacggtaaaagttgaaggcggtcagcacctgaacgttaacgtgctgcgtcgcgaaaccctgctggacgcggttgagcatccggaaaaatatccgcagctgaccattcgtgtttccggctacgcggtacgcttcaactctctgactccggaacagcaacgcgacgttatcgctcgtactttcacagaggcactataatgtcaatcgaagatattaaaggatacaagccacataccaatgaaaaaattggtaaagtgaatgctatcaaagacgctgaaacccgtcttggtcttatctttactgctcttgaagaagaggcattaatcaactaccaagagtcagccaatgaacccaagcaggtactcgatgaagcatacgaacgtattgcccagattcgtacagcaaaacagaaactgaaggaagcttctatgtgggcttgccgggcagtgttctgtccagaagaaaaatattaaaaagtagtttactttccttacgggccatgatactatggccctacaaacaaaggagaatgaactatgtcaactaacccagaagtattcattcgcagaactaaactgcgtcgtaagtttgaggaagcttttcgctctttgaatttatctgttcgtgcccgggcgaaagccgagggtaaagagcctttcttcactaagtactctgatcatttgttggaccgtgctattcaacgtgaaattgatgaagagtatgtattctctgttctttccaaaattcctaatcatcttaaagaaattaatgaattcttagcaatgccttggcttccaattgacccaaaagacattgatgaaaacatcgagtataagccaatgcggttagaaattacggatggaaatctgtggctagggtttaccatggatattccaagaccaggaaaaggacctagtataaagtgtcgtatggcattcgttaatgataaacgtttgaaaggtaaaatcagcacaaaagttatacacattaattgaggtaaacatgaaaaaagcgcttatcggtctaatggccttatgttcaacggcctttgggtctgagccaactttcagtaatgttcaacttgacaacttacattacgcatataattttggtgagcaatatcaaaaatccggaaaggaaaaatctccgcataaccgatatgataataacggcttaggatatataatggctgctatatcatggaaagaatcttcggcaggagccaatttaaaagcaggaaaggggcatcattcttatggggtatttcaaaattacttgcctacggttaaagccagagctaaattagaaggcaaaaaccttagtgattctgaaataagaaaaatgcttaaatctagacagaattccgcggaatgggcatatattgagctttcatattggttaaatatacataacggcaatatgcgaaaagctcttgctagttataatgcaggatggaatgtcaaaaggggaaactcttatgcgtcagatgtcctagagaaagctaatttcttaaagaaacataaaatgctacatataaaggtggaataatggtaaagtacgccgcgcttcttggattggtactggcattctctgctaatgctgaaaattcaatgacagattcacttcgtatcgctaaaacattttgcaatacgaactctgaatgtgttgatatattagcgcttgaattagattcagcattcagcgatggagtaaaagattcacgtagcccggcccagtggacaacactaataaatcgtaaggctaagagcatgaaagatttatgtgtcaatgctcctaacgaaaatatatgtttaatgtatcgtgaccaattaatggctcgttatatgtcaggactatcatcaaaatgaaaaaagcagctattttattatgctgcgcattttcagttaatgcctgggaaaagctcccaggctatcctgaacctgtactagcggcgcaggggactaaaatagaaagcaacggtccattcaagaacaatattgaaatagcatttgtgcctagcagtagaaaattgctaatgtcattttataattaccaagataaagatgaccaggtaatagttccacttgtcgaatataatgctcgcggatgtggaatgcagagcgatggcgtttctattgacggagtaatgcatcctaaagaacaaggagtgctgaaccctatccttaattgtaacaatgctatatttttaagagtatacaataatcttaatgaatatgcaacatataaaattccataggtgaataaatgattactggatatattaagggtaatattgtagaattattcatgaagcatgaatgcgatattgctcatggatgtaattgctttactacaatgggtgctggtgtagcaggacaacttgctaaagcatatcctccaattctcgatattgacatcgatgaagaccgttattatgacaataatttagccaagcttggaactcatactcgagccattcacaagaatggcactgcatattgctataatttgtatactcagtatgctccaggtccaaatgttgattacggcgcaatttttaatgcattccatgaactaaattctggtcgtattgtttataatcgtcctctatacattccaaagattggtgctggtattgctggcggtgattgggaactaattgagaaacttattaatttagcaacccctgatattgacattacagtggtagaatatgaagaggctaaaagctaaatacgtcttgttagaggtaaatagatgattactaaagagcaaaaaaataaactgtggcagttgattgacgattatgcaggtgccgagcaagtagtagctattagtgccatttacggaaatggtctaccagaagaatacgatgaactcattcgttctaagaatgctatttctgattttatggagacactttaatggcacagctttatttcaactacgcgagtatgaatgcaggcaaatcagctaaccttcttacagcagcccataactataaagaacgcggcatgggaactctcattctgaaacctgctattgatactcgggattcggcaacggaagttacttctcgtattggtcttcgtcatgaagctaatacagtagacgaatctattgatatccttgagtttttcaagtgggcacaaacacaacgtgatattcattgtgtatttgtagatgaagcacaattcttgactgctgaacatgttcttcagctatgtaaaatcgttgacttgtatgatgttccagtaatggcatatgggcttcgcactgattttcgcggcgagttattcgaaggttctaaagctcttctttctgtagccgataaacttgttgagctcaagggcgtttgccactgtggacgtaaggctacaatggtagctcgtattgacgaaaacggaaatgctattaccgatggtgaagtagtagaacttggtggtgaagacaaatacgtttctctttgtcgtaaacactggtgcgaactggtaggtgcttatgatgaagccaagaacgtataatactctcctgatgctagttttaagtatgctattcatttggatgggtgtagcagcatctattcaaagcgatagacgagaagaacttcaaaatcgtcttgattccgaatgtaaagtattggcacagggtaaagactttattgctaatatgaatgggtgttatattaaacatgagtagcttatttgctatagcgggtggtatagtactaggattcgtagttggattcttgctgtacgtaatattgctttcgttgatggtttaatatgaaaaaatatgtgatgtgctaccgttgtcttcatgtatatgattacaacactgctccaaagacagctaccaagcgtcttaaaaataaagaacctgaatgtcctaaatgtaaatgtaaggtcatctattcatgaatattaaattttttaaatcaggattttactatcgttgaggtactttaacttaacgaggtaataatgtctagaacaattcgccgtaaaggctggcatgtagtaaaatcttccaaatggaacgatcagaataataacgaatttgcttatattaaaagctataacgaatacgttaaaactcagaaagataaagaaacccaacagaaatatgttgaactgcgtatttctgaaaatcgggaaagaccgctagaggccaagaaactgattgctaaatcaaagcgcgatggattctggaaaactctacgttggacccgttatgctatgccgatcccacgtctatttcataaagccgaaattaaacgcgcattgaagtatgacgaagaatataactgggacgaagctggtgctagaaccattgagcaaggcatctgcgaatggctttgggattaagtaacacatacttatataaatactattactaactgatgaggtgtatatgcagcatttaagtgaaaagcaacttcgtaatcttactgtagaacaactggacgaacttcgtcgtgagattgggcatggtatttcgcaccttcaggaagaaattcgtcagcacagttcaaaagcagattatacccgtaaacgtaagctggacaaatacctcaaagaagttaaggctgtacttcagcacaaacgtaatactggacaaaaataataggaggccgtatggcctttaatcacatttgcttagccctggtgttgggctgcgggatttcactcccagctgcatcacacaacgacatttcggattataactcgtatgttgagggagctctacaagtttatgctaaatttaaggagcctagtaagcaagagtctgaacagttctattcttttatacaaagtaaatggaagagtgagtcttgttctaaagattgcgattctttaggacgttcagcaggtgaagaatatgctaaccgcatgaggatacaactcgataatgaaattcaatgattttgtaaaggacggtaaacttactccacaagatgaattcatcggtttacttatggcgtctcaggcgtattttcattcagcgcattttgataccaaatcgtatgccagacataaagcgtatgaagttttctttaacgagattccagatttgatagatgcttttggtgagcagtggttaggattctcaggtaagagttatacaccggctttaccatcgcagaaagagctgccaaaggacaccattgaaatgctagacctcattctggctaaggccgatggtatctacaagtcagttcctgccgccctccaaagtgttctggatgacattacaggtctatgctacaagactaagtatttgttatcattgcagtaataccctccgcctccttcgggaggcattttcttttcaaaaagttgtttacttcccttcattacatgatactatagacatatcaacaaccaaacgagaaaaacattatgattaagttaaccaccgagcttcaacctggaaaaatcttttatcacgtgtgtggtgttaatcgcacagaaactaaaagcggcgaaataacgcgttacattgttgcttcaggcacgtatgatgttgaactcggtcttcgcggtgtatattcgcgaaaatctcctttcttccgggtgatttgtgaatatgaaaactatgctggtcaaactgaaagttattcaactgagcgttctgctcatgatatgggcgtattcaagccaggtgaaaagcgttcggttcataatcttaatcgtgggttttggacgcgtgaagaagctgaacagttcattaaagaacttcaggaagacaagttcagcgatccagatgatcaagcatatgcagacagactgaccccttctgaagatttccgccgtcaacaagaatttatggattcttatcttgatagttgtgattatgattactacgactttgatgatggcgaagaatgagaaacgttttacttatcatctacattgtggtacaataccagcatccgatgtttacatataatttggtgcaaatgattctggagagtttgaaatgaatggatggggcccatcagatgacggatttgcaactcgcgaagctacaatagcagacgggattgaatgggcccgtcttcagaaacaactccaagaacagcgggaatccgaagagttctgtgttgattgtgatgaggaaatcccagtagctcgtcgtctgttggttaaaggctgtcaacggtgtgtagaatgtcaaggaaagtgggacattgtaatgacttctgcttataatcgtcgtggttcaaaagattcacaattgaggtaattatggaaagtattcttgatagtaccaatttagataatccgtacagtgatgtgcgtgtaaaggttgtgaattcatatttcactaaaaagttgagtcgtatcgtgctaaaacaaggcaatgatataattcatcttgatactaaacaaattgattcattaattcaattcttgatagaggcaaaagatggcgagtaaattagtatgggacggaaaatcccgtaaaggcgatgcagtaattgaagatgaaagcccgcatgttattgatttgtatcttacggtattccacacgtatgaacataatactatcatcgaaattgaacgtgacggagattgtgtagctattgataaaagcgacgctattgaactggtcaaatatcttgtaactatgattccaactatgaaggactgataatgaatattaataaaaactcttggcatttcaaaatgaacctgtggtttaaatctggcagcatgtggaaaatgccaaaaactctatgtggatacttctggacgacagttcttcatgttgtgttttcttcggcgattattacattcatcggttctgttgcatggatgttcggttggccgattgtggcggatacaggaattctcgcttggataggtattagtttatctgcgctttggttaaatgttatagcagtaccagttggcgcagtagttatagcagcatttgtgcttttatttgcagctatagcgtttggatttatttttggtttagaaaaatttaaacactaccgcaatcagaaacagtataccaaaaaacttgctcgagtaaaagctggtcttcctgcagaagccgaaccatcggtatttgtccagtatttaaaagcccgtaagcggaaagtctgcccaatgattgattatgtagaaggtgataaatgaaacgttttattcgcacgaaatttgaagaaagccttattgaaaaacccttaaaggttggtgataaagtagaaattgggtttgataaccaaagcaatcgatttgagcttgaagttgaatttatttctatcttcaaatgcagctcagcgcatacggtatcgattttctttaaaagtaaagacagcaaaatcgtagtatattacgattatggtagccgagaaacaactactgtagtatatcctaaagatggttaccgtggaatgtatatcgatgattacctaaaagagtcttcagatgatggattttatatctgtaaacttttacccggtggttccaagtcggtaattaatctcagcagccttaaatacacagtttatgagaagtgtaaagttaatgttcctcttgtagtgggtgataaattctctacaactaataactgctatgaagtactagcaattgcagcagatggaagcatgttttgccagaacgataaaggaaaagctcacgtgtttagtacaaatgacatctcgctcgttaaatctatgcttgatgttacagtaggtgaacctagtgaagaatgatcaagtttatattgtgaacggccttcgggccgtatttcgtgctaaaaccgaacgtggtataatttctacataccctattgccgaatttacttttgatgacggcgaaaaggttacggttaaatttattcctttgactggcaagtacagcggcaaagataacattgatttagacatacattatgagggcgggtcatggaaattgaaatcgtaactactaagaaaaaacttagtatgagcattgtgaaacagatgccgttagcttcagccgaaaacattaaattcgcaatgatggacccggaatcacgggtcctaggatatatcaatgcatttcgctggaacagacttgacattcaggtggcaatcattagcacaggaattgattgggcattagttcctatgtatgaaaccacactgcgtgaagaaacctgtcgtgaacagcatcctgatggacaagagtaccatacccacgaagtggtgtattattacaccagtcaaaaaattggtaatgtttaccgtacatcaaaaagaactacagataaaactcgagcagaagaagcagccaagcgttctaatgcattagttaaattcgctaaagggaatcatatttacttatgaaaacaatcgtaaaatcttattttggttcacatctgtatggtacttcaactcccgagtcagatgtggattttaaagaaatctttgtacctcatccgcgtgatattctaatgtgtcaggcgatgaaccacaccaatcgtaatactaacaacagcgcaaccaaaaataccaaagacgatattgaccatgagttgttcagcttaaagtatttcttcaagctcgctgctgacggtgaaactgtcgcgttggatatgctgcatactccaccggaattggtagttgcatctgaccttcctgaagtatggaaattcattcaagacaaccgagctcgtttctataccactgacatgaaggcttatcttggatatgtccgtaagcaagcaggtaagtatggcgttaagggttctcgtttagcagatttacataaagtcctggatgttatcagagatgttcctgaatggaaatatgacgatcgtcctcagcagaagggtatcaatgagcgttggaaagtacaggatatcgcagagaaacttcctctaggtgaattcctcaaatggaccaccttcgttgaccacaaatcaggcgagcagaagttttataacgttctgggtcgtaaattccagacgactatcactatcaaagagatgaagtattctcttgagaaacttgatgctgaatatggtgaacgtgctcgtaaggcagaagctaacgaaggcgttgactggaaagcactgagtcatgctcttcgtgcaggtctgcagcttcaggaaatctatatgactggtgaccttcaattccctctgacccatgctaaaatggtcaagatggtcaaagcaggtgagttaccgttcaaagaagtacaggagcttctcgagtctgtagtagatgaagtagaaattctagctcatactgctgaaaagaacggaatgcctaagaaagtagacatgaagttctgggacgatttcgtcgagaaggtttatcttgaaaaccacaattcttactacaaatgatacaatgaaggtcttcttgaattacggaagacctcataaaggtagacggtggtatttggaagcagtttgcagagagactggtcgtagagaaaatgctaaattctctgctcgaccaactcgaaaacaaatccaccgatttatgtcatgggccggagaagagctccggttctcactttattgggctgaaatatgattttactgtggagcgtagtagtgccaatcgttgttgcaataatttactttgtcgtgggttggtctgtctgtaagcatctaatcaaaaatggaaccatcgagaaagcaggagagtattggttttatctcatcttttggttccctgcgtttattgccggagcgattatcatgttcttccgctgggcaggtaaacttccaaaacgtatagcagaaaatgctatcaacaagcacgcataactgaggagccttcgggctcctctttttgtttcaaaagaatgaaaaaagtagtttacaagctcgcgagctggtgatactatagctccatcaaaacaaaacagagtaacggagaataaaatgtcaactatcaccatcaagaaagggatttacttcggcaaagagatttcaggtacttatgagttactcggtgagtggttcccggatagcttaagtgctgaagattctcgccagggtgatggtaaagtctttgttgaactgaatggcaaaaagcgcggtgtttgggtattcaaagatgatatcacaattgacggagtagctgctaaaattgaagttgttgaatccgttgatgaaatgaaagagcgtatcaagaaacgctttaacgtcatgggattaatgactaacggcttaatccacgggaatattcgttctctgattatctccggagcagcaggtatcggtaagacttactctttggataaagcattacaacatgctcatgatactaacgctattgattacaaatcagtgaacggcaaaatctcaggaattggtttatactgccgtctttgggaatcacgtgaagcaaattcagttcttctgattgatgatgtggatgtattctctgatatggatattttgaaccttctgaaagctgctttggattcaggggagaaacgtaaagtatgctggagcactgcatcttctttcttggaagataaaggaattcctaatgagtttgagtttgaaggtactgtggtctttatcactaacgttgatattgaccgtgaattagagcgcggttctaaacttgctccgcatcttcaagccttggtatcacgttcagtttatcttgaccttggtgttcacactaatgaagagattatggttcgtgttcaagatgtaataatgactacttctatgttacagaaccgtgggttaagaaattctgaagttattgaagttttggaatttatgaaagataacgtaaatcgtctgcgtaacgtatctctccgtactgctctttatattggtgatttcgtcgcgactgaccgtaaaaactggcgtgaaattgctgaagtaacaatgctgaaataattttaatgggaggagaaatcctccctaactgaggaaaatataatggctactttaatttctaatgatgtaaaacgtgttttgtttaaaggcggaatgtatatcgttgatactcctaaaggtgatacctcttcctggactattaacgagtggattaattacattgatgaaaatggagcgtgggtacaatgagtttagcagctattaaagatattgaatgttggttaaacgatattaaagtatatccgcctggtcatatctttgcaggtaaacccaagggtaaagcagagaaagcctgtgaagcaatctgtgaaaaactttataagtttaactttggcgataagaaaaatgtattagctgaagtccattcttcttatcatgaactacgtgtaatggtaaacgtatttcgtgctcctccgttcattgagctcaggaaagaatacgctaataaagtatttgatactttccttgcaaatgtgcaggatgcagtaaagcatttagacgaaatgcataaacaacaccaagatttaaatgcctattataagccttggcgtaaatcataccaagagcttaaaaaccgtattgaacttattcgttatgaggtgctaaaatgaaatgggtaatgacagaaagtgaagcctatgcagcgtatgtctctccagacgatcgccgtagtgagttgtttggttattatggttcatattgcgttgccgaagaagcagttaaggggcagtcttggtggggctcagatggtacagttaatcgtaagccaacggaactaattacattcaccgatgaaaatggcgaatcatggacttttcctaaaagcgctgctattagtgttcaggaagaaacacctgaagctaagcgtaaacggttggaaaaaattaaagaagccgctttggctaaattaaatcctgatgaacgcgaggcgctcggattatgaacaaagaatttagtactgctcgtatggtagatgcttttggatatccgtgcagcggatatcgtgaatttattcacccggaagttgaaaatcaatttaaagaagttgtaagaaatattttgctcaatgcatttaaaactcaaggaactaacccgagagatttaggcatttatcttgaagaagccatcagagacgtacaaaagagcgtatcggctaaacttcattgggctgaagaaaatattgcgtggtcaaacaagaaacgttctgatttaaattggcccgctgatcgtgaacaaatcgtcaattatgctaaggtgtaataatgttaaaaacctatgaagttaaatttaaacgctttattgatggcaaatgctatgacaataaagaacgttcaacccgaatttctgcgccgtcagcgtaccaagcagtatttcagcatgggcagaccaatggcgtggcattccctgagcaagacgttgaagatattatcttagatgttattgaggtaaaatgtgtttagtactatagtgtctatacatgcgtattacgaagggcagttaaatgctgcccgaaccaagtataaacgagggatggaggaatctgtggaaggtctcaaaggtattcagacacttgctcagaagacccagaacctcatcctgatggaccgtaaacagttattattggctgaagagctaaaagcctctaagatgcttatagaagacaataggaaacatcaagtgaaattgcttaagcagcgacagcaccagtcgccatggtttaacagtgatttccgatctttttaagggccttcgggcccttttgttgtttacatcttagaaaagccatgataagatagcttcgttaactaatgaggagattgaaatgaaagcacctacttggaacgaacttcaagaaatgttcaatactgaagaagcttttggaactatttctgaaatggttgagaatttagtagattctccttcagaagataatcttctgtgtttagcacagttcatcattgaaacctacatcgagaatcagaaatgacagtatacgtagatgtcttgatgaatcatggttggaaaatgagaggtcatcaagtaaagaactgtcatatgtttagcgacaaccttgatgagttacacgctatggcagaagccatcggaatgaaacgttcttggttccaggataagcgagttccacactatgatttgcgcgatgttcgtcgcaagcaagcagttgctctaggagcagtagaagtatctcgtagagatgcagttctgctttggagaaaatttttcacaaagtagtttactttcggcgaggctgttgataagatggtctcgtcaaccaaactggagaataaaatgaaaactttaaccgagattatctctgcacttgttgaagaaaatcgtgtagcccgccaagcacaccgagcgaaagttgaaaaacgcgccgaggagttgaatgctggatgggcgaagacccgtttcggtcgtgaatactttgataaagttgtagctcctacttggggcaaagatgatcgtcctcatgctccctttgatggttatctttgggaaaatgaattaggtgaagttgaagcttatcacgcaggcagttacttgccgtatgttacagaatttgattcactggataagcctgagtatacaggtgaccacggttggtggaaactccgcttaactcaagaagagtataaagaacttcgtgagtatggttatcctcttgaagtacgcgttccatataaagagtggaaattgcaagacggaacggatgttgttatggcagaagttagagcccataagagcatcttagaggctatccaggaacattcaaaagaggtctttgataatatattcaatgagctgaataagaataaaggggatgcaccagaaggacgagtgactgtctccggtaccgtaacgtcagtaaaagtttatgaagactattacggcgtacaatgtaagatgatggttgtacttgagaatggagctacggtttacggctcccttccaaaaagtattccgtttgaatacagaggcaaagtacagtttactgctacatttgaattagcgaaagatgataaaactcatgctttctataagcgcccaagcaaagttataatgcttgaggaataattgttgtataatgggttcagggagattttgagatactctttgagcccagtccaaaatagaggaaaagataatgaataagaatgaattaaagatgtttgtagccggtgaatttgataagcataatggaaagggcttgtcaaagcgtgagaagcacgtaaaggttttggcagctttacatgatttaaatccagctgcttataacgtagcaattgctggtaacgtagctcgtcgtgtgctaaatagcatggcagcacacgaagcaaactatgtcagttttgttgtagaaaacattcgtcgttctcgctggttaggtgcaatgtcagcagagaaacagctcaaaaagtttgctatcggcaatgctaaaatttatggtcagcgttatagctttgcggcaggggcgtttaaaactgaagaaagacacgaccgcagcgctgcccaaatcttctgctctgaatttaatgcaaacctgcgtcgtattcttaatcgttcaatttgcttacttaaaggcgatgaccgtgtgaaataccaggtatcttctactagttctagaaatcctaagggtgtttcatttattcgtgccgaagaacttgacaatgtaactgtacgaattcatattaacagccatttgtccagcggaaagtatccggcccgggcgcttttagcgcaagttcgtactgctttagaccatatggatgtagttaaaaaatcatgctgtaaacagcagggtgaaaactcatctgttcttgaagtacatttggacccatttaagatttttcctaaaacattgagcacacaggttattgatgaagatgtagcgcatatgtatctcaatgttgttaagcctcttccgttaacaccagtaaatcatgttgaaattgccaaaaacagtattacagctgaaatggaatcagttaagcggtttattgatacaaaagaagctgaattaagtaagcatgaattgatgatggcggatttagtcaaatcgcttaatgagtacaaagagcggtatgaatctctcgagtatgcccggagcttactgtgaaaaatcaattaaaagaagacatggtcgttgatgataacgaccttgaaattgagtttgagtatccacctgtacctgaatttaaaattgattgggatgcctgtcttgaaatggtagaccgtcgagaagctgcagctaaacaagttgtgccttgtgaaaaatgtggtagtattcaagtacagcttgttgattggacaaccgatattctgaaaatgaaatgccggacttgtaagcataaatttgagagaaaattaaaatgattactaaaactattactggtgctaatactaagttttttgtcgagtatgctaataacctcataaaagacaaaaactttgataacatcattgcagatatgattcttgacgcatacgaaagtggcatcgaccctatgcagcttaaagaatatcttcgagcgacaatggattttacagttcttaacatgatgcttagaactgatactgaattcaatgaaatgattgctcgtcgtaatgaaggcaagttcaatttgactgatgacgaagtattagcgtgtgctgctcacgaagcttggaagaaggtgattaaatgaaaaccactggcgcgctttggaaagaattttataacgatgaagccttctgggaaggctattatcatgatgacactttaatactctttgatgatgttgaagtagaagaatatgaagacccttcgcctgatgcggtagtaaaaattgaaagcggatatgtttacaaaaccgatgatttcttcacttcccatgatttgagtcttgccactttctttaaacgttggaaaaagaaacagaccgctcgcactattgtagtcaccgttgataaagataactttgacgaagtatttgaaactatctctaatattcctggagtgaaaaaggtaaaatgattgacattaaattagatacacatgcagtacgacagttatttccagaaggtacagaagctcgtgcccagcttcagcagtcggtaatcaataacatcgttaaagaaatggtgttaaaagattcccagaataaactaaaacaagcagtacaatctgaagttaatattgcaacagtaactattccagatgtacgagctgaagttaagaaacagcttcagcagatgttccatactcgtggttggaatgatatgtctgctaaagaagaaatgtcacagatgatgcgtaacgctgcccaatcatgcgctaaaaatgctattgatgatatggttcgtcaaactattgatgacgctgttaagcaagctgaaggccgtattaagatgtctattgaaagagctaatctccgaattcaagaaatcattgttaatgcaatgaataagaatttcgctgatcaaattaacgctgccattgctgctaaattggcagaacacttcccggtaactgctaatggataaaattgattttagcaaattaaatattcctcgcatgggaattcctgatgatattgccaagcaattagctagcgttcaaccaatgccagataattgcatcaaagatattctcgatgcgttagatggtaaaacattagttataaccactaaggctgaaaatggctcgtaaacgatatatggaagaagccgaacgagtaatgctactcatgtattcggtttattataatgagactggtcaaatagttgatagttctaaactcaaaggagctatgactcgtggaagaaattttgcccaagctgcaattgatggcgaagtaatgaagcgtcttggtatgacaaattacgttaaagcagtatgccatccagattggaaccaagttcaagctcaagtatttaaggaaatagaagaagatgttcacggtttttggttacgacagcaacattcataagtgtgtgttttgcgataatgcaaagcgtctgctcgatgttaagaaacaagagtatgcattcatcaatgtaatgccagaaaaaggtgtatttgatgaagtagttatcagtgatttgcttcgtcgtctaggtcgcgaatcgcaggttggattaactatgcctcagatttttgctcctgatggcacacatatcggcggttttgatgaactccgtaaattcaaattcaatgcatgattatcgcggaaccctccttcgggagggtgatattgtagctctttattacggctatggcggattagaaaccggtgaaattaagcagattaagaatcaccgagcaaaggtagaggtaacttactctaatggagttaaggttatgtctaaatggaaatacggcgagtgtatggtgaaattatgaaatacccaattgagtttgtttttcctgaaggcgaccaagtagatttagaacgtaatcttcgtaaagcaatgattgaaagagctatatctgatccgcagtatgctttcatgcaccaatggggtgaattctttgtaaagcaaggaaatatcattcatggtgttcagtggagttatattggtcttgaagttgattacgatgctggtaatccattagggtcttggcgttgggaagatgaagagctcggaccagattttgaagttgattgttcttggcatgaggaagagttatgagttatgatattgatgatttaaaaactccacgaatggtaacagttccagctgaagagattgatcgtctccatgctattgaagaactgttatgggaaattgaatgctcacttccatctggtttagaaagctggattgacgatgaagacttacaaaaactgcgaggctaaaatgactaacgctgaattgcttaaagaaatcaaacatattgctggtgtcactggcgaatgggacgacaactatgatttcgaatatccaccgaacggtgatgatgaagaggaagaaatctttgttttagtagaagatggagattggacacaggaccataagtatcaaagccgttctcagatttggtattatccagcacgcggcgtccatttcatggtatcagagtctcgttcaggttcatatcataccgattggtattataatcctcctgaagtagatatcgtcactcgtcacgagaaagtagttactcgtactgaagttgaatggcgtattgaatacgattctgttaatgattccgctccggcaccatgcaaagcagcaaaggcataaaaccttggtatgcggctcggtgggaaactgtcgagccagaggaagatgctattcctgaagaagattataatacttctgaacctaccattaacgaactacttgattatgaggacaaagtgaatggaacttattggtaagcagtttgaagttatagaaaatgatgatgaattaactgaacaatttccccagtttgttcctggatttaaatttcaggttatcaatgcagttaatgaagatgaccttgaaacatgtggcattacagcagtaattgatttgctcacaaataaaatcatcacaattaatgacccaactccacacggcgaatcttggttctggtgtttctacagcgaagatacgatgcaccaaattaaagaaattggtcaaggtgaagatgttcctctgatttctgaaattaaacttaaccatttccaaggcgcaatcgttccaattaccagagctctttatgcctttgctggacaggaaaattgtgattcagaagagtatgatttaatgcaaaaagctgcggattacattgtcgcacttgaacaacgtcttggagttcgccatgtctaaatcgtgcattactaaaactattacagtaaaaattctcgatttcgctgatattcatcgtgttacaagagaaattttacgcagtcattggtatgaagttggcgatgtagtagaatttagtggaggctattacgacgatgacatcaatggaatggcttggactaaaatgagtcttcttcatgaagaaactaattcatatattgagttcaatgcggatgattatgaaggcatctatgctttctgtacttctttctgcataaaagagtctaatcataacatctatagtagttactcgttaatttaactataaatactcttatctaatcgctgaggtaagagtatgttattaaccggtaagttatataaagaagaaaaagaaaaactatatcaggcacagaacggattatgtccttgctgcaaacgtcctttagatgaggatattcaaaagaatcacctcgaccatgaccatgcgttagaaggtgacaatgcaggaaaggtcagaggcttgctctgtaacctgtgtaatgcggcagaaggccaaatgaagcataagttcaaccgctctggtttaaaaggtcaagatattgactacctcgaatggttagagaatttgctggtctatctccgccagaatcgtaaagacagtaatattcacccgcaatatgttgccgatatggctaaacgcttttcacgtcttggtaagcctgagatgattgctgaaatggaattgcatgggtttacatacgaggaaagtgatggaaaatcacaacttgcttcaaaatacaagaagcagcttcgtaagagtttaaaatgaatatcgaattagaaatccagggacttattaataaaaccaacaaggaccttttaaacgagaatgctaacaaagattctcgtgtttttcctacccaacgtgacctgatggctggtatcgtatctaaacatatcgccaatcaggtcattcctgcctctgtaatggaagcacacaaagaaggtgttatccattttcatgatatggactacagtccagctttgcctttcaccaactgctgtttggtagatttgaagggtatgttgcagaatggctttaaacttggtaacgctcaaattgaaactcctaagagtattggagtagctactgctatcatggcgcaaatcactgcacaagtagcatctcaccaatatggtggaactacgtttgctaacgtcgatttagtattggctccttatgtagagaagacattcgctaaacacgtacgtgatgctcgcaaatatcaagtagcattagtaaaagattatgctatttcaaaaacagaaaaagacgtgtttgatgctttccaggcatatgaatatgaagtgaatactttgttcagttcaaacggccaaactccatttgtgactatcacatttggtatgggcacgtcatgggaagaaaaattaattcaacgagctattcttgataatcgtattcgtggattaggacgtgatggaattactccaatctttccaaagcttgtgatgtttgtagaagaaggcattaatctacgtaaagaagacccgaactatgatattaagcagcttgcattagaatgcgcagctaaacgcatgtatcctgatatcatcagtgctcgaaataatagagcaattaccggttcagaaactcctgtatctccaatgggctgtagaagtttccttggtgcttggagagactcttctggcaaacccgttcttgatggccgtaataatctaggggtagtaacactgaacctccctaggatagctctggatgcaaattataaaagttcggatgacagtaataaactgttcaaactattggatgaacgccttgatatttgtaaagaagcccttttaactagaattaaatcccttgaaggcgttactgcatcagttgctcctattctttaccaggaaggtgcttttggtgtgcgtatgaaacctgatgatgaaattcttgagctattcaaaaatggacgtagttcaatttcattaggatatattggcattcacgaatttgatatgcttacttttaaaggaagcggtaaactcgtcctgaagtacatcaacactaagctaaacaagtggacggaagaaaccggctatgcctttagtctgtactcaactccggctgaaagtctgtgctatcgtttctgtaagattgaccaagccaagtttggcgatgtaaagggcgtaactgataaaggctggtacactaatagcttccatgtgtcagtagaagaaaacctgtcaccttttgaaaagattgaccgtgaagcaccatatcattccattgctaaaggtggtcatatttcttatgttgaacttcctgacatgaagcgcaaccttgaaggtcttgaagcggtatgggactatgctatcgagaagttggattattttggtgttaacatgccagtagataaatgtctttcctgtggttctactcatgagatgacacctactgaaaacggattcacgtgttcaatttgtggtgaaactgatccaaagaaaatgaatacaatccgtaggacttgtggctatcttggtaatccttctgagcgtgggttcaatcttggtaagaacaaagaaattatgcatagggtaaaacatgttagagaaaccaatgaagcaagttgattggaaccaacttagcgaatggggattgatttggaaaatcaacaaagaggttctgcacccgcttggaattgctataacccgtgaccccgaaagtggattatcggctggggctattcaaactgatgagccctggaaatatgatgcagaagtagaagcacgtaatgaggtaaggttcaatgaatttcgacagaatctacccttctgactttgtgaatggccctggatgcagggtcgttctttttgtcaccgggtgtttgcataaatgcgaagggtgttataataaatctacttggaatgctagaaatggccagttattcactatgaatactgttaaagagcttgcatcccatttaagcaaatcgtatattcaaggtcttaccttaaccggtggagacccgctttatccacagaatcgggaagagatttcaaatttagtttcttgggttaaagcaagatttccggagaaagatatctggatgtggacaggatataagtttgaagatatcaaagatttagatttgctacaacacatcgatgttataattgatgggaaatatgagaaatcactgccaactactaaaaactggcgtggttctgacaaccaaagactctgggtaagaaatggttctacctggacacacgattgaggaaatagatatgctgacttacaaaattatgtttaccctgaaccacatggctactgaactgtttggaccggaatttctggctatgacagcgttcatctttactatttaaggaaaattatgaaattcattaatgctattcgtaaatttatttctaacgttatcgctttggttgcattaacggcaggtgctttcgtagcaattccgttcattgtccttattatcatcgcagattggattaatcctaccaagaaagatgaaaagttatctaatgaagaatttcagaaacgagttaacactctgactgctaaactccaacaggtcatgaaatgatagaaatctatggcatccctgaagaagtttggagatgccctggatgtaaagcagttcgtgacttgctcgataagctgcaatttccgtatgagttctataacgtaatcaacgaggttgacggtcaaccggtttatgaccgtccgttgattgagtcacttgctaaacgcatcgggtgctatccatcgcttgctattcggtatcctgtcatttttatagataacgttaagcagtatgacattccaacattcaaaaccaatcttattgctgctgggcatgacccagatatcatagaagattaaccggttcctttctaaggtcatcttgaccaccttatgtatatttctatacccttcatttagaggttcctatgggacctctcttttatttttaaattcctttcacaaagttgtttacaagctagttgatgagtgatactatagccctatcaacggataacagcataccgtttaactcgagaggaaaatatgaactggttaaattggcaagaagctctagaagctatgagtaaaggctgtaaagtaaagcatgtgcattttactgatgacgaatacttcttgatgaagaacaaagtcatctgtgacgaaaatggatatgatatgactcgctggtacaagggtgagtcttggcaaaacgaacattggtacatcgcatgaaaacttttgctgtaggtgatatcgtccgtaccagaatttgggatgggcttcaatttgaagtggttgtctacgttggttcagatggggttctacttcaccgaattaacaatctgattaagtggcacctagaacgcttcgtgaaataccatgaattcaatagctaccactgtactgtagctccggttgctagtaaagaatactacgatatgctcgaagagttaaaatctctcaaagattgatttgctacaggagatttgatttaaaatctcctctgtcaaaacaatcgttactgaggaaattaatatgtcccaagcaatcaaaaacgtactgaactcttttgcttatgataaagtatctgcaatgctggaagaaggacgttgtgtaactccgtctttgcttgatcagtgggaagttgagcttcacggtacgatgaaagaagaaggtcaaaaaatcggtaaagcccgcatccgtgaattagtggttgcttatcttctgtctgaatttggtattaaagcctttggtgtagaaccaatcacgccgggtatcggtgaaatttctgaaagcactattcgtaagatgaagaatcaacgtaagaaaggcttccgcgatgttaaagcggttaaggcagcgaaatgatttcatatatcgtgtgcgcatctattcctaccggtgtatggcatagaaggattaagtatatccgggctcattctgagcctgacattagtcaagctaaacggatactcgcaaatcaatgggatgaagatactagcgtaattatcagagtatttccaattgattcatccactctagacagccaacttccgtctccgtcagagatgtggcaagaaggtttaaatgagcaagaacttgaggaatatcttgatgcgtaaagttattctatacacagaaatttttaccagccgttgggtgtttgacagcgtcagaatttcaaacgcttcaaaagaagatgttcgtaacgctcaacgattagcatacgatgaagctggaaaatcaccagcatttgtaaaaattgagtatatcattactgattctgctttaattcatactgtatcagaatcagtattaaagaagttctgtgttgatcgcatcaataaaggaacttcaatggaatattttctattagcgagagaactgaaatggtagaagaacaaattgcagaaatcggtttactcggatggttcgtgtctaaaactaaagacggcagaaacttgattgaaactccagaaggagaattcattattgaagatgattttgatgcattctgggtctatgaacgttctggcgagaatgaatatacttctgtggatgcattctctaaatttgaagatgctatcgatacggtgaagaaatggctgaaatagataatatctcaatcactgttgaaggtatgggtgaattcgtaatagattcttacatgggcgtgtggttctccaacgaattaatgtactgggaaactcatgcttctatgctgaatgaaaaacattatgaaagtctgtacacttcattcttaaacatgatgcatgaagaagatgaatccgaatactttgaaatcagtttaattgagttcaaacgtattatggaaaaacttttccagtgctatcgtatcatgaaaggtgacctatgaaaattcagttaactcttactcacgaaatattgaatggcgtattctatctggaaaaggaccaaataacattcgtgcaggaaggcaagtactggtacgctgatgtagatgacattccagacatcggaatggaacgtgtcttcgaagattttgaatgctcggtcaatgtttctgctgagtttacatataacgatttctatcgtatcatgatgaaattaattgcatgcgctgaattgattaagtaatgctttaatcctctcgcttcccaaatttgatataatagatattattaattgaagcgaagaggcaatatgagtaattatgtaaataacaaggaactgtataaatcaatctgtgcatggaaagagaagtgccgggagtctgaagctgctggcggccctcgagtagtaaaacagaacgatacgatcggccttgctattatgctgatcgcggaaggtctgagtaagcgtttcaacttttcaggatacacccaatcctggaagcaagaaatgatttcagacgggattgaagccgcaattaaaggcttaatcaacttcgatgaaactaagtatgataacccgcatgcgtatataacccaagcttgtttcaatgcattcgttcagcgtatcaaaaaagaacgcaaagaaatggcaaagaaatacagctattttgtccataacgtgtatgattcacgggacgatgatatggttgcgttagcagatgaaacctttattcaggacatctacgataaaatgacgcagtatgaatccaccgcttataaggcgccagggtctgctaaaaagagcgaacctacaagcgatggacctaatctggaatttttatatgaggctgaagattaacctcgacgggtttttagaagatgtgcaagacctagacgctatcccttatttgctaaagatgtatttaagggaggtgcttgatcttgatattcacattgacccgaaaaatccacatgacgctgatttcaggtcagattctgctataattgaacatagttataattggactgatactgaattcacatttgaaataaattaccatccaaaggaataacatgaacaatattacccaggaagagcgcgacgagctgcaacagaaactaatggaagcggcagaagaacaagctattgctcgagccaacaaagttgttcgtaaaaaccgtcgtgaacttgagcgattacgagctcatgctggagacgcggtattagacaataatttccctgcttacaagtatgctattgaaaaactgcgtactattttaaaacaaccttttaatgatgagattattctgacttgttggaatacctctcgtaaatctgtttgggacattctaaatgctggtacaagtaaaatttaaacgtgttcgtaaagacgcaggatttactttaaacactgcgactggtacgatggcagtaaaggtagcagataatcaatatcgcgtgttaggctctaccgaaggatgtaagctaattgataagaactctcttgtctgggttgacaccttccaagttaaacggtggtatgaatggtaaatgaagagaactggggattcattgatttagatgaacaccctgattttattactagtgaagagaattgggatgtatgacgaatttgatgggttctaatcctggacatgattggccggaaggaaattacacgtgccggtgcagtaattgttcagaacgttatacaggaccaaagcgtagttacttctgttataaatgtgatactgctcggagagaagcacctgctcccgattatgaagcgattcataatgctaaggtagatatgcttagacgctttgaagaagctaagcgtatatgtgaagcagtgggttatgttgtatacaagaaaatttaaagggcttcggcccttttgctttattacgggaatggtaaaatatccaaaattaacaacaaaggtcaatatatgaagattaatattttaatggctcgcggacttgagggatgcggcgtaaccaagttcagtctcgagcaccgtgagtggttagtaaaacatggccatgaagtaaatatcatttacgctaaagataaagcgtttactcgtaatagagcacatagctataaagatgtaactattcctgtgtctcttgcagatgactatgataagactttatctctgcttaacgcatgtgacattcttatcattaactcagtacctgctatcaatgctccagaagcagcgattgataactataagaagctcatagagaacattaaacctgaagttagggtagtcgtatatcaacatgaccatagagcattgtcacttcgtagaaatgctggtcttgaagaaaccgttaagcgtgctgatgtactgtttagtcatagctcaaacggcgattttaataccgtgctaatggaagaatattttccaagcggcgggttgagtttctttgatgattctgactcagctcctccggtttataactttcaacctgctatgaacatcaaagcaattcgtgataagtattggaaagacttctctgctattgattttgatattcatcgttggattggtcgtactactacgtggaaaggctatttcttgatgtttgactttcatgaaagtcatctgcgccccgcaggcaaaacgactatcttggaagggttagaacgcagtcctgcatttattaacatcaaagaacgctatgaaattgattattgccgtcattatcatcaggttaaaactggaccaggtctgaatcctcaagttcttgaccgatatgttaactctgaaatgcttgagcgtatgtctcagtctggatttggttatcagctgtcacgtcttccagataaattccttgagcgttcgctggaatacacgcatttagaactaggcgcttgtggaactattcctgtgttccataaagctactggtgatgctttgaaattccgggttgatggaaagccgttgacttctcatgattctggcattctgtggttgaatgatgaaaataaaaatgaagtctttgaacgaatgaaacatctgtcatctgaccagaagctctatgataaagagcgaaataaagcatttgaattcctggtagaacaccaagattctgagcattgctttaaagaacaatttgagttaatgacaaaataagtaatgggccttcgggccctttttgctattcatggaataatataaaattaaactctactagagaggttatatgaaaattattcactcaggcgattggcatttaggtgtccgcgcagatgacccgtgggtacaggatgtacaacgacacggaattaagcagcatattgattatgccaaaaagcatggaattaaaactatcattcaatacggtgatatttttgacgttcgtaaagctatcactcataagacaatggaattcgctcgtgaaattgcggagtctcttgagaaagaaggaattaacttaattacgatcgtcggaaatcatgatatgcactacaagaatacgttgacgcctaatgcatcaacagaagttcttggtaagtataagcatattactgttattgaaaagcccgtgactatggattttgatgggactttgattgacttgtgtccatggatgtgtgaagagaacacgtcagaaatcatgaagcatatcaaagaatcgtctgctgaatactgtattggtcactgggagcttaatggcttttatttttataaaggaatgaagtctcatgggctggaaccagatttcctcaaaaagtacaaacaagtatggtctgggcacttccacaccatatcaagcgcagcaaacgttaagtacatcggaacgccttggacgcttacagcgggtgacgagaacgacccacgtggcttctgggttcaagacactgaattatcaacctttgatttcgtccctaatgaaatcacttggcatagaaaactgatttatcctgttactggaaaaattgactttgaagagtttcgtaatctcgcagtacgcattattatcactgcggtcgatgaagaccttcctaagtttgaatcagaacttgaaaaggtagtacatgaattaagaactgtttctaaagttgacaactcggttgagtctgaagatggcgaagaagtagaagttaaaagcttattggatttaatggaagaatatatccaagcacttgaagacctatccgcagatgatatcaaagccttaaaggttatgtctaaacagttatacattgaggcacaaaatcagtgaagacttttaaactaaatcgtgtcaagtataagaatataatgtcagttggccaagcggccattgacattcaacttgataaatgccaaaagaccttaatcacaggtaagaatggtggtggcaaaagtactatgcttgaagctattacttttgccttatttggtaaaccgttccgtgatattaagaaaggtcaattaattaactccttcaataagaaggactctgtagtagaactgtggatggagtatgacggtcatagtttctacattaaacgtgggcaaaaaccgagtgtctttgagattttacgagatggcaataagcttgatgaagccgcaagttcaaaggattttcaatcctactttgaaagtctcatcggcatgtcatacacatcgtttaagcagattgtcgtattaggaacggcaggatatactccgttcatggggttatcaactgctaatagacgaaagctcgttgaagatttgcttgaagtgtctcttttggctgatatggacaaactgaacaagacacagataagagaaatcaatcagcaaatccaggttaatgatgttcagcgtgaagcattgactaatgaaattaaaactcatcatgagtatgcagaaaagcagaagaaactttctggtgataacgtagctcgcctgcaggcgatgtatgatgagcaggtgaaagaggcacgaggatataaagcagaattagaaactcttcaaagc

SEQ ID NO: 18 - DNA, 167537 bp, unidentified
  source 1..167537: mol_type = genomic DNA
atggattctggaaaactctacgttggacccgttatgctatgccgatcccacgtctatttcataaagccgaaattaaacgcgcattgaagtatgacgaagaatataactgggacgaagctggtgctagaaccattgagcaaggcatctgcgaatggctttgggattaagtaacacatacttatataaatactattactaactgatgaggtgtatatgcagcatttaagtgaaaagcaacttcgtaatcttactgtagaacaactggacgaacttcgtcgtgagattgggcatggtatttcgcaccttcaggaagaaattcgtcagcacagttcaaaagcagattatacccgtaaacgtaagctggacaaatacctcaaagaagttaaggctgtacttcagcacaaacgtaatactggacaaaaataataggaggccgtatggcctttaatcacatttgcttagccctggtgttgggctgcgggatttcactcccagctgcatcacacaacgacatttcggattataactcgtatgttgagggagctctacaagtttatgctaaatttaaggagcctagtaagcaagagtctgaacagttctattcttttatacaaagtaaatggaagagtgagtcttgttctaaagattgcgattctttaggacgttcagcaggtgaagaatatgctaaccgcatgaggatacaactcgataatgaaattcaatgattttgtaaaggacggtaaacttactccacaagatgaattcatcggtttacttatggcgtctcaggcgtattttcattcagcgcattttgataccaaatcgtatgccagacataaagcgtatgaagttttctttaacgagattccagatttgatagatgcttttggtgagcagtggttaggattctcaggtaagagttatacaccggctttaccatcgcagaaagagctgccaaaggacaccattgaaatgctagacctcattctggctaaggccgatggtatctacaagtcagttcctgccgccctccaaagtgttctggatgacattacaggtctatgctacaagactaagtatttgttatcattgcagtaataccctccgcctccttcgggaggcattttcttttcaaaaagttgtttacttcccttcattacatgatactatagacatatcaacaaccaaacgagaaaaacattatgattaagttaaccaccgagcttcaacctggaaaaatcttttatcacgtgtgtggtgttaatcgcacagaaactaaaagcggcgaaataacgcgttacattgttgcttcaggcacgtatgatgttgaactcggtcttcgcggtgtatattcgcgaaaatctcctttcttccgggtgatttgtgaatatgaaaactatgctggtcaaactgaaagttattcaactgagcgttctgctcatgatatgggcgtattcaagccaggtgaaaagcgttcggttcataatcttaatcgtgggttttggacgcgtgaagaagctgaacagttcattaaagaacttcaggaagacaagttcagcgatccagatgatcaagcatatgcagacagactgaccccttctgaagatttccgccgtcaacaagaatttatggattcttatcttgatagttgtgattatgattactacgactttgatgatggcgaagaatgagaaacgttttacttatcatctacattgtggtacaataccagcatccgatgtttacatataatttggtgcaaatgattctggagagtttgaaatgaatggatggggcccatcagatgacggatttgcaactcgcgaagctacaatagcagacgggattgaatgggcccgtcttcagaaacaactccaagaacagcgggaatccgaagagttctgtgttgattgtgatgaggaaatcccagtagctcgtcgtctgttggttaaaggctgtcaacggtgtgtagaatgtcaaggaaagtgggacattgtaatgacttctgcttataatcgtcgtggttcaaaagattcacaattgaggtaattatggaaagtattcttgatagtaccaatttagataatccgtacagtgatgtgcgtgtaaaggttgtgaattcatatttcactaaaaagttgagtcgtatcgtgctaaaacaaggcaatgatataattcatcttgatactaaacaaattgattcattaattcaattcttgatagaggcaaaagatggcgagtaaattagtatgggacggaaaatcccgtaaaggcgatgcagtaattgaagatgaaagcccgcatgttattgatttgtatcttacggtattccacacgtatgaacataatactatcatcgaaattgaacgtgacggagattgtgtagctattgataaaagcgacgctattgaactggtcaaatatcttgtaactatgattccaactatgaaggactgataatgaatattaataaaaactcttggcatttcaaaatgaacctgtggtttaaatctggcagcatgtggaaaatgccaaaaactctatgtggatacttctggacgacagttcttcatgttgtgttttcttcggcgattattacattcatcggttctgttgcatggatgttcggttggccgattgtggcggatacaggaattctcgcttggataggtattagtttatctgcgctttggttaaatgttatagcagtaccagttggcgcagtagttatagcagcatttgtgcttttatttgcagctatagcgtttggatttatttttggtttagaaaaatttaaacactaccgcaatcagaaacagtataccaaaaaacttgctcgagtaaaagctggtcttcctgcagaagccgaaccatcggtatttgtccagtatttaaaagcccgtaagcggaaagtctgcccaatgattgattatgtagaaggtgataaatgaaacgttttattcgcacgaaatttgaagaaagccttattgaaaaacccttaaaggttggtgataaagtagaaattgggtttgataaccaaagcaatcgatttgagcttgaagttgaatttatttctatcttcaaatgcagctcagcgcatacggtatcgattttctttaaaagtaaagacagcaaaatcgtagtatattacgattatggtagccgagaaacaactactgtagtatatcctaaagatggttaccgtggaatgtatatcgatgattacctaaaagagtcttcagatgatggattttatatctgtaaacttttacccggtggttccaagtcggtaattaatctcagcagccttaaatacacagtttatgagaagtgtaaagttaatgttcctcttgtagtgggtgataaattctctacaactaataactgctatgaagtactagcaattgcagcagatggaagcatgttttgccagaacgataaaggaaaagctcacgtgtttagtacaaatgacatctcgctcgttaaatctatgcttgatgttacagtaggtgaacctagtgaagaatgatcaagtttatattgtgaacggccttcgggccgtatttcgtgctaaaaccgaacgtggtataatttctacataccctattgccgaatttacttttgatgacggcgaaaaggttacggttaaatttattcctttgactggcaagtacagcggcaaagataacattgatttagacatacattatgagggcgggtcatggaaattgaaatcgtaactactaagaaaaaacttagtatgagcattgtgaaacagatgccgttagcttcagccgaaaacattaaattcgcaatgatggacccggaatcacgggtcctaggatatatcaatgcatttcgctggaacagacttgacattcaggtggcaatcattagcacaggaattgattgggcattagttcctatgtatgaaaccacactgcgtgaagaaacctgtcgtgaacagcatcctgatggacaagagtaccatacccacgaagtggtgtattattacaccagtcaaaaaattggtaatgtttaccgtacatcaaaaagaactacagataaaactcgagcagaagaagcagccaagcgttctaatgcattagttaaattcgctaaagggaatcatatttacttatgaaaacaatcgtaaaatcttattttggttcacatctgtatggtacttcaactcccgagtcagatgtggattttaaagaaatctttgtacctcatccgcgtgatattctaatgtgtcaggcgatgaaccacaccaatcgtaatactaacaacagcgcaaccaaaaataccaaagacgatattgaccatgagttgttcagcttaaagtatttcttcaagctcgctgctgacggtgaaactgtcgcgttggatatgctgcatactccaccggaattggtagttgcatctgaccttcctgaagtatggaaattcattcaagacaaccgagctcgtttctataccactgacatgaaggcttatcttggatatgtccgtaagcaagcaggtaagtatggcgttaagggttctcgtttagcagatttacataaagtcctggatgttatcagagatgttcctgaatggaaatatgacgatcgtcctcagcagaagggtatcaatgagcgttggaaagtacaggatatcgcagagaaacttcctctaggtgaattcctcaaatggaccaccttcgttgaccacaaatcaggcgagcagaagttttataacgttctgggtcgtaaattccagacgactatcactatcaaagagatgaagtattctcttgagaaacttgatgctgaatatggtgaacgtgctcgtaaggcagaagctaacgaaggcgttgactggaaagcactgagtcatgctcttcgtgcaggtctgcagcttcaggaaatctatatgactggtgaccttcaattccctctgacccatgctaaaatggtcaagatggtcaaagcaggtgagttaccgttcaaagaagtacaggagcttctcgagtctgtagtagatgaagtagaaattctagctcatactgctgaaaagaacggaatgcctaagaaagtagacatgaagttctgggacgatttcgtcgagaaggtttatcttgaaaaccacaattcttactacaaatgatacaatgaaggtcttcttgaattacggaagacctcataaaggtagacggtggtatttggaagcagtttgcagagagactggtcgtagagaaaatgctaaattctctgctcgaccaactcgaaaacaaatccaccgatttatgtcatgggccggagaagagctccggttctcactttattgggctgaaatatgattttactgtggagcgtagtagtgccaatcgttgttgcaataatttactttgtcgtgggttggtctgtctgtaagcatctaatcaaaaatggaaccatcgagaaagcaggagagtattggttttatctcatcttttggttccctgcgtttattgccggagcgattatcatgttcttccgctgggcaggtaaacttccaaaacgtatagcagaaaatgctatcaacaagcacgcataactgaggagccttcgggctcctctttttgtttcaaaagaatgaaaaaagtagtttacaagctcgcgagctggtgatactatagctccatcaaaacaaaacagagtaacggagaataaaatgtcaactatcaccatcaagaaagggatttacttcggcaaagagatttcaggtacttatgagttactcggtgagtggttcccggatagcttaagtgctgaagattctcgccagggtgatggtaaagtctttgttgaactgaatggcaaaaagcgcggtgtttgggtattcaaagatgatatcacaattgacggagtagctgctaaaattgaagttgttgaatccgttgatgaaatgaaagagcgtatcaagaaacgctttaacgtcatgggattaatgactaacggcttaatccacgggaatattcgttctctgattatctccggagcagcaggtatcggtaagacttactctttggataaagcattacaacatgctcatgatactaacgctattgattacaaatcagtgaacggcaaaatctcaggaattggtttatactgccgtctttgggaatcacgtgaagcaaattcagttcttctgattgatgatgtggatgtattctctgatatggatattttgaaccttctgaaagctgctttggattcaggggagaaacgtaaagtatgctggagcactgcatcttctttcttggaagataaaggaattcctaatgagtttgagtttgaaggtactgtggtctttatcactaacgttgatattgaccgtgaattagagcgcggttctaaacttgctccgcatcttcaagccttggtatcacgttcagtttatcttgaccttggtgttcacactaatgaagagattatggttcgtgttcaagatgtaataatgactacttctatgttacagaaccgtgggttaagaaattctgaagttattgaagttttggaatttatgaaagataacgtaaatcgtctgcgtaacgtatctctccgtactgctctttatattggtgatttcgtcgcgactgaccgtaaaaactggcgtgaaattgctgaagtaacaatgctgaaataattttaatgggaggagaaatcctccctaactgaggaaaatataatggctactttaatttctaatgatgtaaaacgtgttttgtttaaaggcggaatgtatatcgttgatactcctaaaggtgatacctcttcctggactattaacgagtggattaattacattgatgaaaatggagcgtgggtacaatgagtttagcagctattaaagatattgaatgttggttaaacgatattaaagtatatccgcctggtcatatctttgcaggtaaacccaagggtaaagcagagaaagcctgtgaagcaatctgtgaaaaactttataagtttaactttggcgataagaaaaatgtattagctgaagtccattcttcttatcatgaactacgtgtaatggtaaacgtatttcgtgctcctccgttcattgagctcaggaaagaatacgctaataaagtatttgatactttccttgcaaatgtgcaggatgcagtaaagcatttagacgaaatgcataaacaacaccaagatttaaatgcctattataagccttggcgtaaatcataccaagagcttaaaaaccgtattgaacttattcgttatgaggtgctaaaatgaaatgggtaatgacagaaagtgaagcctatgcagcgtatgtctctccagacgatcgccgtagtgagttgtttggttattatggttcatattgcgttgccgaagaagcagttaaggggcagtcttggtggggctcagatggtacagttaatcgtaagccaacggaactaattacattcaccgatgaaaatggcgaatcatggacttttcctaaaagcgctgctattagtgttcaggaagaaacacctgaagctaagcgtaaacggttggaaaaaattaaagaagccgctttggctaaattaaatcctgatgaacgcgaggcgctcggattatgaacaaagaatttagtactgctcgtatggtagatgcttttggatatccgtgcagcggatatcgtgaatttattcacccggaagttgaaaatcaatttaaagaagttgtaagaaatattttgctcaatgcatttaaaactcaaggaactaacccgagagatttaggcatttatcttgaagaagccatcagagacgtacaaaagagcgtatcggctaaacttcattgggctgaagaaaatattgcgtggtcaaacaagaaacgttctgatttaaattggcccgctgatcgtgaacaaatcgtcaattatgctaaggtgtaataatgttaaaaacctatgaagttaaatttaaacgctttattgatggcaaatgctatgacaataaagaacgttcaacccgaatttctgcgccgtcagcgtaccaagcagtatttcagcatgggcagaccaatggcgtggcattccctgagcaagacgttgaagatattatcttagatgttattgaggtaaaatgtgtttagtactatagtgtctatacatgcgtattacgaagggcagttaaatgctgcccgaaccaagtataaacgagggatggaggaatctgtggaaggtctcaaaggtattcagacacttgctcagaagacccagaacctcatcctgatggaccgtaaacagttattattggctgaagagctaaaagcctctaagatgcttatagaagacaataggaaacatcaagtgaaattgcttaagcagcgacagcaccagtcgccatggtttaacagtgatttccgatctttttaagggccttcgggcccttttgttgtttacatcttagaaaagccatgataagatagcttcgttaactaatgaggagattgaaatgaaagcacctacttggaacgaacttcaagaaatgttcaatactgaagaagcttttggaactatttctgaaatggttgagaatttagtagattctccttcagaagataatcttctgtgtttagcacagttcatcattgaaacctacatcgagaatcagaaatgacagtatacgtagatgtcttgatgaatcatggttggaaaatgagaggtcatcaagtaaagaactgtcatatgtttagcgacaaccttgatgagttacacgctatggcagaagccatcggaatgaaacgttcttggttccaggataagcgagttccacactatgatttgcgcgatgttcgtcgcaagcaagcagttgctctaggagcagtagaagtatctcgtagagatgcagttctgctttggagaaaatttttcacaaagtagtttactttcggcgaggctgttgataagatggtctcgtcaaccaaactggagaataaaatgaaaactttaaccgagattatctctgcacttgttgaagaaaatcgtgtagcccgccaagcacaccgagcgaaagttgaaaaacgcgccgaggagttgaatgctggatgggcgaagacccgtttcggtcgtgaatactttgataaagttgtagctcctacttggggcaaagatgatcgtcctcatgctccctttgatggttatctttgggaaaatgaattaggtgaagttgaagcttatcacgcaggcagttacttgccgtatgttacagaatttgattcactggataagcctgagtatacaggtgaccacggttggtggaaactccgcttaactcaagaagagtataaagaacttcgtgagtatggttatcctcttgaagtacgcgttccatataaagagtggaaattgcaagacggaacggatgttgttatggcagaagttagagcccataagagcatcttagaggctatccaggaacattcaaaagaggtctttgataatatattcaatgagctgaataagaataaaggggatgcaccagaaggacgagtgactgtctccggtaccgtaacgtcagtaaaagtttatgaagactattacggcgtacaatgtaagatgatggttgtacttgagaatggagctacggtttacggctcccttccaaaaagtattccgtttgaatacagaggcaaagtacagtttactgctacatttgaattagcgaaagatgataaaactcatgctttctataagcgcccaagcaaagttataatgcttgaggaataattgttgtataatgggttcagggagattttgagatactctttgagcccagtccaaaatagaggaaaagataatgaataagaatgaattaaagatgtttgtagccggtgaatttgataagcataatggaaagggcttgtcaaagcgtgagaagcacgtaaaggttttggcagctttacatgatttaaatccagctgcttataacgtagcaattgctggtaacgtagctcgtcgtgtgctaaatagcatggcagcacacgaagcaaactatgtcagttttgttgtagaaaacattcgtcgttctcgctggttaggtgcaatgtcagcagagaaacagctcaaaaagtttgctatcggcaatgctaaaatttatggtcagcgttatagctttgcggcaggggcgtttaaaactgaagaaagacacgaccgcagcgctgcccaaatcttctgctctgaatttaatgcaaacctgcgtcgtattcttaatcgttcaatttgcttacttaaaggcgatgaccgtgtgaaataccaggtatcttctactagttctagaaatcctaagggtgtttcatttattcgtgccgaagaacttgacaatgtaactgtacgaattcatattaacagccatttgtccagcggaaagtatccggcccgggcgcttttagcgcaagttcgtactgctttagaccatatggatgtagttaaaaaatcatgctgtaaacagcagggtgaaaactcatctgttcttgaagtacatttggacccatttaagatttttcctaaaacattgagcacacaggttattgatgaagatgtagcgcatatgtatctcaatgttgttaagcctcttccgttaacaccagtaaatcatgttgaaattgccaaaaacagtattacagctgaaatggaatcagttaagcggtttattgatacaaaagaagctgaattaagtaagcatgaattgatgatggcggatttagtcaaatcgcttaatgagtacaaagagcggtatgaatctctcgagtatgcccggagcttactgtgaaaaatcaattaaaagaagacatggtcgttgatgataacgaccttgaaattgagtttgagtatccacctgtacctgaatttaaaattgattgggatgcctgtcttgaaatggtagaccgtcgagaagctgcagctaaacaagttgtgccttgtgaaaaatgtggtagtattcaagtacagcttgttgattggacaaccgatattctgaaaatgaaatgccggacttgtaagcataaatttgagagaaaattaaaatgattactaaaactattactggtgctaatactaagttttttgtcgagtatgctaataacctcataaaagacaaaaactttgataacatcattgcagatatgattcttgacgcatacgaaagtggcatcgaccctatgcagcttaaagaatatcttcgagcgacaatggattttacagttcttaacatgatgcttagaactgatactgaattcaatgaaatgattgctcgtcgtaatgaaggcaagttcaatttgactgatgacgaagtattagcgtgtgctgctcacgaagcttggaagaaggtgattaaatgaaaaccactggcgcgctttggaaagaattttataacgatgaagccttctgggaaggctattatcatgatgacactttaatactctttgatgatgttgaagtagaagaatatgaagacccttcgcctgatgcggtagtaaaaattgaaagcggatatgtttacaaaaccgatgatttcttcacttcccatgatttgagtcttgccactttctttaaacgttggaaaaagaaacagaccgctcgcactattgtagtcaccgttgataaagataactttgacgaagtatttgaaactatctctaatattcctggagtgaaaaaggtaaaatgattgacattaaattagatacacatgcagtacgacagttatttccagaaggtacagaagctcgtgcccagcttcagcagtcggtaatcaataacatcgttaaagaaatggtgttaaaagattcccagaataaactaaaacaagcagtacaatctgaagttaatattgcaacagtaactattccagatgtacgagctgaagttaagaaacagcttcagcagatgttccatactcgtggttggaatgatatgtctgctaaagaagaaatgtcacagatgatgcgtaacgctgcccaatcatgcgctaaaaatgctattgatgatatggttcgtcaaactattgatgacgctgttaagcaagctgaaggccgtattaagatgtctattgaaagagctaatctccgaattcaagaaatcattgttaatgcaatgaataagaatttcgctgatcaaattaacgctgccattgctgctaaattggcagaacacttcccggtaactgctaatggataaaattgattttagcaaattaaatattcctcgcatgggaattcctgatgatattgccaagcaattagctagcgttcaaccaatgccagataattgcatcaaagatattctcgatgcgttagatggtaaaacattagttataaccactaaggctgaaaatggctcgtaaacgatatatggaagaagccgaacgagtaatgctactcatgtattcggtttattataatgagactggtcaaatagttgatagttctaaactcaaaggagctatgactcgtggaagaaattttgcccaagctgcaattgatggcgaagtaatgaagcgtcttggtatgacaaattacgttaaagcagtatgccatccagattggaaccaagttcaagctcaagtatttaaggaaatagaagaagatgttcacggtttttggttacgacagcaacattcataagtgtgtgttttgcgataatgcaaagcgtctgctcgatgttaagaaacaagagtatgcattcatcaatgtaatgccagaaaaaggtgtatttgatgaagtagttatcagtgatttgcttcgtcgtctaggtcgcgaatcgcaggttggattaactatgcctcagatttttgctcctgatggcacacatatcggcggttttgatgaactccgtaaattcaaattcaatgcatgattatcgcggaaccctccttcgggagggtgatattgtagctctttattacggctatggcggattagaaaccggtgaaattaagcagattaagaatcaccgagcaaaggtagaggtaacttactctaatggagttaaggttatgtctaaatggaaatacggcgagtgtatggtgaaattatgaaatacccaattgagtttgtttttcctgaaggcgaccaagtagatttagaacgtaatcttcgtaaagcaatgattgaaagagctatatctgatccgcagtatgctttcatgcaccaatggggtgaattctttgtaaagcaaggaaatatcattcatggtgttcagtggagttatattggtcttgaagttgattacgatgctggtaatccattagggtcttggcgttgggaagatgaagagctcggaccagattttgaagttgattgttcttggcatgaggaagagttatgagttatgatattgatgatttaaaaactccacgaatggtaacagttccagctgaagagattgatcgtctccatgctattgaagaactgttatgggaaattgaatgctcacttccatctggtttagaaagctggattgacgatgaagacttacaaaaactgcgaggctaaaatgactaacgctgaattgcttaaagaaatcaaacatattgctggtgtcactggcgaatgggacgacaactatgatttcgaatatccaccgaacggtgatgatgaagaggaagaaatctttgttttagtagaagatggagattggacacaggaccataagtatcaaagccgttctcagatttggtattatccagcacgcggcgtccatttcatggtatcagagtctcgttcaggttcatatcataccgattggtattataatcctcctgaagtagatatcgtcactcgtcacgagaaagtagttactcgtactgaagttgaatggcgtattgaatacgattctgttaatgattccgctccggcaccatgcaaagcagcaaaggcataaaaccttggtatgcggctcggtgggaaactgtcgagccagaggaagatgctattcctgaagaagattataatacttctgaacctaccattaacgaactacttgattatgaggacaaagtgaatggaacttattggtaagcagtttgaagttatagaaaatgatgatgaattaactgaacaatttccccagtttgttcctggatttaaatttcaggttatcaatgcagttaatgaagatgaccttgaaacatgtggcattacagcagtaattgatttgctcacaaataaaatcatcacaattaatgacccaactccacacggcgaatcttggttctggtgtttctacagcgaagatacgatgcaccaaattaaagaaattggtcaaggtgaagatgttcctctgatttctgaaattaaacttaaccatttccaaggcgcaatcgttccaattaccagagctctttatgcctttgctggacaggaaaattgtgattcagaagagtatgatttaatgcaaaaagctgcggattacattgtcgcacttgaacaacgtcttggagttcgccatgtctaaatcgtgcattactaaaactattacagtaaaaattctcgatttcgctgatattcatcgtgttacaagagaaattttacgcagtcattggtatgaagttggcgatgtagtagaatttagtggaggctattacgacgatgacatcaatggaatggcttggactaaaatgagtcttcttcatgaagaaactaattcatatattgagttcaatgcggatgattatgaaggcatctatgctttctgtacttctttctgcataaaagagtctaatcataacatctatagtagttactcgttaatttaactataaatactcttatctaatcgctgaggtaagagtatgttattaaccggtaagttatataaagaagaaaaagaaaaactatatcaggcacagaacggattatgtccttgctgcaaacgtcctttagatgaggatattcaaaagaatcacctcgaccatgaccatgcgttagaaggtgacaatgcaggaaaggtcagaggcttgctctgtaacctgtgtaatgcggcagaaggccaaatgaagcataagttcaaccgctctggtttaaaaggtcaagatattgactacctcgaatggttagagaatttgctggtctatctccgccagaatcgtaaagacagtaatattcacccgcaatatgttgccgatatggctaaacgcttttcacgtcttggtaagcctgagatgattgctgaaatggaattgcatgggtttacatacgaggaaagtgatggaaaatcacaacttgcttcaaaatacaagaagcagcttcgtaagagtttaaaatgaatatcgaattagaaatccagggacttattaataaaaccaacaaggaccttttaaacgagaatgctaacaaagattctcgtgtttttcctacccaacgtgacctgatggctggtatcgtatctaaacatatcgccaatcaggtcattcctgcctctgtaatggaagcacacaaagaaggtgttatccattttcatgatatggactacagtccagctttgcctttcaccaactgctgtttggtagatttgaagggtatgttgcagaatggctttaaacttggtaacgctcaaattgaaactcctaagagtattggagtagctactgctatcatggcgcaaatcactgcacaagtagcatctcaccaatatggtggaactacgtttgctaacgtcgatttagtattggctccttatgtagagaagacattcgctaaacacgtacgtgatgctcgcaaatatcaagtagcattagtaaaagattatgctatttcaaaaacagaaaaagacgtgtttgatgctttccaggcatatgaatatgaagtgaatactttgttcagttcaaacggccaaactccatttgtgactatcacatttggtatgggcacgtcatgggaagaaaaattaattcaacgagctattcttgataatcgtattcgtggattaggacgtgatggaattactccaatctttccaaagcttgtgatgtttgtagaagaaggcattaatctacgtaaagaagacccgaactatgatattaagcagcttgcattagaatgcgcagctaaacgcatgtatcctgatatcatcagtgctcgaaataatagagcaattaccggttcagaaactcctgtatctccaatgggctgtagaagtttccttggtgcttggagagactcttctggcaaacccgttcttgatggccgtaataatctaggggtagtaacactgaacctccctaggatagctctggatgcaaattataaaagttcggatgacagtaataaactgttcaaactattggatgaacgccttgatatttgtaaagaagcccttttaactagaattaaatcccttgaaggcgttactgcatcagttgctcctattctttaccaggaaggtgcttttggtgtgcgtatgaaacctgatgatgaaattcttgagctattcaaaaatggacgtagttcaatttcattaggatatattggcattcacgaatttgatatgcttacttttaaaggaagcggtaaactcgtcctgaagtacatcaacactaagctaaacaagtggacggaagaaaccggctatgcctttagtctgtactcaactccggctgaaagtctgtgctatcgtttctgtaagattgaccaagccaagtttggcgatgtaaagggcgtaactgataaaggctggtacactaatagcttccatgtgtcagtagaagaaaacctgtcaccttttgaaaagattgaccgtgaagcaccatatcattccattgctaaaggtggtcatatttcttatgttgaacttcctgacatgaagcgcaaccttgaaggtcttgaagcggtatgggactatgctatcgagaagttggattattttggtgttaacatgccagtagataaatgtctttcctgtggttctactcatgagatgacacctactgaaaacggattcacgtgttcaatttgtggtgaaactgatccaaagaaaatgaatacaatccgtaggacttgtggctatcttggtaatccttctgagcgtgggttcaatcttggtaagaacaaagaaattatgcatagggtaaaacatgttagagaaaccaatgaagcaagttgattggaaccaacttagcgaatggggattgatttggaaaatcaacaaagaggttctgcacccgcttggaattgctataacccgtgaccccgaaagtggattatcggctggggctattcaaactgatgagccctggaaatatgatgcagaagtagaagcacgtaatgaggtaaggttcaatgaatttcgacagaatctacccttctgactttgtgaatggccctggatgcagggtcgttctttttgtcaccgggtgtttgcataaatgcgaagggtgttataataaatctacttggaatgctagaaatggccagttattcactatgaatactgttaaagagcttgcatcccatttaagcaaatcgtatattcaaggtcttaccttaaccggtggagacccgctttatccacagaatcgggaagagatttcaaatttagtttcttgggttaaagcaagatttccggagaaagatatctggatgtggacaggatataagtttgaagatatcaaagatttagatttgctacaacacatcgatgttataattgatgggaaatatgagaaatcactgccaactactaaaaactggcgtggttctgacaaccaaagactctgggtaagaaatggttctacctggacacacgattgaggaaatagatatgctgacttacaaaattatgtttaccctgaaccacatggctactgaactgtttggaccggaatttctggctatgacagcgttcatctttactatttaaggaaaattatgaaattcattaatgctattcgtaaatttatttctaacgttatcgctttggttgcattaacggcaggtgctttcgtagcaattccgttcattgtccttattatcatcgcagattggattaatcctaccaagaaagatgaaaagttatctaatgaagaatttcagaaacgagttaacactctgactgctaaactccaacaggtcatgaaatgatagaaatctatggcatccctgaagaagtttggagatgccctggatgtaaagcagttcgtgacttgctcgataagctgcaacttccgtatgagttctataacgtaatcaacgaggttgacggtcaaccggtttatgaccgtccgttgattgagtcacttgctaaacgcatcgggtgctatccatcgcttgctattcggtatcctgtcatttttatagataacgttaagcagtatgacattccaacattcaaaaccaatcttattgctgctgggcatgacccagatatcatagaagattaaccggttcctttctaaggtcatcttgaccaccttatgtatatttctatacccttcatttagaggttcctatgggacctctcttttatttttaaattcctttcacaaagttgtttacaagctagttgatgagtgatactatagccctatcaacggataacagcataccgtttaactcgagaggaaaatatgaactggttaaattggcaagaagctctagaagctatgagtaaaggctgtaaagtaaagcatgtgcattttactgatgacgaatacttcttgatgaagaacaaagtcatctgtgacgaaaatggatatgatatgactcgctggtacaagggtgagtcttggcaaaacgaacattggtacatcgcatgaaaacttttgctgtaggtgatatcgtccgtaccagaatttgggatgggcttcaatttgaagtggttgtctacgttggttcagatggggttctacttcaccgaattaacaatctgattaagtggcacctagaacgcttcgtgaaataccatgaattcaatagctaccactgtactgtagctccggttgctagtaaagaatactacgatatgctcgaagagttaaaatctctcaaagattgatttgctacaggagatttgatttaaaatctcctctgtcaaaacaatcgttactgaggaaattaatatgtcccaagcaatcaaaaacgtactgaactcttttgcttatgataaagtatctgcaatgctggaagaaggacgttgtgtaactccgtctttgcttgatcagtgggaagttgagcttcacggtacgatgaaagaagaaggtcaaaaaatcggtaaagcccgcatccgtgaattagtggttgcttatcttctgtctgaatttggtattaaagcctttggtgtagaaccaatcacgccgggtatcggtgaaatttctgaaagcactattcgtaagatgaagaatcaacgtaagaaaggcttccgcgatgttaaagcggttaaggcagcgaaatgatttcatatatcgtgtgcgcatctattcctaccggtgtatggcatagaaggattaagtatatccgggctcattctgagcctgacattagtcaagctaaacggatactcgcaaatcaatgggatgaagatactagcgtaattatcagagtatttccaattgattcatccactctagacagccaacttccgtctccgtcagagatgtggcaagaaggtttaaatgagcaagaacttgaggaatatcttgatgcgtaaagttattctatacacagaaatttttaccagccgttgggtgtttgacagcgtcagaatttcaaacgcttcaaaagaagatgttcgtaacgctcaacgattagcatacgatgaagctggaaaatcaccagcatttgtaaaaattgagtatatcattactgattctgctttaattcatactgtatcagaatcagtattaaagaagttctgtgttgatcgcatcaataaaggaacttcaatggaatattttctattagcgagagaactgaaatggtagaagaacaaattgcagaaatcggtttactcggatggttcgtgtctaaaactaaagacggcagaaacttgattgaaactccagaaggagaattcattattgaagatgattttgatgcattctgggtctatgaacgttctggcgagaatgaatatacttctgtggatgcattctctaaatttgaagatgctatcgatacggtgaagaaatggctgaaatagataatatctcaatcactgttgaaggtatgggtgaattcgtaatagattcttacatgggcgtgtggttctccaacgaattaatgtactgggaaactcatgcttctatgctgaatgaaaaacattatgaaagtctgtacacttcattcttaaacatgatgcatgaagaagatgaatccgaatactttgaaatcagtttaattgagttcaaacgtattatggaaaaacttttccagtgctatcgtatcatgaaaggtgacctatgaaaattcagttaactcttactcacgaaatattgaatggcgtattctatctggaaaaggaccaaataacattcgtgcaggaaggcaagtactggtacgctgatgtagatgacattccagacatcggaatggaacgtgtcttcgaagattttgaatgctcggtcaatgtttctgctgagtttacatataacgatttctatcgtatcatgatgaaattaattgcatgcgctgaattgattaagtaatgctttaatcctctcgcttcccaaatttgatataatagatattattaattgaagcgaagaggcaatatgagtaattatgtaaataacaaggaactgtataaatcaatctgtgcatggaaagagaagtgccgggagtctgaagctgctggcggccctcgagtagtaaaacagaacgatacgatcggccttgctattatgctgatcgcggaaggtctgagtaagcgtttcaacttttcaggatacacccaatcctggaagcaagaaatgatttcagacgggattgaagccgcaattaaaggcttaatcaacttcgatgaaactaagtatgataacccgcatgcgtatataacccaagcttgtttcaatgcattcgttcagcgtatcaaaaaagaacgcaaagaaatggcaaagaaatacagctattttgtccataacgtgtatgattcacgggacgatgatatggttgcgttagcagatgaaacctttattcaggacatctacgataaaatgacgcagtatgaatccaccgcttataaggcgccagggtctgctaaaaagagcgaacctacaagcgatggacctaatctggaatttttatatgaggctgaagattaacctcgacgggtttttagaagatgtgcaagacctagacgctatcccttatttgctaaagatgtatttaagggaggtgcttgatcttgatattcacattgacccgaaaaatccacatgacgctgatttcaggtcagattctgctataattgaacatagttataattggactgatactgaattcacatttgaaataaattaccatccaaaggaataacatgaacaatattacccaggaagagcgcgacgagctgcaacagaaactaatggaagcggcagaagaacaagctattgctcgagccaacaaagttgttcgtaaaaaccgtcgtgaacttgagcgattacgagctcatgctggagacgcggtattagacaataatttccctgcttacaagtatgctattgaaaaactgcgtactattttaaaacaaccttttaatgatgagattattctgacttgttggaatacctctcgtaaatctgtttgggacattctaaatgctggtacaagtaaaatttaaacgtgttcgtaaagacgcaggatttactttaaacactgcgactggtacgatggcagtaaaggtagcagataatcaatatcgcgtgttaggctctaccgaaggatgtaagctaattgataagaactctcttgtctgggttgacaccttccaagttaaacggtggtatgaatggtaaatgaagagaactggggattcattgatttagatgaacaccctgattttattactagtgaagagaattgggatgtatgacgaatttgatgggttctaatcctggacatgattggccggaaggaaattacacgtgccggtgcagtaattgttcagaacgttatacaggaccaaagcgtagttacttctgttataaatgtgatactgctcggagagaagcacctgctcccgattatgaagcgattcataatgctaaggtagatatgcttagacgctttgaagaagctaagcgtatatgtgaagcagtgggttatgttgtatacaagaaaatttaaagggcttcggcccttttgctttattacgggaatggtaaaatatccaaaattaacaacaaaggtcaatatatgaagattaatattttaatggctcgcggacttgagggatgcggcgtaaccaagttcagtctcgagcaccgtgagtggttagtaaaacatggccatgaagtaaatatcatttacgctaaagataaagcgtttactcgtaatagagcacatagctataaagatgtaactattcctgtgtctcttgcagatgactatgataagactttatctctgcttaacgcatgtgacattcttatcattaactcagtacctgctatcaatgctccagaagcagcgattgataactataagaagctcatagagaacattaaacctgaagttagggtagtcgtatatcaacatgaccatagagcattgtcacttcgtagaaatgctggtcttgaagaaaccgttaagcgtgctgatgtactgtttagtcatagctcaaacggcgattttaataccgtgctaatggaagaatattttccaagcggcgggttgagtttctttgatgattctgactcagctcctccggtttataactttcaacctgctatgaacatcaaagcaattcgtgataagtattggaaagacttctctgctattgattttgatattcatcgttggattggtcgtactactacgtggaaaggctatttcttgatgtttgactttcatgaaagtcatctgcgccccgcaggcaaaacgactatcttggaagggttagaacgcagtcctgcatttattaacatcaaagaacgctatgaaattgattattgccgtcattatcatcaggttaaaactggaccaggtctgaatcctcaagttcttgaccgatatgttaactctgaaatgcttgagcgtatgtctcagtctggatttggttatcagctgtcacgtcttccagataaattccttgagcgttcgctggaatacacgcatttagaactaggcgcttgtggaactattcctgtgttccataaagctactggtgatgctttgaaattccgggttgatggaaagccgttgacttctcatgattctggcattctgtggttgaatgatgaaaataaaaatgaagtctttgaacgaatgaaacatctgtcatctgaccagaagctctatgataaagagcgaaataaagcatttgaattcctggtagaacaccaagattctgagcattgctttaaagaacaatttgagttaatgacaaaataagtaatgggccttcgggccctttttgctattcatggaataatataaaattaaactctactagagaggttatatgaaaattattcactcaggcgattggcatttaggtgtccgcgcagatgacccgtgggtacaggatgtacaacgacacggaattaagcagcatattgattatgccaaaaagcatggaattaaaactatcattcaatacggtgatatttttgacgttcgtaaagctatcactcataagacaatggaattcgctcgtgaaattgcggagtctcttgagaaagaaggaattaacttaattacgatcgtcggaaatcatgatatgcactacaagaatacgttgacgcctaatgcatcaacagaagttcttggtaagtataagcatattactgttattgaaaagcccgtgactatggattttgatgggactttgattgacttgtgtccatggatgtgtgaagagaacacgtcagaaatcatgaagcatatcaaagaatcgtctgctgaatactgtattggtcactgggagcttaatggcttttatttttataaaggaatgaagtctcatgggctggaaccagatttcctcaaaaagtacaaacaagtatggtctgggcacttccacaccatatcaagcgcagcaaacgttaagtacatcggaacgccttggacgcttacagcgggtgacgagaacgacccacgtggcttctgggttcaagacactgaattatcaacctttgatttcgtccctaatgaaatcacttggcatagaaaactgatttatcctgttactggaaaaattgactttgaagagtttcgtaatctcgcagtacgcattattatcactgcggtcgatgaagaccttcctaagtttgaatcagaacttgaaaaggtagtacatgaattaagaactgtttctaaagttgacaactcggttgagtctgaagatggcgaagaagtagaagttaaaagcttattggatttaatggaagaatatatccaagcacttgaagacctatccgcagatgatatcaaagccttaaaggttatgtctaaacagttatacattgaggcacaaaatcagtgaagacttttaaactaaatcgtgtcaagtataagaatataatgtcagttggccaagcggccattgacattcaacttgataaatgccaaaagaccttaatcacaggtaagaatggtggtggcaaaagtactatgcttgaagctattacttttgccttatttggtaaaccgttccgtgatattaagaaaggtcaattaattaactccttcaataagaaggactctgtagtagaactgtggatggagtatgacggtcatagtttctacattaaacgtgggcaaaaaccgagtgtctttgagattttacgagatggcaataagcttgatgaagccgcaagttcaaaggattttcaatcctactttgaaagtctcatcggcatgtcatacacatcgtttaagcagattgtcgtattaggaacggcaggatatactccgttcatggggttatcaactgctaatagacgaaagctcgttgaagatttgcttgaagtgtctcttttggctgatatggacaaactgaacaagacacagataagagaaatcaatcagcaaatccaggttaatgatgttcagcgtgaagcattgactaatgaaattaaaactcatcatgagtatgcagaaaagcagaagaaactttctggtgataacgtagctcgcctgcaggcgatgtatgatgagcaggtgaaagaggcacgaggatataaagcagaattagaaactcttcaaagcgaactgcttgaactcgtgattggtgatgacccagcagagtcaattcaagaagttcaaggtaaaatctttaagattcgttctaaaattgaatcatactcaaaggttcttgggttgtatgataaaggcggtcattgcccaacgtgcttgcaggatttgcattctaatgacactctaatcactaagattaatcatcatgttgaagaatgtaataccattcttggcgagttaaagacgcgccagagtgaactggatgaactagctcgcgagtataatactattcgtacgcgtgcaagagacatcaaaaatcaaatgagtaatttgaaacagatgactttaactgcagttgataaagcacgtcgtattaaagcagcaattgataaagcatcacaggagttcattgataactctgacaagattgaactgctacaagaagaattagataaaattattctcgtcaaaactaatttggttatggaaaaatatcgtcgtggtattttaactgaaatgctgaaagactccggtattaaaggagctatcatcaagaagtacatcccgatgttcaataagcaaattaacagctacctaaaaattatggaagctgattattcgttcacgttgaacgaagagttctctgaaacgattaaatctcgcggacgagaagagtttagttatgcctcgtttagtcaaggtgaaaaagccagaattgatatagcattactattcacatggcgtgatattgctgaaaaagtttctggtgttaaaataaactgtctgttccttgatgaagtctacgattcggccaccgacgcagaaggtgttaaggcaataactgctattcttaataagatggtagatgccaatgtgtttattatttctcaccgtgaccacgacccgcaggcatatggccaacatcttcaaatgaagaaagtaggacgatttacggtgatggaatgaatgagtttacaactggccagcatctgctggcctttcctgaagtaaagcgatatgtgttaactaatttgttttctgatgaaaaacacttagtaacagaagaaatgttacgagatgcttttacaggaaatgaatataatagagtcatgtccagcaggaatcccggttggatggttgaagattattacgattaaggtaaatataatgattaattttgttgatgtgaaagatatccaggttaaaaacgtacgtgcagattccaacccgaataaccaaaatcgtattcgtaagtcttgggttctggctctaactgaagaaactaaagcagctattaaagataagattaaagattctgaagctcgctttgctttctataaatctattgacgacgaagttgcagaaaaatggattgaattgatgcgtaagcattacaacgaatcaatcaaggctggtgctaaaattgttactgaccgtcatggtggcgaacgtctagaaaatgattactgcgtagatgctgatgagcaactcgttgcggcaggtcagattgttgcagaagaattaactgctacattcgcagcttgatataattatcctgaacttaattaaaaggtattgaaatgaaattctctaaagaaactctgaacattctgaaaaacttctccaccatcaactccggtatcatgctgaaacctggcaattttatcatgactcgtgctgttaatggtacgacttatgctgaagccacaatctctgatactatcgatactgatgtagcaatttatgacctgaacagtttcctgagcattctgtctctggttggtgatgatgcagatattatcatgcaggaagatggtaacctggcaattaaagatgctcgctcaactatcttctggccagcagctgacccgagcacaatcgtgttcccgactaaaccaatcccattcccggtggcaaacgtaattatcgattttaaaggtgaagacctgcaacagctgatgcgagtatctcgtggcatgcagattgacacaattgctatcaccaatgttgatggtaaaattgttctgcgcggttataacaaagtagaagatgctgcactgacccgtccgaagtattccctgaccctcggtgattatgatggcgaaggtaactttaactttatcatcaacatgagcaatatgaagatgactgttggtgattacaagctgatgctgtgggcaaaaatgaatggctccaagaaacagactgccgcaaaatttgaaggtgcatcagcctcttatgtagtagcaatggaagcagacagtacctttgattttgagtaataatttcggggcttcggccccatctttaatctgaatgaggaaatataaatgaaattgacagtaaacgaagcagacttcatgtgggaacagaaatatcgtccaggtactatttctgaatgtgtattgcctgctgaagataaagaaattttttcggctttagtagctaaaggaaaaattcctcatttaattctccatagtacttctcctggcaccggtaagaccacagtagctaaagcattatgtaatgacattaatgctgaaatgatgttcgtgaatggttctgattgtaaaattgatttcgttcgtggaccgttaactgcattcgcaagttctgcatccattgcaggcaagcagaaaattatcgtgattgacgaatttgatcgtgcaggtcttgcagaatctcaacgacatctgcgttcattcatggaagcgtatagcacaaactgtactattatcattactgcaaacaaccttgatggtatcattaaacctcttcagtctcgttgccgtgtaattaattttggtaaaccatctccatctgatgttaagccaatgcaaatcgagatgctcaagcgttgtctcgcaatttgtgaaaatgaaggcgtggtggttgaagataagaaagttgtagctgctttggtcaaaaagaattttccagaattccgtaagaccattaacatgcttgatcattattcttctaagggtgtgattgatgcaggtatcttgtctatcgttctgaatgaccgtggttcaattgaagatgtcatcgaagctattaaaactaagaacatcaaagaactccgtgctcttgctccaaaatatgcagcagactatacttggtttgtagataaactttcttctgagctgtatacaatggttactggcccaagcattatcagaatgtatgaaatcatcggtgaaaataaccagtatcatggcatagcagcttcgattgaattacatttggtttatatgcttattcaacttgttgtagagatgcagtggaaatgatgagtttatttgaagatgatgatcagtataatgagcaccaaatagcttggttaggtaaagactggacgaaagtccaggaattatctgattcatataaagaaaaagcagaaaatcaattcttcacaattattgggtctattaacgaaaagcaagagcatttgaatatctcgacgatggattattcaaaattcatggttgaaaacgctctttctcagcacgctgactgtatgcctgcggtttatgttatgaaccttgttggtcaagggttatctgaccaagcacactataactatatgatggcctctgttcctagaggtcgtcggtatggtaaatgggctaagttaacagaaaacatccaggatgcattgattcttcaagttataatgacatattacaaggtcaatgcgattgatgctaggatgtatagagagaccctggaagctaaaaacaagcttaaacctgctctcaagaaaatgaaaggtcttgtgactgatgaattggtcaagacaatcacgaaaaacgtgaaagaacagaaaaatcttaagaaaacagcattggaatggtaaagatgattgaaattacactgaaacagcctgaagacttcctgaaagttaaagaaactctgacccgtatgggaattgctaataacaaagataaggtactatatcaaagctgccacattcttcagaaacagggtcgttactatatcgtccattttaaagagatgttaaagcttgatggtcgccctgttactattgacttagaagatgaaattcgtcgagactcaatcgcacaactgctctctgactggggtctactgagtattaatcgtggtcaaactcttgcacagatgcagaataacttccgagtaattacattcaaacagaaacatgaatggactttaaaatctaagtacacaatcggtgcgtaagaaaagggcttcggcccttttactttataaaaatcggagtataattatcccacctaaagactaataactcggtctataaacaaaggaaacccatgaaagaattttatatcagcgttgaaactctaggcaatgacattgtagaacgttatatcgattctactggtgaggaacgcatgcgtcgtgttccgtattctcctgttatgtttagtcattgcatggaagaaacaaagtacaaagacatctatggcaagtattgcaagaagaatacattcccaactatgaaagatgcacgcgattggatgcgtcgtatggaagatatgggaatggaagcaatgggtatggatgatttcaaacttgcttatatcagtgatacttacggttcagaaatcgtctataataaaaaattcatccgaattgcaaactgtgacattgaggttactgcatctcaattcccagacccgatgaaagcagaatatgaaattgatgctatcacccattacgattcggttgatgataagttctacgtatttgatttactgcattctctttatggttctgtttccgagtgggacaagaaactcgctgctcgtttagattccgaaggcggtgatgaagttccacaacatattcttgatcgtgtggtgtatatgccattcaattcagaaaaagaaatgatgcttgagtacatcaatctttgggaacagaaatgcccagcaatctttactggctggaacattgaaggatttgatattccgtacatcatgaatcgtgtgaaacagattcttggtgagcgtgcgatgaaacggttctctcctctgaataaagtttcatctaagattatcacaaacatgtatggtgataaagaaatttattctatcatgggtgtgactattcttgattacatggatttgtataagaagtttagtttcacgaaccaaccgacgtataagttggatttcattgcttattatgaaaccaagaaaggtaaattagcatatgacggtccaatcaataaattgcgtgaaactaaccaccaacggtatatttcgtataacatcatcgacgttgaatcagtacaagcgattgatgctgttcgcggatttattgacctggctatctcgatgtcttattatgcgaagatgccgtatcaaggtgtaatgagtccgattaaaacatgggacgcaatcatctttaacagtctgaaagaacaggacaaggttattccgcaaagtcgttctcatgttaaacagtcatatcctggtgcgtatgttaaggaaccagttcctgctgcatatcgttatatcatgtcgtttgacttgacatctctgtatccgtcaatcatccgacaagttaatatttcaccagaaaccatcgttggacagtttaaacttcatccattgggtgagtacattaacaagactgcaccacgtccgtctgacgaatattcatgttcacccaatggttggatgtatcgtaaagatgtagatggtgtcattccagttgaaatcgcgaaggtattttatcagcgtaaagagtggaaaaataaaatgatgggtgccaaacgaaatcaagaactgattaaaaaggttctgaatgataagaagtttggaactatcgataaattcgcagaagttaatgtctatgaagatttctctgatgatatgaaagcagaactgctgacatataccgaagagtgccttgacaaactgatgtttgaatgtaaacatgctgaaatcttgggtaatactaatcagttaaaccgtaagattctgatcaactcactttatggtgcattgggtaacatttacttccgttattatgatttgcgtaacgcatcagcaatcacgttgtttggtcaaatggcaattcaatggattgaacgtaaagttaatgaatatctcaacaaggtatgtggtactgaaggacattcgtttgtagtagctggtgatactgactcaatttacgtttgtgttgataaggttatcgagaaggtaggtcttgagcgtttcaaagaaactaacgatttggtcgaattcctgaaccaattcggcaagaagaaaatggaaccttggattgaccaatcatatcgtgagatgtgtgaatacatgaacaataaagaacatttaatgttcatggaccgtgaagctatttcttgtcctccgttggggtcaaacggcattggcggattctggaaagcgaagaaacgatatgctctgaatgtgtatgatatggaaggtactcgatatgcagaaccgcatctgaaaatcatgggtatggaaactcagcaaagttctacaccaactgctgttcagaatgcgttggaagaatctattcggcgtatgctgcaggaaggtgaagaatctttacagcaatattataagcagtttgagtctgagtatcgtgaacttgactataaagtaatagcagaagttaagaccgccaacaacatcggtaagtatgatgatggtgcaggatatccagataaaggtacgccatatcacgtcaaaggtgctttagcgtataaccgagctaccgcgggctttgaaggtataacaccaatcatggaaggcgagaaggtgatggtcatcccgctgcgtgaaggtaacccgtacggtgagaaatgcatggcatggccatcgggcactgagctgccacaagaaatccgacaggaagttctagtgtggcttgaccacagtgttctgttccaaaaatcgtttgttaaacctctgacgggtatgtctgaagcggcagggttagactatgaagagaaatcgtctcttcttgacatgttcgatttttaaaaaagttgtttactttgccacaaggatgtggtaccattgttctcgaaataacatactgaggagattacaatgaaatcgttacttgctgttatcgttgctctcacgctgactggttgtcaaatgccacaaggtgatatcgtcccggcttcttctgttggacaggtgcgagcaattggcggtactgtaggatactatcgtgctagcaaccaggtctctgctgaatcgctcgcggttgagcgtcggttggcgaaagaaaaagctaatcctaatcgtcagctatctgcgatggaactcgacatgattgagcagaataagcatgagctggaagaaattaagcgtctgcgtaaaactcaaaaagaacgtacatgcactgctcaagcggcagcagtgaatgaccagattcgtttaactgattttgctaacggcggattgagttataatgagcataaacaacgtatggagcagttaaaatctctccaaaatcacatctacaacaaatgcatgtctaactgaggagattaacatggaagcagtatttggtttaatcattcttttcttcatctattttttgccgacctttgtagcttgcagtcgtaagcataaatcacggggtggaatctttatcacaaatctagtattcggttggtccattatcggttggttaattgcgctgatttggtctgcttctaacgcacagcagaatacaattattatccagcaagttaaataagaggtctcatgattgtaactccaatgacagtacaagatatccgtcaagaattcgctgatgctttgctcaacaaagaatttgtgattgataagacgggtgtgaagactattgaaatcgtaggtgcatcatttattgcagatgagcccctgatttttggtgcagttaatgatgggtacattgcccgtgaacttgagtggtataaatctcaaagtttattcgttaaagatattccaggtgaaaccccagctatttggaaagcaattgcatccaaacatggtgagattaattctaactatggctgggcagtttggtcatcacaaaactattcgcagtttgctaactgcgcaaaggaacttatcagtaatcctgattctcgccgcggaattatgatttatacacgacctcaaatgcagtatgattttgagcgcgatggcatgagtgatttcatgtgtactaacaatgttcagtatctgattcgtgataataaagttcatgctgttgtaaacatgcgctctaatgatgtcgtctttggatatcgtaatgactatgcgtggcagctctatgttctggaacagttaaccaaacttctgaatgcatcaggtaaaaattattcagttggtgacattatttggaacgtcgggtctttgcacgtgtatgagcgtcatttctatcttgtagataactatgcttatactggtgaaactcatattgcaaagaaagactataaaggtgagtggaaatgattcagtttgtaattccaagttataagcgtgccggggcagttactgccctgactatgtttcctgaaggttatgttccgcatcttgtagtacgtgaatcagaaaaagaagcatacgaaacttggcacggtcatgctgctaaaatcgttactgtccccgatgatgttgatggaattgcaggaactcgccgtctgattactgaaatgtatgcaggacaacgaatttggatgcttgatgatgatacgaccattcatctgactgaaattcgtgaacgcgacgatcgccgtgttccacttggtgccggcgaggcaatgagtcaagaggtatttgatgatatggtcaaatacgtagagactgctatggattgtggttattatcacggtcatgctcgcttgccgattttcaaaatcacatcaagctggggtcattatcgcgagaatagttttgggttcaccaatactttctatgatttgactaaacttaccgcagaagatattggttacggagttattgaccttaacgaagatgcttatgcttttctaaaattaattaacatgggtcatcctcatctggctctgtttaagtatctcgttaaatccggcaaagtgcagtctcctggtggttgttctacacagcgtgatactgctcgtcagaatagagcccttgaacagctacatgctgctttcccaaatcaagcccgttggaaatctaaagacggcgaaagacgtgggttattcggtgataatgaacctctgaaatcaattcgtatgtgtattaacactcgagtgaaatctcaggccttccatgaatttggtaaggtagaaccatatctgtgagggcgaaagccctccaaggacctcttatgaacatctatgataaatctgacgtagctggtaatatattcaaggctgaagaattcagatgcttcgtatgtaaatctgatgagtttgttcatgaaggaactactggctcagatggaatgcattgctggtggcatggcatgtgcgttggatgtaaaatacactatgaaatagatatggaaacagtggtttataacaccaagaagaaatggaacttctgataatagcttcaagaacaaagtaatataattactctatcctttaacctgtgagaaaaatataatggagacttatggaatataatgaatgtctgacttaaaatctcgcctgattaaagcatccacttctaaaatgacagcagaactgactaaatcaaaattctttaacgagaaagatgtagttagaactaaaattccgatgcttaatatcgcaatcagtggagcgttggatggtggtatgcagtccgggttgactatcttcgcaggtccatctaaacacttcaaatctaacatgtctctgacaatggttagtgcttatcttaataagtatcctgatgcagtctgtttgttctatgattcagaatttggtatcactccagcttatctgaaatctatgggtgttgaccctgaccgcgtaattcatacaccggttcagtcggttgaacaattaaaaatcgatatggttaaccagcttgaagctattgagcgtggtgaaaaagtcatcgtgtttatcgactctattggtaacatggcgtctaaaaaggaaaccgaagatgctctgaacgagaaatctgttgcagatatgactcgtgcgaaaagtctgaagtctctcttccgtatcgtaactccttacttctctattaagaacattccttgtgtcgcggttaaccacacaatcgagactatcgagatgttcagtaagacggtaatgactggtggtacaggtcctatgtattctgcggatactgtgttcatcatcggtaaacgtcaaattaaagatggtactgagcttgaaggatatcagtttgtcctgaacgctgagaaatcgcgtactgtcaaagagaaaagtaagttcttcatcgatgttaaattcgatggcggtatcgatccatacagtggtctgcttgatatggctctggatatcggatttgtggttaaaccgaaaaacggatggtatgcacgagaattcctggatgttgaaaccggtgagatgattcgtgaagaaaaatcctggcgggcaaaagatacgagcagtacggaattttggggtcctctgtttaagcatgagccattccgtgacgctatcaaagcccgttatcagttgggtgctattgattcaaacgctgcggttgatgaagcggtagcagaaatgattaactcaaaagtttcaactaaggttgatggtgttaaacttcctgagagtggttcagtatcagctgctgaagttgaagatgaattagagaacttcatgaatgaagactgagtttgatttagaatctgaactcgagaaatttgaacaagaatctccctcggaagagggagacttcgagcgtcaagaacgagtgttcaagaaaagccatgaaataatccaagaagctatgaagactgttatccaagaaattgtgataaaattaaatggtcaatcacacttggtttatgttcataaattaaatatttctccttcgggggaagtaactattgagttcagtacaccatctgaagctcataaggatgaactttatcctcatgtggaagcttgtgttaaacaacaaatccagagtgcattaaagaccaagaaaaaatcattatggaaaatcttttaagaggttaaagtggtagaaacaatcttagctaatctgatttacaaccaggctttctttacgaaggtttggccatatatggacaaagagtacttcgagcaaggacctgctcagacggtgtttaacataattaagaaacacgttaatgaatacacagcaattccttcaaagactgcgttatgtgtagcactggataattcgtctataactgaaacggaacatgaaggcgcaaagaaacttattgataagttatctgatgctcctgaagatttgaattggttagttaaggaaactgaaaagtacgttcaagaaaaggctatgtataacgctacgtctcgaattattgaaattcaggctaatgcccagcttgagccaaataagcgagataagcgtcttcctgatatgggagctattcctgatatcatgcgcgaagcgttatcagtatcgtttgatagctatattggtcatgattggatggaagattatgaagctcgttggttatcataccagaataaagctcgtaaagttccgtttaaacttagcattctgaacaaaattactaaaggtggtgccgagactggtacgctgaacgtattgatggctggcgtcaacgttggtaaatcgttaggattgtgttcattggctgcagactatcttcagatggggcataatgtcctttatatttccatggaaatggccgaagaagtttgtgctaaacgcattgacgctaatttgcttgatgtatcacttgacgatattgatgatggctgtgtatcatacgccgaatataaaggcaaaatggaaaaatggcgtagttctagtactcttggtcgtttaatcattaaacagtatccgactggcggtgctaacgctaatacattccgagctcttctgaatgagttgaaactcaagaagaactttaaaccgactgttatcatcattgactatcttggtatttgtgcttcttgccgtattcgtcaatatactgaaaacagttacacgttagttaaagctattgcagaagaacttcgtgcattggctgtagaatctgaaactgttctttggaccgcagctcaggtaggtcgttcagcgtgggatgcttctgatatggacatgagtgatattgcagaatctgctggtctacctgctacagcagactttatgttggctgtgattgaaacccctgaacttgctcagatgaagcaacaattaattaagcagattaaatcacgttacggtgataagaacatcaacaataagttctctatgggtgtacataaggctaatcagcgttgggtagaaattgagcagcaaaacgacccaactaagcctaatccaagcaataccgtccgagaaggtgccggtgcacagaaccgtgtagccgaatctaatcgtcaagaacgagtatcacgttctaagcttgatgctctggcagaagagttaaaattctaaggaattctatgatttttgtgtttagcgcggtccgtgaccagtcaggtcactcttttgttgtaacagccacagataccattcatcgaggcattgaggcatataacaaagcagacctatctgtatgcgactatggagaggtcaaggtgtataacagcgatggcatctgggttaactctgctacatacctacctaccaagaatctgacctctgacattttgttgaaaaaattgttcaaaaggtagtttactttctccaaaggccatgatactatggccttactgaaacaaaacgagtagaggaaaacatcatgtggacaattgaaaaagcattagacgtagtctttaagagtaaagatgaatcagcggaaactgtaccgcattgcggtatggtagttggaagcaaagtagttaaatctccacatgctaatctgcgttgtgatggcgtagtacgaaaagcattagatgaaggcgatacagttttagtagttgttgagccattcaaaaacactgatggcaatgtgtcaatgttagtatacgcaaacggtgattatcgcctgatttctgctcttaacgtacaagctgcttgaggaaaccaaaatgaaaaagattgtacttgctttagtgttcgcagtatcaagttgctctgcagttcctgccatggccaactatgacaaagacttatgcgagtggtcaatgactgctgatgagtctgaagtagctcagcagattcgtgcagatgttggtcatattgtggaaaacgtagacccgagcaaacaaacagaagtgcaagcagaacttaaagacgacggcgcagcacttaagttgaattatgttctttactgtgatgcccagtttgataacttcaacattgttaagtggattttaggatgattacatacgttttaataatggcgctatctactggttcaggtggaatgtctactgaaaagatggcattcactggtaaagatgaagccgtgattaagcaaaagtgtgaagatacaggcaagcagtttatgcttatcaaagacaatccaaaatcaatgtctccgacgctgtatcctacatataaatgcttacgtattacgcatgaataaatagtaggaggctctatgaaaacatacaaagagtttgttactgagatggtcgcaggtgatgcgggcggcaatccacagaatattgcatcaggtacaacttccggggacatcgtcaataaaggacccgaaactcttccaaagaaacgaaaagcggataaagacgctgccaagaaaaagtgataaaatggccttattagtttaaggccagaggaaatattatgtcttgggttgataacgagtatgcaattcgcgcaatatctcacctacctaaatttagacacgttactacatcttcaacattcaagttaaactgccgttgcccaatttgtggtgactcacagaaagatatcaataaagcacgattctggatttttgatgcaggtcaaggattacgctgtcattgcttcaactgcgagtataacaagtggctatcgcagtatcttaaagataatgaacccgacctctatcgagagtatcttcttgagaaaagaaaggagcaggtctttgataagccaaaggctgtagaaccgtctgagaaaattaatgcaaaactccccgtaatagaaaaacttaatttctgcgagcgattagatagacttcctaaggaacatccgatagttaaatacgtgactgccagatgtattccaagcacttcttggaaaaggttatggtttactaaccaatggccttctcttgttaactccgttaatccaggaacctataagaatgagacgaacgaaccacgtttggttattcctatcttcaacaagaaaggagagattgagtcgtttcaaggacgagcactacgaaagaatgctccacaaaaatacatcacaatcaaagcccacgaacacgcgaccaaaatttatggtctcgacactattgatgagtcaaaactcgtattcgtcatggaaggaccaatagattcgctgttcattgataatgctattgcaattaccggtgggtctttagatttagctcaagttccatgtcatgataaccgagcatggattatggaccatgaacctcgtcatcctgatacgattaagcgtatgaagcgtttagtagacgcgggtgaaaaggtagttttctgggataagtcgccttggaaaagcaaagatataaatgatatgattatgaaagagggggcaactgcttctgaaataacggattatattaatcaaaatatatcgcaaggtttaatggctaaattgcgccttgacaaatacgcgaagatataggggccaaagccccttaaattaaagcaatcctccggtcataataaacgacacaactttttctaacggcattggaggaagaactagaccgtgtgtgctagctaatggaactaccacataattccatgcagctaaagcagcagtggcgattccgacgtaaagatatcttccaaatcctcctttgtctttacattcttgtttcacttcagacatgaatcctcctgctatttatgttaagtgatataatatttatctaattgaaaggatatctgtgaattaccaaaaaatttactcagctttagttacaaaggctaaatgccggcatcttgatggatataaagaacgccatcatataattcctagatgtatgggaggagcagatgacaaaaacaatcttgttgagttaactgcgcgcgagcattttatagctcatagattattaactaaaatatatccaaatgtgaaaggattgcattatgctgtaaatttaatgcgatataataaaggtgttaaattaacaagtagattaatagaaacccttaaaatccaaaactctgttcttttctcgggtgaaaataatccaaggtttggaaagccatcatggataaaagggttaaaaacaccagaagaaactaaggctaaaatgcgagcttctcacaaaggcaaagttatttcggaagaagctaaagctaacatgagcaatgctcgtattggaaggtttagtggtaaaaattctcctagatacggtttaccgaatccaagacgtggtgagatatggaactcgtatgattcgctttacgagttgtgggtttataataatagacctaagcgcacaaaatttaataaaatagctgtcaaggcaggttatcctaatatctgctatagacgtatgatagaaaacttcataagaaaggaaaaataacatgccacatttcaacgaatgtagtcaactgatcgctggtgcagataaagctgaagcccgatacgcaggtatcgtacgcaaagttggtggtgaccctctgcaagtaatgcttgatatgcaaaaatctcttcaggttcgtcttgcaaatgacaagcctggtactaacatgcatcctgatgaattggctcaagctggtgatatcgtacagtggctgcgtaatcaaaaagattacattgatgacgaattccgcgaattgctgacgtctcttggcggtatgagtaacggtgaaaaggcagctagtgctgtgtggaaaccatggaaagctgaccacgtcaagatgcaggaaacttatatcaaagacctgtctgataaagaccagcttgaaatcaaatttgaaatgattgatatcctgcactttgttctgaatatgtttatggcgcttggtctggattctgaagaaatctttaagctgtattatctgaaaaacgccgagaactttgctcgtcaagacagtggttactgatggctaaaagaatatctaagcgtcgtttaaaaattatcagaaaacaaaaagaacgggccttagtattggcccttcgagaagaaatcactcgagaaattgataaagaaatattaaagacgcttacagcagctatataaatactcctgtaaactaaataggagattaaaatggcttacgtaaatatcaaaacttttgaccataccactgctgatggcgaggttaaaggtactgaagtatctgtagcttttaaggtatattctgactcacatcgcattgctaatgcacagtatcagattttcccatccgaaaaagccgcttattcaacagtagttgatgatgctgcaacttgggcaaccaccaacgcgaaaatgtttgaagctgttccggctgacagcgaagtataaaattaaggactccttcgggagtccttttatgctatattgggaatagtatattattcctactaactgaggagaacaaaatgatatgttatactaagccctggtatcaatcaccattaaagaagtctcattttgattgttggtacagaggtgtaagagctgcagcgttattactaaaagctgcgcctgctttaattaaagcaaatgataagtggtttgaagacaacaacatgactgaaggagctatgtgtggccgacgcaaaaatctataaagtaagtttacagcgcaaactaaaagaaggttttgattctgataaagtattcactgtagcaatttacaattattcttatgacgagtttaaagaactggtcaataaatttgaagcacgcgggtggtgtcctaatagtaaatatggacttgtcaaaacagcccatacttttgatgtttcacacatgccaggaagtccaattaatattttaggtgctttacaccttaaaggatataccaatgcatatcatgagaccgatctgtttgaatatgcaaatgataaaatcgttaacggcaaaagtatcgtcattgacaatgaagacgcttttatagtatttactcagttagtatggtcatttatgcaagctgatttcgccagatttactccgagcgatttgcttcaaaaagctgctgatgcatataataatagtaacagtcaatatcgtcggatggagtggttcatgtgatggatttgtttgaaatgatggaagagcctcaggaagaggttcaggttcatccagtgatttctaaggacatcaaagacgaataccgtataattatacagaagtatggtattaaagccccagaagctcttctagatgaactagcttcaatctggtctgacccgccgccctggtctccgtgggcaaaataatttcacaaagtagtttactcttctaaaaagccatgatatgatacctctcgtaaccaaaaatggagaatatcatggctatttcattaaacccatctatttcagtaaaattatcaaaggttattcctatcgaagaacccattcgctccattgatgttcttaacttcgcgcgagaaagcaaaggattacctttatatgatttaagcgtatgggaagcattagccaatcgttttgactgcaaagaacagtcaattctgtggcagtgcatgaacaataagattggcgaagaatttcataagaaacttgactctatcgttagacgtcatcaaattgataacagtgacattctctatagaggtctatcatgccgcgaggctaaagccttttatgacgctcttattaaaggagagaaatttgacttcggaaaggtagcatcattcacaacagatgaaacgattgcccgagaatttgcaggcaaatggcattactcgacctttgtagtcattgaagtcaataattgtcagcaatcatttgattatcataccaacatgaaatcgcttttaattactgcaccagattctgaattcatgcgaccaaatgatgtgattgataacattgctcagcgcagaagcgctgacatcgagatgattgataaagaacaagaaaggatgctaccgatgggaactaagttcaaagtggtgggtcataacaaagttgaaaaatctggtttacttatggactactttagtgttactatagcttagtcaactagtgattatctagaactagggacctagacccattataccgtccgtaagacgaaagcatttttgaggaaaacatgatgaaatttactgctgaaaccgctaaagtttatactcgtttaattacaactttaggttctgctcaacgtcggcacaaggagttcaatctcaccccagaatatctgtttaacatcatgcagcagacacattgcgcatactcaggcgaaaagtttggaactgttaaaggaaatcatcctgatagcatgacgcttgaacgctggaataatgacttgggatatgtagtagggaataacattcctgtcaagcaaaagtataatactttgcgtggaaataatacgattgaaggccttgaacgaaaagcgaatgaaatcgcagcacgcatagttcgttcttcagattctgttaagccaacaagtgataaagaagcttctcgtttggaaaagattcgtgagtatgaaaaaactataacatcaattaaaactaacttacgtaatcgcgaaaatcatctttctcaatttatgcaaaaagaaaagaatggaactgcaacctcggcagatttagaacttattaatgcattgagaactcgtatcagtggtggtaagtctgaattagctaaagttgagcgtaagttatctgctgttttagcatcagttccgaatcgtccgtcagatgctgaaatccgtgtacaatcaatacggttaattgttaactcacttcgtcggttagaaaaatgctcaatgctagataagttaaaattgaaaaaaggtcttccattgactgcgtccttcttccaacttttgagaggtaaaatgtaatgcaacactatggatatgtagtagcgtataaggataaagacggatttgaccatccagtcacaactgatatgtacgatggagaacgatgtgtggtcttcactaatgaagaatcggctaataaagcacggattcgtacaatgtcggttttaacagacaaactagcaaaaggtaattttactgggaaaagcaaaaccaaaggaatgctttggtggaaaacaactgagctagtgtatgagccacttagcgatgttgagcgcgaaaaactcaaagcaaaaattaaaaatctacatgtagtgagggtaaaagtggcatgattacgtttgaccaattaaaagaaagtcaaaaagcgatttttaataaagtcattgaaatggtcaaacaaggagctaaaggtcaacacattacgattaatggacctgctggtacaggtaaaacaactttaaccaaatttatcattgacgctttgatttctcagggtatctctggcattgcgttggcagcacctacgcatggggccaaaaaggttttatctaagctcagcggaatgcaggccagtactattcatagtcttctgaaaatcaacccgacgacatatgaagaaaacgttctgtttgaacaaaagaaagttccggatatggcatctattcgagttctcatctgcgatgaagcttcaatgtatgaccgtaagttgtttaagattttgatggcaactattcctgcctggtgtattgtcattgccattggtgataaggctcagatacgtccggtagaacctggaagtaatgaacctgcactgagtccattcttcactcataaagatttcttacaacttcatttgaccgaggtgatgcggagtaatgccccaatcattgaagtcgctactgaaatcagaaacggtgggtggattcgtgactgtgtagttgatggtcatggcgtccgtggttttacaaaaggaactgcccttaaagattttatgctaaattattttaatttagttaaaacaccagaagatttatttgaaaaccgaatgcttgcgttcactaataaatctgtggataaactgaatgaaataatcaggcgaagaatctatgaaactgaacgaccattcgtagtaggtgagattgttgttatgcaagaacctcttaccaaggaacttaaatttgaagggaagaaattcagcgaaattcttttcaataatggtcagtttgttcgcatattagatgcaactgaaaccacgtcatttttaggtgccagaggtgttccaggtgaatatctggttcgtcattgggtattagatattgaaacctatggcgacgatgaagagtacgctagagagaaaatctgtgtcatctcatccgaagaagaaatgaataagtttcaatttttcttggcaaaaactgcagatacatataagaactggaataaaggcggtaaagcaccctggtctgagttctgggatgctaagcgtaagttccataaagtgaaagcattaccggcttcgactttccataaggcccagggcatctcaattgacagaagcttcatttatactccatgcattcacatggcagatgcttctctcgcacagcagttattatatgttggtactactcgtggtcgatatgatgtgttttatgtgtgaggtaatatgtttgaattgaaattagaagaccttcaaacaatgattgttggcttacaagaatctaagtttgaagcaccagacaatgttaagcgtgctattaacattaaaattgatacagttctgaatgagcttcgtgatatagcagataatgctaatgctattacttggttcacaggatatgacccaaaggtgtatctgagcgaatatattggttgccagttacgcgaaattaaatttatgctagaggctcaaaatggctaaagactttattattgattttgaaacattcggaaatgtgtcaagctcttctgtgattgaccttgctctaatcacctttgattctgaccccgaagttttggaaagcttcgatgaattggttaaacgtggtcatcgtattaagtttgaccttaaatcccagaaaggtcatcggttgtttggtaagtctactcttgagtggtggaagaaacaatcagctgaagctcgggctaacctggcctcaacgccagacgatttatcagtaattgctggaattaaagaagctcagcaatatctgattgataatggaattcacccatgggattcctttggctggtgtcgtggacagagctttgactttccgatttttgttgattgtcttcgcgatgttcaacgagcccaaggaatttccgaagaagaaattgatacatttaaagaagagccgtgtaagttctggaatcagcgtgatattcgtaccgcgattgaatcactgcttctgactcgtggtctgacaactacccctcttccaaagggtacgctcgacgggtttatcgcgcatgatagtatccatgactgcgctaaggatattctaatgcttaaatatgctcaacgttatgctctaggcctaagcgaagcaccaagtccagaagataccgatccactgagtttacctaaggggcgtggctaatggaagagtttgagttcgatgaaaacttcgaagagtggttcaaccgggaaatcctcccggaaatctctccaacgatggttctggtggccaaggctttgatggctaagggctgggatgcagggtatatgttcggagtagatgttgggtgtgaaatttctcaccgataactatttactttatgaaagagccgttatataatggctctacattaacaaactgagagaaacacgatgaaaggtttagttgtaggtgaaaacgttaaagtaattggtggtaagtgggttggtcacaatggtgtaatcgttaaagtagttaatcgtaatgacggtaaatctgggtataagatttaccgtgaagattttggtgattacatccactgcttgaaaaaattcgttgaatctagtgaaagctatctgcgcaagtgggtacacgtgaattcgctggacaatgttattacccaatcggtgagttctactaattcagccactaatctgtcgctgcataaaaatgttcttgtcactgatgagtgggaagaagacggtaaaactttagtaaatgtagtatttcaaggtaactatgcggttctgcctaaagccgatgtagagccgacggaatcacagcgtcaaggtttagtataaaaagttgtttactttgccacaaggatgtggtactattatcttatcaactactgaggagaataacatgaaaactgaaaacaccgtaaaaattactgccgaagcttttgaagacattctgttcaatcctgacttaattgtcgttcagaaagagaaaaccttcggtaaagaagagcattggacctggttgtatgtattcgcgaaccatggtgatatcgtcccagttcgtacctttgctcgtgtaatcacagttgatggcccagaatacatggagattgtgtaatgaattttaaagaaggcgtacagtacaaattcgtcaatgatgaagcggaagaagaattttcttcacgttatgagtttaatgaagactttgtgtatgaactccatgaaaatggcgggagttttactgttactaaagttgaccaccaaaataacagagtatccggaattacgtgggctaatggcacagaatgtgatgaagttggtggtgaagaccttgtaatttttgatagcgaattcaaatactttactgaagttggaacttccgcgaatgtaattccaaccgatttggttatgaatctttctattcataatcgtggtcaagcaatcgctgctattgcagcactgcagagtgcatatcaatgttaaatttagctcctatttttgaagcatcaaaattatcttatcctattcccaaccgtagcattgggaatgtcatgctgcaactttcttcagaaactggagaaatgtgtgattggattaatcgtccatggcggcagaaagaagaatttgaaggcgagtgcgcagatgttattaactgtgtagtggatgcactttggctgcatttcagaaatcgccataaaaatgatacccatgtatcagatgatgaaatctccatgatggttactcgtgcactgaatgagcaaatcatggtcaaaacacaaaaatggaaggatgctgttaatgccaatgtatgattacaagtgtgaagtctgtggaaaaaagatagaaattatgcgtaaaatttcccatcgtgactatactgttaactgctttaaccctaagtgtgaaggtcaaatgaagcgggtggtttctgctccggcagttcactacgatggattaaagagtggtgattattgatgggaactaaagcacgcattaccatgaaacccggagaaatccgggttattaaagtaggtaatataacttatagggttaaattaaaatgaaaaagattttaattacagcgcttgccttcatgatgattggatgcactgacgctgataacgcaactcgcgtgttagataacgcgggatttactgatatcaaaatcactggatataagttcttttcttgctcagaggatgattttcagcacacaggctttacggctattgggccaacaggaaaacctgttaacggaacagtgtgctcagggctttttcttaagaacagcacaattcgttatgaataaatgaccttcgggtcatttagttgtttacatggacaccgtgttttggtattatagtcttgttggccagaggagaatattatgattattggaatgacaactgcgcaaaggcgtgctaaacgacagttaaaaatggtagagcgggctattggaaaatacaggtttgcttggtggccaattaatgacgtgaatggtcgtactatttggatgcagaaatattatgaagtctgtgaagagtggatttcacttaatgaaaacaacgagtaccggattgaacagtactacggaaattctcgatatgcatacgctaacgttagtgatgctcaatggactatgtttgaacgacagcggccacgatatcccgagtataaagcggttaaaggaggccatgaggttcttggtaaattgatgtatatcaaagaagaattacttgctataattaatagttgatataattccttcactaaccgaggaaatgtaatgattaagaacgaaattaaaattctgagtgaccgagaacatatcattaagcgtagcggaatgtacattggtagttctgcgtttgaagcgcatgaccgttttctttttggtaaattccaatcagtaaagtatgttcctggtattatcaaactgattgatgaaatcattgataactctgttgatgaagctattcgtactaatttcaaacacgcgaataagatttcagttgatgtcaaaggcaacaaaattattgtaacagataatggtcgtggtcttccgcaggctcctgtagtaacacctgaaggagaaactattccaggaccagtagctgcatggactcgtcctcgtgcgggtggtaactttggtgatgatgctgagcgtaaaaccggtggtatgaacggtgttggttctgcgttaacgaatattttttctgtgacatttgtgggtgcaacctgtgatggaaaaaatgaaatcgttgtccgctgttcaaatggcgcagagaatgtttcttgggaagaacatccagctaaagataaagaatttattaaagacaagactggtactgtcgtgtcatttatcccagatttcacccactttgaatctgatggcttaactgatgttgaccaatcaatcattcacgatcgtctgatgacgttagcagtagtttatcctgatattgaatttaaattcatgggtaaacgggttcaaggcaagtttaaagcttacgcccacatgtatgacgaaaatgctgtagtgcaggattctgatacttgtgctattgccattggtcgttcggatgacgggttccgtcaactttcatatgttaataacattcacaccaaaaacggtggtactcacgttgacctagttcttgatgaactgagcaatgaacttattccagcattaaagcgtaagtacaaactagaagttaataaagcgcgaattaaagaatgtctgactgtcatcatgtttattcgtgatatgtctaacatgcgatttgattctcagactaaagagcgtctgacttctccttggggagaaattcgtagccatattgatattgattataagaaacttgctaacgctattatgaaatccgaagatattcatatgcctattatcgaggcaatgttagctcgtaaacttgctgcagagaaagctgcagaaactaaagccgccaagaaagcgcagaaagctaaagtagctaagcacatcaaagccaacaaatatggcaaagatgctgacaccactttattcttaaccgagggtgattctgcgattggttatctgctcacaacacgtgaccgtgaacttcatggtggatatcctctacgtggtaaattcatgaatacatggggaatgtctgccgcagatgctatgaagaacaaggaagtatttgacatttgtgcaatcaccggtttgacgattggtgagcctgctgaaaatactaactaccgaaatattgctatcatgactgatgcagacgttgatggtgttggttcaattttcccaagtcttttggcgttctttagtaattggccagaattatttgaacaaggtcgaatccgctttgtgaaaactccggttattattctcaccaaaggtaaagaacaacgttggttctattctcttggtgaatatgaagaccataaagatgatttcaaaggttggaaacttcgttatattaaaggtcttggttctcttgaagaagatgaatacgaacgtgttattcaagacccggtttatgatgtagtcactcttcctgaaaactggaaagaactgtttgaattaattatgggtaatgatgctgcaccacgtaagacatggatgagtgaataaagaataaatagtaagggtactattgcccttacttagaaggaattaacatgcaacgttattggattactttgatctcaggcgactatggatatctgttcgctgaaaagaaacctctgcccggaacttgggtaaccatctgggttgaaaacattgatggttctaaacatgaggtttatggtcgagttagtagggtgtggtaatctaagggacctccgggtccctttttctttataagaatggatttatatggctttaatcaagaagtgcttggagatgattctaggattcttgcttaaagttatagtgatataatttccctaaatcactgaggaaaatattatgaaacgcagttacatcccatcagaagaattattcaacgatgctatatatcgtgaatatcgtatcatccagcggttctttgacatccaagcagctgaggaattcaaagaacgcttcaaagaaatccataataaaatttttacaactaacaccgctactgctgaagagctccttgaagtagcagaaatcattaaacgacataattgataggaataaaatgaaaattaaatgtgatgatgaagtaatcattggttcttctgacgctgatgattcaacgtttactattaaggcctcgggtaaagcttttgacatcttgtcaaacaaactctataagtataaagttcgtgctgttgttcgtgaactttctactaactgcgatgatgctcataaactgaatggtaatgaaaatcgtccattttacatcaaagcaccaactcgtcttgacccacgatttgtaattcgtgattatggtccaggtcttaatcataatgacatgatgacgatgtacaaaacgttctttgaatccacaaagaataatagtaatgatttcatcggtgctcttggtcttggttctaaatcaccattaagctatacgagtacatttaacgtagtgtcttatcatgatggtaaagctacaggttatactgtcatgaaaaaccgaggtgaacctactattcgtccgatgtttgtcgatgatatgaaagaagacgaagaaactggtcttgaaattacagttccggttaaagtagaagatattgatacctggcactatgaaatcgcatatattttgcgtacgtttggtgctgttcctccgaaggtagattctcttcgtcgcgaaattgaatatttcccggtagataagaccgactggttcagcgttaatagctcttacgaaagttatggtctgtatgcagtttatggaaaaatcgtatatccgattagcggtgtagatgttaaggcagattggctgcttaatcgttatggcaaggtttatgttcatttccctcttggcgaattagacattactccatctcgtgaagagctttctcttgacgaagaaacaattgctaatatccagaagcgtgtgaatgctcttgaagaagaggtaattaccgcagatattaaagcgtttgaagcgtatgaatctgaccgtgaattcctgcgtgagttcaataagctgagttctaaagagcgtactattcttcaaaaccgtggtgttactattggaaatcgtgatatcaagcaggttgttgcgaagtataatcttgataaaattcgttcatactatgtagataacgaagtatcagtttatgtttcatgcgatgaacctgctcgtcgtaaagtgtcaagcagttcttggcatcgtcataaccaagtaaacatttctgatatttgcggggttgatagaactaaagcgttcgttcttattgacgataaagcgggtaagcgtattgctacggttcgtgctctgtgtaaatctgggttagttccaatctgggcacacattactgtaatcaaagacaatgaagatgaattacatgtcattgatgagctgaagaaaatcatggatactgatgaagttgtagtattccgtgtgtctgaacttgaagcccagagaaaagctcttcctgattacgacactggtccaaaagagaaacgtccgaaatctcctaatgtttctctgcattggattgataaagacgggtactgggaagaagaccgtcagactttagtatcatctgaaattgctgagcttgaaggttatgcaatcggtcgcaatcgtgatgaaatccacactttcccagataatgtttggtggtggaatatgagcatcacagatatgcggtctctggcagaagcgtgtggaattaagaaattctatgcaattcgtccgggtgctatgaaagccgctgcaaaagctgatggattgctttcatttgaccgatttattatcgaccaatacatcaagtgtattgataaggtagattatgaccagtacatgccatcaaatgctactggaaaccgtatctgtggaaatattgcgcattacgataaattgaatttcttgtcgagtaagtttactgcgtctggaatgaaaaatccgttcctgacaaaactaaacaaaatcgctaaggtttgccgtaccagtaaaatcaaagatgaaaacgatgatttagctttatgtaataaaatttataataaactgtctggtgatgctgagacaatcttctataaaaagattgaacagtttaaagatgattatcctgtcatcgcaagtgtcttggatacttggcggactgacagcaaactcgtcgatgatatcgtaaaaatcatggagctccttgatggagcttctactcaaaattctgaaaataaaggtgaataaatggctgttacctgtctgtctgaaatccaaaaagatgcaatcgttaaaaacttcaaaaacggtctgtacactaagaaagagctcgccgagaattatggtgtttcccgtgacactattcggcgtgtgtttaaagagcgtgaagctcgagctgccgcggcagctgttcctgctaaagtagaagctcctgttgagcgtgaatttaaatgggcagcaagttccaaattcatttcaattactgaaggccgtactacttataatgctgatagccaacatcctggatttaaatctgcactgcagaaacttgtagatggcgatatcgctggtgctattgaccacattaacctggaacaaggcatcaagaaattcgttcagggtaacgtccgaattgaagatggtacgctgttctataaagatattgaactgaaatctggtctgactgagcgtatagttcgagccatggaagatggcgaagactttaaacgttatctgcctttcctggaaaacctgatgctgaacccgtctcgtcgtgcagtttatcgtctgtttgatttcctgaatgcaaacgatatcgacatcactgatgatggtcacttcattggttggaaagtagttcgttccacttatatggactgtgcttcaaacacgtttgataactctccgggtaaaactgttacaatgccgcgtaaccaggtagatgaagacgatcagcgtacttgttccgcaggtctgcatgtctgctctaaatcttacatcggtcacttcggtagtggttctgaccgtattgtttcagttaaagttcatccgcgtgatgtagtatctatcccggttgattacaacgatgctaaaatgcgtacatgtggttatgtagtattagaagatgtaactgatcgttggggttcagaacttcgctaattataaggagccttcgggctcctcttttattatgggtgaaacatgattaatccatttaatgtatctcattctaaagttgttaatcttcgtggtactcatcatgctgctacagtgttttgtcatcatgtagttaaacatgaaggtgatgttcactatgcttggttgcactgtgatgaactcgtagaacttggtgatgattttgttgtggaaccagacacttgtaaccacgacgatcgtgtttattttggtgaattacatatcagaggaatttatggcattgatgaacaaagccctgcagagattgaaccaactccggacatttaccctagatttgaataagttaaggggtgaagcaaaagtaaaaatcattgatactgccagatatagcttagatatcgatccatctcaagatagaattgacgttcttaaacgatgcagaattgctataccggcagagtatgtggtagcagattttctcgatggatacgtgaacgatcaagttgttgaccataataacaacgatccatacgaatgggcatgggacgtactagcccacccgtactatcaaggagttagggttgaagttaaaacacactttgttcatgaccgagcaaatcataagccatggattaatgttacgactggtaaagacggtctattccctaatggaagtggaataaatctagggcccatgtttaaacataaagtcgcagactgtataattatattcgttgcagaagaagtgtcccagaatgtcatacagtacacaccgatgttcagtggcggtatcgaacagctcatggaagtcgtaaaaccttcgcgagttggtgctggcgggtacatcatgcataaattttaaaaagttgtttacttccgggattggccatgatactatggccttacaaactgaacgggagtaaaacatgagttacttagagctaaaatcacttcgagccaaacgcggaaatgcttctattaaagctgagcttttgaaagagtataagattcttgaatctatgaattggcattatactatcattgcttgtgataacggtgattcaacgtatggcgggttgtatcctaatggagctgccgctgctcgtgatgagcacatagagaaagtcaaagctctggaagaaaaaattcgtaatttgtgcatttaatagtttactttcttgttctccagtgatactatagtcttgttagctaaactggagaacaaaatgaaaaagttacttacgattctgaagaacatctttgtagtattctgccttatcgttactttcattggtgttttcgcatgggatttagttaacgtttggattaatgctttcatctgaggaaaatataatgattcgtaatagttttgatcgtcgctttaacttaatgagaactgttgttctgtctgttattgttgcggtagcgttgggaattgttgctatattcgggttcggaatttattttgctattcaagcggttgatattattcagaccgatggccttaaatctttagtagaaaccgtatgggaaggtcaaaaatgaaacgacacatcgtgtatcgtctgcttgctttaggtcttcttgtgttttgggttggtggtgtaacggcagtagtatatttttggtagtagaaggggcttcggccccttatcggagaataaactttaatcaactgaggaaattaacatgcgtaatattatgacttttgctgatctcgataacgctggcgcagaactgatcggttctattcgtaacggtgattgggcagcaggtgctccatctcgtgaaattactgagcgcgaaggattttattttttgatgttcaatgatggcaaagcaggttatattggtgcatctgctcgtttctttgtagctaaacagcgttcaaaggcaggatttgaaagtgttctttctcatatccgttctggacgttctcagttgggtcgtactctgcgctcgaattgcatgacctacggtgtgttctggattcctgctaataaaatgaaaccactcaccactggttatggcaaaggtcagcttgcattggcgtttactcgtcagcattcaagtgacgcgcagacctactctgagctgaatcgtattctgaatgataacttcatctttactttgcagaaatactaatgagaaccttcttcgtgatgggctatgtgtttctgatggccctaatgatttgctcaggaacattcatgtggtatggcctcgtgcctaccactaaagtaattggaagcattgcgttcaccgcagcatttattatgtttgagcgcatttgtaaaattgcaggagtttacaaatgattaagaaactcctagtttctgctgtagttatttccatcattcttttggttttgtactatggaatgatttacggaatgatttatattgtgcttttcatttccgatgttatagtacaaatcggctcactaatttggtaggtacaatggatatttttgacactctattaaaacaagcaggttctatcgatgatttggctaaggcatcaaatcttcgtcatcgcgatttgaaatctatcattgataatgaagcaaaagagtatgcgatttacactgtagaaaaccgtgctattccgaacttgattgatgggtttaaacctgtacaacggtttgttattgctcgggctcttgatttagctcgcggtaataaagaaaaattccataagcttgcgtctgtcgccggtggtgtagctgatttaggatatcatcatggtgaaacctctgctcaagatgctggtgcattgatggcaaacacatggaataacaactatcctctgttagatgggcaaggcaacttcggttcgcgtctggttcaatctgctgcggcaagtcgttatattttctgccggatttctgacaacttccgtaaaatctacaaagatacagaaatcgctccagcacataaagataaagaacatgttccgccagcatattatctgccggtaattccgactgttcttctgaatggcgttcgtggtattgcaacaggatattcaacttctattcttccgcatagttttgaatctgttttggaatgcactaaagcagcacttcgtggcgaaatgatggaacctgaagtacagtttcctaaatttaacggaaaaatcgttcaaacagaagacggttctgttgagctgcacggcgtgtataaagaaacttcacggaactcaatctatataagcgaaattccatacaagtttgagcgtgcttcttatgtagagaaagtactcgatcctctggaagatgcaggatacatcacttatgatgatgactgttctaagactggttttggctttaaggtgaaattccgtaaagactatgctttaagcgaagaccctgagcagcgtcatgctaaaatcatgaaggattttaaactcattgagaaaatgagtcaatacattgtggtcatcgatgagaatggtaagctgaacgataagttcaaaacttccggtgagttaattcgtcatttcgtagaagtccgtaagacattcactgccaaacgaatcgagcataaaatcgctgaaactaagcaggcatttaatcttgctcaggcaaaagctcaatttatcaaagaggttatcgcaggtaacatcgttatccaaggcaaaactcgtaagcagttgactaaagaaattgaacagaatgaactattcaaagaacattctgaaaaacttgtttcaatgaacatctatcacatcactgatgatgaagcaaagaaactcgctcaggaagcaaaacgtcttgcccaagaggttaagtactgggaaaagacaactcctgaggctgagtatctgaaagacctggaagaactatgatagaattttatttaattataggttctgtaattgcagtattaggtctagttttattgctcctcagttaatctagggaacctggaggtcatctccaggtccttccatataaatctatatccctccaaaatccctccttagaatgccccaaattattttcacaaagttgtttacaagctggttagcagatgttattatagtctcataccaaacaaattgaacaaaacagaatggagaatcacaatgtctaaagtaacttacatcatcaaagcttccgaagatgctctgaacgaaaaaactgctgctatcttggttcaggtagctaaaaaggatttcatcacttctgctgaactgcgtgaaatccttgaagaaaccatgaacgcaggttctgttaactcaaacatcggtgttctgattaagaaaggtctcatcgagaaatctggtgacggtttaatcatcactggtgaagcacaggacatcatctctaaagcggcagttatctatgcagaagagaacaagcctgaacttcttaagaaacgcaatactcgtaaagctcgtcctctgactgaagatatgaatgagcacaaagacctgatgatgagcattcttagcgagatggaagatatcttgcctttgaaagaactgactgtttaccgcagtaactatatcgcagttctggaaaaacgtaccttcggtattcgtagtcttgaagttaacaacaaaggtactttccgcatcttcggttacaagatttctgaagagcatcagaaacacttcactgaccttggaatgtcttgccgtgtagctgcaacaggcaatacttacttagatatcgcccgtactgctgaaaacattgaaaccatcatccgctctattaaggaactgtaatgaacaagtttaaagtactgaatgaacttcagcgttgtgtagaaaaagttaacttgaatgctaatatcccaactgattgttgggatgtatggttccgtgggcactttatcggatacattgataagaaattcgcaaaatgctatgctatctacaatgcagatggtaaacatatcatggatgtagataactaccaaaaggcccttgctaaatttgttccaatggcggaagctgttaactcaatggagtggttagagaaaatgcagggtgaacctgttattcgtcaaattggtattcgtgaaaagaaaagtttgtggcagaaaattaaaggattctttaaatgagcaagttttccgaacaaatgaataaatttgttgatgcttctcgtcacggtgctctaattaatgagccagaagaagttagtattcctgaaatttgctttaaagtagctgattggtgggatggacgattacttcaacgccgtatcgtttgtgcagcaaaccgttttgaattgaaaactggtggaacaattgtggttccaggcactcgccattattctgttgatatggcgaacgttctagatatgttccgtgacaaattagtttctgaccatgtccatggagacaatcaaggatttgttgaccagtggggtgagtacttcacacgcgaagaagcattaatcatcgctacacatgcaggccaagttaatacagttcgtcctaaatcaggacccgccaatgaattattctcagaggatttatactaatgattagtacattaaagaataacattacgcttttaaaaattcagcgtaaatcgcttcagcgttcgttagaaatgatggacgataattggggtacatataccaatgaagccgggtttaaaatggcagatagcaaattcatgaaaactctcatggataaagaatacatctgcccgtttagccatccatttaatggcggtgctaaaccatttcttgctgaaatgtacaaaataatgacagaagaaatgattaaagatattgactattatatcaaggaacttgaatgtaaggaagataaagcgtgagagcaataagcgccaaggcagattacttcaatagcttaaatcgttcagaaaaggctcaaattaaacggtttatcttggaattgggatatgtgcatgccggagatttaaaagcacatatccaagaatgtggtattgctaagcgttttgatattacacgcaactgcttaaatgaggtaattgcacatgtacaacccagtagcgaagaatgactttaacaaaggaggcgcgcataaagataaaaagcgcgctgccaaagaatcaaaacgtaagcaaaaacacaaaggtaaagacaatgcgcattctgaataattccaaatgtactactttaactattatttgtgatgacctagaagctctccacaagaaattaggggaccattctggattagtagcagatatccattctgaactaatggaagacctccagaatgctggctatggagactggatggtacacgattggaataatggtacctttactgtagctattatcgctaatgttgaacctgaagaagttattgaacaatttcagaaatgtgttgatgcttatgacattggagattatctatgaatactgaaactttacgcagagaagatgaagccaaggcatatcataaacgcgttgaattgctttcagcaattaaagtagaatacaccttacaagttaggcttaaagttcttaactcttgggctaatgacttagaagtaaaacatttagagcaagcagtaatgtttacgtttactcaggaaacttctaaaccgtttagtctatcagcagatttccacacgtatggaattattactattaaagcaaaggatagaggtgacattataagtggagttgagtatatcgaaagcattttaggtaatcgcggagaggtggttttagcatgagtcataacctagaatctgtcgttgaatcacaaagatatcttgaagcgttaatgaataaaatcgcgcttggaagtctgattgacttgtcctttcaagaggcaattgacgtatgtcactggatgaatcgtagggttcgtccaattggaaaggaatggtatttaacggctagagtaaaagatggtcgctacgggctctggatgtcctctggtgctgagtatatcactaccaaggaagatttgaattctcgttgggaattggcataaactggtttacaacgcggtatcaagatgatactataatcacataatccattatgttgtaggaaaaataatgactaagtttgaaattgtccaagaaattgttactgttgcttctattctgactaagttcaatgctgaacatatcatggagaagcgagatgaatttattgcgttcttgaatgaaattggaatcaagaatgagcaggggcgtcagttaaatcagagcaactttcgtaaaatggtttctgagttaactgacgaagagaagagaattctcgttgaagaatacaacgagggatttgagtctatctatcgaacaatggctatgcatagtaataagtaatcacttagctcttccaagagctctaaccgcctgaccacatatcgatgttagtctttcgttagataatgcaggtttggaattgtaccagtacatttcaacagttccagcataaacattgtctaaattgaaatacggacagctaaacatatacgatatttcaggcggttttctttttgttggtaagaaaacaaattccttatccgtccaaaaatatctacccgataaatgcgtgctatattcagcagttgttttgtcgattggatatcctcccaagtttttagaatctaccgtgctaggtaaagtcccctcataagcaattaagtctacgaagtagttcaagtttttaggtctgaacgtaaagaccgcagaaaagtctgcaccgcttgagatatgtactatctggagttgttcgagtgctgtattatcaaatcgggaatctctatccttttgaaccagtttatcatacttgtcataagtactgtcgacgtaagctgtaataagactatcagacttatatccagcaaacgccaatagtgctaaaagtacgacaacgaaaacacgggaaaagagaactcttcccgtggctccatctttgaataatagctcgagcaacccaagaaacatatcaaaaaacggtattgattgtttgcttgccatattgctctccttacagagctatttattgctctagcatatgcttaatatgctgtaaacgacagttggaaagttcgtccatcattggcgtaaagccaattccaaaaagcatttgggtctgtacaattatagcatcgtcttcctctataatctctagagctgttaaaatggaactgacttccatcttcaatatcaacgcgccaatttacattaaaattcccactgccttctaaaacgatggcatcattataaccgtcccatttactaggctctgctagcccaaaaacaaccaaattaaagcctgtttcccatatacctgataaggacccacgagaatcaagtaatacgttccacgaagcactgttcttatcattccaagcgccacgaaccttaggtcctgtcgcagggttgttacctgaaatagttatactagcattccaaacgtttcttcctatcatgttggacatccaaaagggtgttcccagccttaattttgctccagctgcaatcattgaagattctcctgttacagccttagctgagcttcctacattaggacctgttactgccatgatatctcctcaaagatggggccgaagccccataacattatttagatttaagttcttcaatttctgctttaagctctttaacagattcgactaataacgcaattactgcattatagtttaaacgaagtaatgcatctttatcgttatcagttgtaactgcttcaggaagaacttcctgcacttcttgtgcgataaggccagccgatggtttagtatcaccatttggaagctgtaaatcataaacattaccagatagcttcgacactttatcaagagcgttatcaatcttagcaatatttgatttcacacgacggtcagaacgaatttcaacgtcccagaaattaccaacaccttcaacgcgtagattagcagcactaccccagatttttacaccagtatctgtaagtgctaaccactggtcaactccagcggcgttatagaaatgccatccagcgcgaacatattcacccgactgccatgcgttaaagctatcgaaaatcgtatcaccgcgctgtaaacgtattccatttacggtgtttgcattatctgtgtttcctggtgctaagtgggctaattgcagatatccatcatttctgaatacaagctctcggccactttggttacggataatcatgtcaccgttttgaccatttgaccaaataacacctctgacatttccagcagaatcacggaaccagtagttagagtttgtaccagctgaacctgcatcacagtaaacattaccgtttttagcaaaaagaccaccagcattggttgtgtcagcggcgactaagtttccgctagaaactttaagactgctactaacatctaacccgcctcttagagtacttttgccatcaacttctaactgccatgtttttaatctggtgccagttacgtcaaggttaccagttacagtaccaccggctaatggaagataagtatcgccagcgttactaatagcagaagcaaccttatcatcaacatatttcttgttggcagcttggttattctgtgtaggagcatcggcaatttgcacatacttggtagtaggaacaataataccgccgttggcattaataaccccattaatagttgctgtacttgatacagtcaaagctctagaaactgctgagtttccataaactgtttggtttccatctgcgtcaactttaaacacatcagtgtaagtttccgaagctggattagctatggcagttgctgatgatttagcaacaacaaatgattttcctgaagcaaataccagcttagcgcctgagttagattttttaacgaaacctaaatcggagtcttttcccatcagaataaaactattatcgttagtattctttatgttttgagaaacgatcaagcttctgctcatcgcggcttcgccatttacttgcaagcttcctgaagacgttagagctccaccaactaaaacgtttccatttggctcaaagcgggtttcaccattagaagtatctgcacttcctgctctgatgtggatgttttgaccactagaagaacctaaaacaactgcgccagattcattagcccgtaatacaccggttgcggaagtagaaccaaggttcagtcttccgactaatctagcgtttccgtttgcggttaaatcggttgtaactaaattaccgaattttacagtttgtccttcaccaacaccgaggttgttacgagcagaagctgcagaagttgctccagtaccacctaaattaattggctgaacaccagaaacaacttctttccatgcagaccatgaaccattttgtccgtagcggatatatgtgccttcaacaccgccgttctttgtagtaaaggtctgcttacatgaccaatcggtatcagaaaccttgcgtaaagacagaacttcaagaacaaagttaccatcagatgtaggtttgtttgttatcttagaaccaccgccagaagatacgcatttatataactgacgagtacctaaatctgatcgtctaataatcagactattaaggtcgatagtcttatcggaaatatcaactgcctcttcagcgccgctatatgtctgattaaaaactaaatccccttctacctcaagaccgctggatttaactagaatatatttactaggagctggagtagaaactgcagtttgataaccaaattgcacgtgtccttcaggagtaactttaagcattgctacggcagcaccgctaccaactttgcgagcaagagttattctgctatacttatccgaattctctgaaccaaaatcagccattgttccattagggttttcgacttttaagttagcgttaatagtcaagttaccggtcattgtgtcgccagttttacttacttgcttattatcgccagcagtgatgtcgtttttaatggaagtcaaatagttgttaaggttaccaccaaacatcgaaccagaggtaatattcccgtctttagtcagcattgctgctccaccgactttaactgctacaggaacatcaaatcgaccgtcagaacggaagctaaaatcaccagcagaaacacctccagtagtttttgcgcgaatattaatttgtcctaaatccgctgtatttggagttgcccaaattacaccgcgttcattggcgtttgttctaaaccatacatgagcatttccgcttcctgcattaacatacactgatgcagtaccggtgccggaagcatgtaaattaggtgcagctaaatcaccggtcatggtgtcgccagctttcttaacttgggtatcgtttgtcagattaccaagtccgacatcagccttagatggcttatttgctgtaccataaagttcgttgtatctaacatttccctcagcaagacttctgtcgttagctgcgtatacgcgaactttagcgctggcgtagtcgatattaatagctgacatggtatcgccagcattcataaaaataccggagccatggctataaagaccattttgaacactaacaccagatttagtaacaccacgccagaaagtaccaccatatgcttttaaacgggtcaacatatcagcattagaggtaatgttttcgattgatttaccgccattaccgcctaagccataagcaccaacttccatcacgtttccgttagattcaccaacgtcgcgaacagcagcagtaccaagacctaagttattacgagctgctcctgcgctagtagcacctgtaccaccacggttaactggaagagtacccgtagtatcgccgaaatctggttttgcgtaactgtcaaaaatctgtttcattgaaacaagaatacttccagctggtccatatccaccagtgtcttggttggtttcatagataattactttaccgctatcttggccgttgtatccagcagtgtttagcactgtaacataaagcccattgccgtatcgaggaactttagcgtaaaaatcaaatgaagcctctgaatctgtagcagcatcatttttaacaacgtaatactctggaatctttcctttatcaggagaaccaactcgacgccattcaacccagttatctaaattgttagtgctccaagatgttaaatttcgtcctgataacgtgataaaatcaacgtaatgtctaccgtgcccagaatcaataccaccgctaatcattaaatccagttgcgaagaagccattcctggatgctttattgtagctacttttacccagcgagcagttgacgcagttgcagcagaaatagtatattgccaggcttgacgattgttttctacattcgtcagaagagtaccggatttaccaggacctcttccgctcatagcgtaatacacctgtgaatttctgaacgttaaattactgtcattagttaattgaagaacacccgtgcctctttggtttttaatatagacgtcgttagagcctacacccatttcaagaacaagagtgcttccactgttaattttaacagtcttattggtagataatcttaaatcgccaggaagagtcgtattaccagagccgtcaagcaagaccaattttcgggcttcaacgttgcctgcaccgcgttgtacgaattgaatagtttcagcgccatcatcaatagtaccgatttcaagaataccactgttgcttgtaccgccggcaccaatgtaccagccatcattagtagcacatttgccaacgatatgacgagttatttcaccgctcaaatcagtagtttcaaaactaattgctttattcggagaaatggttacattgtcttttaacgtagtagttccatcaacgctaagagttccggaggtatctaagaaaggaacccctttaccggcgagctgtactacggcatcattttcatctttagtataaatggcaagagtacgcccatgtgtattcaaagcgatttcgccacgggctacgatatctgcacctggtgctttattctctgtgctagttcttttaaattgtatttgttttaagttttgatcggccatggctacctcttagtatgtgccaaaatctattgttaccccgcgtgaaataacctgatctaatctaggagcatattcaccggatgttgctttatttactataactacgccagcgttagccctaagtacaccggtcatggtatcaccagctttcttgactgctgcgttagctacgttgctaacagtatttattcgtccatcaacataatctttacgagttaaatcgtctacgccagatggctgttgtttagaagtaaatacgttagcggtaattctaccagtctgtgcagttaagttaccatttttagcaatttcaactatgccgctggaatcttccgttccgccgccgcgcaattgaatttttgaattccctccgatgataagaacttcaccattactaccaccgactctaataccaacatttgccaacggacccatgcttaacttgccagagccgccatatgctatttttacttcgcctgtatacgtaccaccacgggatttggacacgaagtcgttatcatttgcttgaggtttatctatctcagtataaaccttcttacctctataagttagggagtttcctgccggcacaagaggaaaagtacccgcgtgccaaataggatttccgccaactgttgaacctgcttttaaatcggccatagtttatcctcttatatattttctatttatacgaaaaaaggaagcccgaaggcttccttagtctgatgtttctctgaacgattgaactggaataacaccgctcggatcgacttttgaatttggaagttccataatcatagtggttcctccttcaacgcctttattcattcttataccattcacaccaaattcttgaacaacactattcagtttttcgctatgagaggtttgaacaaatacaaggtttttgattttagagtcaccaactacagacgtttttggatatcttgataccacaatagtaaatccatcagcgtctgtaggaacagcggtaaatctttcaaatcttaaccatctatcagctccattttttggaacttctaatgatacgtttgaagataataaagatgagcctttgaaccatcgcaggctagctctagtagtagaaccagcatcaagaagacttttagatgcatacatatcacatactaaaaatacagaatccccaggagatagtccataatcagctattttgcttatagattcattttgaactggatatcgcttatattcatatccagtagaatccgagtactcattagtgtcttcaatggaacgataagggcagcctgtatatcctacatcgccaacgttatcatatacagtatcgactttagctctggaatcttctttaacctttccatcatttccgtaaaatgactcaattaatatgcgtccttttgctgctccgagcactcctacataagcagagtttggaaatgatttggaaaaatcagaacctggccaagaagcagaccacttatttttaaaccacctgtctattagcgggctggattgaaatcgttcatgtgtcattataatatacaatcccgaagttaatccatttgcatattctacaaacgctttgttattagcgttgttatcatcagtggtaacgtcaaatgttttaaagttaataaacctgtcaccattaacttgaacaacattaatccccctccgtaaggaggaggtcatatcaaaggcaccgttaatattcaattctggcttattcggaacagcattagaatgcgtagcataagcttttagccaatacttcacagagtttgcctcagagaggattcgtgtttccacgaaatcctcgccgaaggctgccattaaaattggttcagccattaatcacctacccattcaaatttgagagtttgatttggacggtctggccagattttaactggaccaagcttaatccattccaaaacttcaagggttttaacctgagttgatactgagctcggagctccgatatcagctgcagttggaggagtagcagatgtaaatactcgcatccaatcatcaaacttattaaggtttggattataaatcctcatccacacagtatgcgcgaaacgcttatcagcagtttcggttgtcggaggataaggcgtccaaagctgataagtattgtttgtagttacaccaacctgagttaaaacaccaccagctgcagttttttcttcatacccagtcactactaaagtgcttgggttaccagggtcaatcggtgttctgattggaaccatataaccacgaagacctttcaatttagtagcgtctttgatttcagcagtccaagaaccttgtcttattacagtttcattcgttggcacataccaggattcagaacccgtaatgacgatagcagaactatttatgttaagattgccggtcatggtatcaccagctttcttgacataacggccatcagctaatcttgcgtagtttttggtagttaaaattggatacgatccagttgaatcctgtgcaaaaatttgtgtatcagcgtcacgggaacgaataaatgcggactgtgattgggcaccgaatattgaattcaatccctcgacagcaagcatctgaacgtccttaaccataacagttccgccaactattgcatttccagaagacctcagagttttagttgacacttcgttaggaacttctaacgtaccgttaccgccaaatgtgtaggtctggcttgcagcagtagttcctgttccgttttttacgcgaacttttaagtttccggctgaagctgtttgaggctcagcataaattataccacgctcgcttccgtctctattttgaaaacgaacatgcacaattccagtgtcagcagttggagaaattttaacttcaccaccattagcatatataacattcttgacagaaatattattgctaaatgaagtgtcctgactaaatgtccaagctccagaaatagtctgcgctatatcgcgacgagcatatttgtctggtgtttgaccacctaacattcctgtgtcataggctttaccgagacgaggcaagtaatgtttcagtgtaaggttcaattcatacggagacactgcgacgcccttagaggcatacccgttatccggaagagttgagccattggtatcattacctttccacgttccatcgcctgtagatagcctcacggtccctctaacgctgtctgtagcttgccatgactctgttacctgaatagtctgtttcaagtaagcaggaggaacaattctatcacttaatgtgcctgcatcaacttgtgcctgtgtagcatactgagcaagaccgatagctccttcggttgctgttttagcatgtaacgcggcagcagtaactattttcttagcgtcggttccagttctaacctcagcagcagtagcaagagtggttgtacctctttgagaagtacttgcttcctgtatgttgatggtataatggtcccagaggttcccagtaatagttaagccagaactagtattaacttggatacgatcggtattagcaaatttatcgaacagtaatttagggtttaccattactgtacttgaagtaccagcttcaaattcaccctgggcaccaggtgtcgcgaagcgagcaataccagtacgattgttagttgctgtacggtcatttaatgttttaggtgtaactgctttattagtcacgccgccagcattaacttcagtttgtgtagctatttggattaaaccaattgctccatcagtagcaacttttttatgcaaagattctggtgtaacaaccgtaggaatatttgaagaagcaggagttccgtttctaacttcgctatcagttgctaaccagactattcctgattggtttacagtagctttatactcacgaagagtttttggagtaactgcatttttgtaatcagaatgatcgaatataccggtgccagcagaagaacgatcagcagttgtgttaggagcaccaccagtttttactaattgaataacacctaaccgtgaatccgacgtagtacgataaagcagcttcttaggagtaacaattgtaaaatcgtctgttcctgcatccattttagcattagtcgcaatctctgctaaacctctacgagtttcagtagcagctctttcgttaagctttttaggagtaacgattacattatccaagtaagaagcagttgttgactgattaacttcgctggaagttgcaattcttgctataccagtttgggtttcagtagaacgacgtccatttaaggtttctggcgtaattgctaattctttttctgggtttgactccgcattagcttgagcctgcgtagcaagagcaataacacctaatcgggctctagttgtattgtctttagcatcaactcgttctacggtagggtcagattcagttacaatccaatagctttttccggatgctttatcttcaatatatgcaagcccaagaacaggaacatacgatgtagttccgttaaaggtaattgagcttgattgcacccatgctgcatcaggtggatactctgaacgttttggaaattgcagtaaattcaaattgctagcgatagtatcaccaccagaagctttaattactacagtctgtcctttgcgcatataattcattgcgattgtgacagtatccccaacagctacgtctgtaggcaaagtaacgttaattgttttaacggtattgttatctgtgccaaatacagaaatatgctcattaggcattaaagtaacatcagaagtaattattcttactctggtgcgtaaatcattttcaaaaatacgccagattttgtcaatcgagtcatataccaaaaatccggtgcctgaagtacgtacttgaacctctgtttgcccaggagtcccaattgagatagttgggtcaaacgtacgcacagtcatatggttaattggcgatgtaccgtcaaggtcagtaaaattgatgatatcgtttgaattagcgaacaacggcagagtaataaaaatctctgagttggaagtataacgacgaactacgttatcacctgcctgaacttgcgtcggaacaatcccgttcggaactaccatcttggcagtatcgccaaaatctgttaaactcgcacgccatgcaccattactaaacgtaagcataatttgtgaatacggacgtgtaagtcttacctcacgcagacgcgattcaccaaatacgatagacgcaccagtatcttgtgctttaattaagattccgttatagccaggacgcccgccaatatcacgaactacgatggtatcgccttcatccggtgctaacggaagcagtaatgtagcattacctgcagcgttagagtcaacgttgatgaactgaccagattgaatttcaaactctcctttacggacggtataaatccagttcgggtcaacacgtaaagaagtccaattcgcctggttaaaatctccagcaggctttggaatatctttatttgcaatccagatacgacgtccataagtcacagcaaaatcagtgagatacccacgtgtcgggtcatatttttggatagtgttttcttgaataacgtactcgacggagacgccgtcggttttaacgttgcggtcagcaagtgccacatttataactttatttccgcctgcgtccaagccgttcgttgcacggaaatgttgtttcagtaaatcgctcatagagtctcctatggggttatgcttcattatagaagtatttataatggctgtactaactaattgaacgaggttcaaatgtctgatttaaattgcttattcgccgaagaagaccaagtaaaagaaggcgtcattttaattgacttgtcacaaattgcaatggcgacaattcttcatacgtataaagaaggtgacaaactaacaactcctatggttcgtcatcttattctttctactttaaaatttaatgcttttaagtggaagaaagatggatacactaaaattgtcatctgcgttgataacgcagttaatgggtattggcgtcgggacgtagcatattactataaaaagaaccgtgctaaagcccgtgaagaatccaattgggactgggatggatactttgaaggtcttcgtactgtaattgatgaatttaagcagtatatgccttattatgtcattgatattgataaagctgaagctgatgacagcattgcggtattaaccaaaaagttcagtctcgaaggccatccagtcatgattgtttcttcggatggtgactttactcaattgcataagtatcctaatgttaagcaatggtcaccaatgcagaagaaactggtaaaatctaaaaccggttctcctgctttagattgtatggttaaaattattaaaggtgacaagaaagataacgtagcttctattaaagttcgttcagatttttggtacacccatgttgatggtgagcgtactccttcaacgaaaatgacatttgttgaagaatgtcttgatgctggcgaaaacattaaagatttgcttactgaagaacagtataagcgtttcttggaaaaccgcgtgttaatcgattttgattacatccgcgaagacattgttgctaacattttagattgttataataactatcaattaccgggtcgtggtaaaatttatagctactttgttaaatccggtctgtctaaattaatgaaagaaattaacaacttttaaggtgaatataatggctaagaaagaaaaagagcaagtagtatttgatgaagcggtacatggacaggctctgcgagatatgattaaagaagcctcaggtaataagttgaaagcagaaagctatcttgaacttaacaaagacattaaagaccgcgccaagaaagagcttggtgtagaaggcaaattatttaatcagctgcttgccctgttccataaaggtacacgcgatcgttttgaaactgaaaaagatgaagtggtagaagcttatgactctattttcgcttaaagacgagggggaggtatccccctctgaatccattaatcagctgttagataagcaagctaacggatttactattgagtctatggtaacagaacttggaatggggtatcttgaagcaacaactcagtggttagaagaaaattctattcctgagggaaacttcaatagatatattccacctgcaatcatagaaaaaattatgtcagaagcattagaagaaaatatgcttcgaccatcatttagtcaaacacataaaacgaatagtctggattttttattatgattcgtctccgcatgcctggaaataataacagatacgttaacggtaagagcgtttatcttttatatttaatgctcaaacaacactttgccggtcgatatgacgttgttaagtataactgggttatgcgggtctctgataaagcttatcaaaagcgtagagacaaatatttctttgagaaactcgctgagaaatatacattaaaagagttaacactgatattcatgagtaacctcgtagctaaccaagatgcttggattggcgatatcagtgatgctgatgccctcgtgttttatcgtgaatatataggtaaattgaagcagattaaaacaacgttctcggaagatgtaaagaacatttactattttgccaagaaagttaatgtagataagcttcatgatatttttgaatataatgagaaagtcggaacatcttatgtgttcaaacttcttcagtcaaacgttatatctttcgagacattcatcatgcttgactcgtttttagatataataaatactcatgatactgcaacggataatttagtttggagtaattactccactaaattaaaagcttataaaaaacttttaaacgttgacggtgctgaagctaagaaactctttattagcataatcaaatcttgtaaagaaattagtatataattaatctatcgtccagttgcaaggacccatgttgcaacaacaactgttaaatttaaaaaggtaatcatatgtttaagcgtaaaaatcctgctcaacttcaacaacaactggctggtctgaaaggtggttcttctttctctaacgaagacaaaaacgaatggaaactgaagaccgataatgctggtaatggtcaagcagtaattcgcttcctgcctggtaaagatgaaaactctctaccgtttgtaaaactgatcaatcacggtttcaaacacggcggtaaatggtacatcgaaaattgtacttctacccacggtgattttgattcttgcccggtttgtgctcatctgagtaaaaacgattcttataacagcaacccagctgaatataagcttctgaaacgtaaaacctctttctggtctaacatcctggttattaaagacccggctaacccagaaaacgaaggcaaagtattcaaattccgtttcggtcagaaaattatggacaaaatcaacgcgatggttgaagttgatgttgatatgggtgaaactccggttgatgtaacttgcgtgtatgaaggtgcaaacttcgtcatgaaagttaagaaagtcggtggtttccagaactatgatgaatgtaaattccttggtcagtccgagattgcaaacatcaatgatgaagaaactcagaaattcctgaccgaaaatatggctgacctcagcgaaattgttgctccatctcagtttaaatcgtttgaagttaacgaagccaaatttaaacagattatgggtacagcagctcttggtggtgccgcggcaaaagcagcagctcaagccgataaaattggcgatgacctggattcctttgacaaagacctgtctgattttgaatccaaaccgacctcttctcgttccgcagacgatatcatgggcgatgctggtgacagtgttggcgatgacgatctgaatgatattttgaacgacctctaatataaagggaccttcgggtccctttttctttattcctccaaaaaatatttcacaaaattgtttacaagccagttgatgagtgatactatatctacatcgaaacaaaacgagtagaggaaaacatcatgggtaaattaaacattgatatcgtagcaactcctattatcaacaaagacggtatttgtgtagatttggagtatgcagatggtacacgtttttatgacactgaccatggtattgattttgacttgattatgcgtcatggacctggtggtggttggccaaatattgacctccgcggttctagagaaaaggttattgcatatcttgaatctctggaatgggacgacattgattactttatggaagattttgaagaataattgtttacaaggagctatgcttgtgatagtatagctccataatctactggagaataaaaatgaaacttcaacgtcaaagcatcaaacttggttctgaatatcgtggtaaatggaatttctgcatttgcgacaaaaacccagaagaattagagcgtgttgaagaagtactgtgccagatggaagctccattcactatgggtggtgaaactgtctattggaatgattactgtgataactgcccatgctatgaagatgggtatggctcaggcttctggattcctgttgaagatgttgaagaattcaaaaaagcatttaaacttgctaaggccaagaaatgattgaggctgaattagtagttttgttaatttctgttactgccgcttttattagcggcattatattaggattatttttatatgtctaaattttgctgaggtttaaatgattcaaatagtttatgcatttgctcctacaaaaactgtagacggcaaaaacgaaaatgctttcggtttaggcgatggtcttccatggaaacatatttcccaggacatgaaaaactttgctaatcgtactcgagatactatcttgatttgcggagcaaagacttttatgagttttcctaaacctcttcctggtcgtaagacaatcgttgtccaagacatgagtcgtgcgttggcaactgctaaaaatggcttctttgcagatgcttatgtaagtgaattagaatttatcggtttcttgggtggtgacattatggccgctcatacttcttacaacagtactatcacttttaatagagaccttaattattctatcataggtggtgccggaatcatccagaaggcatatccatatgcagatagggttatccaaacaaccatcagaaaaagtcatagagtgaattctgatgtcactctacctgctgaatttgtagcagctcctacttggccagaatcaggattcattactaaagaaaatcactggtatcatattgatgaagtgactaacatttcagaggtggtctatgagcgcaaactatgatatcactcagctatcagaagacaaagtccaaaagaagtggaaaagatttccatttaagcatggtattcatcttctagttttcagttataatggtcttagcacttataacggttcaactacagtatataaccgaaatggaaatatacctattgaaattgagcgtgattataagaagatgttcatcggaatgtcacacggtaatgtgacggttaacgatgatgtagtgtctattattggacgatttgaaaagcgtggagaccagcttttctttactcctcttcaggaaaaatttaatgcgtgaataccaagaattaattaaagatatttttgaaaatggatacgagactgatgaccgtactggtaccggtactattgcaaagtttggtactcaacaccggtttgatttacaagaaggatttccggcagtaactaccaagcgtcttgcgtggaaagcgtgtattgcagaactgatttggttcatgcgtgggtctactaatgtgcatgaattacgtcttattcagcatgactcattactagaaggtaaaactgtctgggacgacaactatgaaaaccaggcaaaagacatggggtattccggaggtgaactgggacctgtgtatggtaagcaatggcgagatttcatgggtgttgaccaactgaaattgatcattgatcgtatcaagcaacttccatatgaccgtcgtcagattgtgactgcatggaacccggttgatttggataagatggcattgccaccatgtcatttgctgtatcaatttaacgttcgtcaggggcatcttgacctccaatggtatcagcgttctgtagatgtattccttggcctccccttcaacattgcgtcatatgcagcactagttcatatcattgctaaaatgacaaatcttaaacctgggcatttggtattcactggtggtaatactcatatttacctgaatcatattgagcaatgtaaagaaattcttcgtcgagaaccgaaagaactttgtgagcttgaaattgcattcccagatacgtatgaaacttggcagactagttctcaggttcgttggttagaacaatttgcacgtcctcatcattttgaactagttgggtataaatctcacccaacaattacaggaaagatggcgatatgaatattcgatttgttcgtaaaggacaccagtctaaaacagtattaggcgagatgtgtgatgcattctctagcgatttgcctgaagttaatgacaagatagtttttgatgggaccgaacaaagggttctgtctattgttaaatcatatgaatggtctataggcaaaacacaattaatctgttggtttgaagttgatataacatgaagatatgtcgggtggttaataaataccattccgacttcgatgtaaatatccaacgtggaacaatgtggggaaattacgtcggtaaagattgcgataatcgtcctgatgctattgcagcgtttaaggacgattttattgctaagattcggaacggagaaataaagcgagagcacttagaaactttaagaggaatgagattaggatgcacctgcaaaccgcttccttgccatggtgatataatagctcttgtagtgaataaactttttaaagatacatttgaattagaggacttatgcaagtaattaagagctcaggtgttagtcaagaatttgacatgcagaaaatcattaaagtcctcgaatgggcgtgcgaaggaactaaagtagacccatacgagctgtatgaaattattaaatcccatctgcgtgatggcatgagcactgcagatatccagaagactatcgttaaggtagcagcgaatagcatttctattgatgagccagattatcaatatgtagcatccaatgcagcaatgtttgaaatccgtaaacgtgtttatggacagtttgaaccgcctgcatttattgaccacatttcacgttgtgttaacgcaaataagtacgataaagaaattctaagtaagtggtctgcagaagaaattactttgcttgattcttatattaagcatgagcgtgatttcactatgacttatgctggaacaatgcagcttatcgagaagtatctcgtaaaagaccgtcacactggtgaattgtatgaaactccacagtttgcctttatgttgatcggtatgtgcttgcaccaagatgatggcgaaaaccgtttagcaaacgttattcgtttctatgatgcagtttctactaaaaagatttcattgccaacaccaattatgtctggtgttcgtactccgacacgccagttcagttcatgcgtggttattgaaggtggtgatagtcttaattcaattaacgaagctgctgcgtcaattacgaaatacatcagtaagcgtgcaggtattggtattaatgctggaatgattcgcgcagagggttcaaaaattggattcggtgaagtcaaacatactggagttattcctttctggaaacacttccagacagcagttaaatcctgctcccaaggtggagtccgtggtggcgcggcgacattgtactatcaaatctggcacttggaagttgaaaacctcctcgtacttaagaacaacaaaggggtagatgaaaaccgtattcgtcatttagattatggtgttcagattaataacctgatgattgaacgtttgattaagaatgattacatcactctgtttagtcccgatgtgtgtcttggtactttgtatacagaatacttccgtgatgcacaagcattccgtactttatacgaagagctggaaaagaacccagacgtaagaaagaaacgtattaaagcccgtgaactgtttgagttgttccttactgaacgtgctggtactgctcgaatttacccgtacatggtagataacgttggtgaatatggtccttttattcgtgatgtggctacggttaagcaatcaaacctctgcctcgaaattgcgttaccaacttcggatgttggccaagaagatggcgaaatcgcgctatgcacactcgcagcattcgtactcgacaacttcaactggcaagaccaagaagaagttaacgaaatcgcagaagtaatggtaagggctttggataaccttttggattaccaagactatcctgtagacaaagcgttaaaagctaaagaccgtcgagcactaggtgttggcattactaactatgcagcttggttagcaagcaactttgcttcatacgcagatgctaatgatattactcacgaaatgatggaacgtattcaatatgcactcatcaaagcctctgttaaacttgctagcgaaaaaggtccgtgcacgctttacaaagaaactcgatacggacgtggtgaactgcctattgactggtacaacgaaagaattgaccaactcgcagctccaaactatgtctgtgactgggaactcctgcgagaagacctcaagcgatacggtatccgaaattcaacgttatctgcgcttatgccatgcgaatcgtcaagccaggtatcaaactctaccaacggtattgaaccaccacgcggaccagtgtcagttaaagaatcaaaagaaggaagcttcaaccaagtcgttccaaatgttgaacacaatgcttccctttatgattatgcctggcagctcgcgaaacagggtaataagccttatctgaaccaggttctgattatgcagaaatttgtagaccaaagcatctctgctaatacttattacgacccggcgaatttccctaaaggcaaagttgaaatgtcggtaatgatggacgacttgctttatttctggtactttggtggtaagactctttactatcataacacccgtgatggttccggtaacgatgatatgattcaagattctgctgactgcgcggcctgtaagctttaataaaagggaattataattagaccacggatggttaacaccacagaataggaaatagaatgagtacagtttttaataccaagcaagtagatatcatgaccgaaccaatgttctttggttctggtctaggaattgcacgctatgatattcagcgtcataaagtattcgaggaactcattgagaagcaattgagcttcttttggcgtcctgaagaagttaacgttatgatggaccgtggtcagtttgaaaaactcccagaacaccaacgtaatatcttcactgataacttgaagtaccaatctcttcttgattcaattcaaggacgggctccagcagcagttttatctgcgcttatttctgacccaagcctagatacttggaaccagacttggacgttcagtgaaactattcacagccgttcatacacgcatatcatgcgtaacctatatgtagacccagctaaaatctttgatgaaatcgttcttgacgaagcaatcatgaaacgcgctgagtcaattggtgtttactatgatgatgttatagcgaagactcgcgcatgggaaaatgccaaaaatcgctgctttaatcaagataatatcgaaattaaagaagctaaacgtgatttaatgaaatctctttatctttgcttacatgttattaacgcattagaagctattcgtttctatgttagttttgcgtgtaccttcaacttccataaaaatatggaaatcatggaaggtaatgctaaaatcatgaagttcattgctcgtgatgaacaacttcatttgaagggcacgcagtacattctgcgtcaacttcaaactggcactgatggcgaagaatgggttgagattgctaaagagtgtgaacaagaagcaattaaaatcttcatggaagttaaccgccaagaaaaagattgggctatccatcttttccgcaacggtggtcttccgggtctgaacgttaaaattcttcatgacttcattgactatctgactgtatctcgcatgcgtagctgtggtctgccgtgcccaatcacggatgcaccaactcgtcatcctattccttggattcgcgaatatcttaactctgatgcagtccaatctgctccgcaggaagttgagataagttcttatctggtagctcagattgacaatgatgtcactgatgatgttctaattggatttaaaaagtacttataaggaaaggggcttcggcccctctttattatgaatgatattgctaacgagttttcttttataaaatatgttcaacttgagttagaaccagattttaccatcaaaccaattttgatagcaaacaagttgaatgtagtttatgccatcgcagttgatgatgaactagtttacattggtaagacaaaaaatcttcgtaaacgtataaattattatagaactgctattaatcggaaagaccaaacctctgattcggctaaatctgccaagatttttgaagcactaatggctggcaaaaaagtagagttctatgctcgtcagtgttttaatcttttgattaataatgaacttggcgagatgtcaatatccactatggacttggaagaaccacttctgattaagaagttcaatcctccatggaacacacaacatactaacaaagctaaatgaactatgttaaagtatatgataacctaatagcaaagggtaaattacgaggcaatgataaaggaaaattaaactattatactgaagctcatcatatcattccaaaatcattaggaggaaatgacgatgtttctaatttagttttattgactggacgtgaacatttcattgcccatttgctattatcaaagatacataataattctaaaatgaattatgctctttggatgatgtgtaattcttctggaaagaattttaaagttcattccagattttatgaaagctctagaataaagcattctaattatacatctaacttattctccggaaagaaacgaacggaagaacatagaaagaatttatctaaagcactgaaaggcagagtaagtccaactcaaggaaagactcatgccaaagaaacacgcgaaaagatatcaaaatctttaaccggtaaaacacaatctgaagaaactaaactcaagcggtcagaaagccaaaaaggaaagaaaaagcctttgtacagtccatgcccgcattgtggtataataacttcaaaggccattgctatcagatggcactacgataattgcaaacataaggtaaagaaatgttagagctatataaaaatttaatgaatctgtgtgaaagctcagaagttgcaaaattcttttataaagattttaccggtcctatggatggtaagttcagagtgttttcatatcactacgcaagctacagcgagtggttaaaacccgatgctcttgagtgccgcggtatcatgtttgagatggatggcgataccccaattcgaattgcttcgcgtccgatggaaaaattcttcaatttgaatgaaaacccactaacgatgggaattgatattagcgatgtagaatacattatggataaggctgatggctctctagtatcatcttatgttgatgatgggtatctataccttaaatcaaaaacctctctttacagtgaccaggcaagacaagcttcagctttgcttaacagtgaagaatattcttcgcttcatcaggttattcttgagctagcgctagatggttatacggtaaacatggaatttgtttcacctaataatcgtgttgttttagcatatcaggagccacagctgtttgtgttaaacgtccgtaataacgcaactggcgagtatattaaatatgatgatttgtacgctaatgctaagattcgtccttatttaattaatgcttacggaatttctgaccccaaaacttgggttgaaggtgttcgtgaacttgaaggcgtagaagggtacattgcagttctaaacactgggcagagatttaaggttaaaaccgaatggtattctgctcttcatcacactaaagactcaataacgtcaaatgaaagactgtttgcgtctgtcgtatctgcaaattccgacgatttgcgttctctttttgctggagatgaatacgcaattaagaaaatttctgcgtttgagcaagcttatctagattacctaggaaagtcacttgagctatgtcagtcgttctacgatgaatacagaggtcgtgctcgtaaagattatgctattgctgctcagaaagcaacggttaatcagcgccatctttttggtgttatcatgaacatgtacgaaggaactgtagatgtggataaactgcttaaagacctcgaaagggtgttcttaaagtactgggcaggatatgttccaaaagagtacgaaaaagaaattgaaatttctgaagaatagttgtttacatcctcgtcagagtgtgatactatagacttacacaaactgatgaggatattgaaatggatatgcaagcaattactttagatatggttgttaacaaatatggtactcattccgatggaatttttgtgtggaatggtaccaagaaggtgggcttcgtcactgacctacggacgcacatggcgcgcaaggaagctgctcgtaagaagcaaaaagagtacactaatcgtgtgaacgagcagcgtgccgaagcccttcctgaagctgtagatgaaatgattgatttcctagataatcatctcgcgaagtatggtgcagaggtgttcaagaacatcacccagccaaacgttcatgctaacggatgcaaatgctatgtaatcgttgacccgatttatggcaagcatcgtcttggcattatgcatcgcgagctgaattattctgagatggcagaatatgtagaagcttgcttcaagtgttctccttcggaaagttctgatcgtcacatcctcatttcgggattatcccgtgatgatatcgtagaggttatccttaaactatgctcaaaataaacacaacttggttgatgattggtgtgttagcgttatccgccggtggattgaaatatctttcgtggcgggtagaaaatcttaaagctgacctcaaagtcgtccaagatgaatctgatcgacaagcaaaagaaatagaaaacattggtgtttctataaaaaatctgcagacaacatataaaggctatcaggaaaaccgagcagctcgtgatacttctaacgctaagatgaataaagattctaagcgtggaaacgtagttgcagccaaacctggattagttgaaaaacagattaatgcaagcttcaataagtttgcagaagatatccaggaggctaccagatgaaacgaagtctattagccatgggtattatcagcttacttgctggatgctcttctagtgcaccagatgtcccggttttacatcctgagtggccagacccaattcaaaaatgggaaggacattgggaagtaaaagtaattgacggtaaagcctgggttggtatgccgtttgaagagtcgcaagaatatcgtatctggatgaatgacattttacgatatactaaagatgctaatggaatgatatgttattatcgttctgaccttaaagaacctcgttgcgttaagtgatggtattataatgaaccgagagcagtatgaaacacttaaaggattaattgctgaaaatgaattggcgtgcatcgtgtttggacgcgcagctgaaaattatgacaaaaatgatatactgtcaatgaataagccattgcgagcaattaaagaaaaatatcgtgctaattggggtgaaaagtctaaggctcttcatgattttattgacactcttaaggatgtataatgaaaaaattggttttgacacaaggggctccaggctctggtaaaacaacctgggctaacgaatacgtagcagctaatccaggttggtatgttttgtctcgtgatgatttgcgtgaaggcatctttggccttgataaacgtaatgattacaaatattctaagcttcgtgagaagtcagtatctgtatgacagttttctatggcgaagactctactcgagatggaaaccactaaaggtgtcatcattgctgatactaaccttaatccaacgactatcaagaagtggcaagagttggcatacgaaattgatggtgtcaagtgggaaattaaacgctttgacgttccttggactgaattgcttaatcgtaacctctatcgtggcgcgaatgcagttcctattgaagtgcttcgtagcttctattctaagatgcatccatatgatttgtacattccagacgaatcattgccaaaagcagttatctttgatcttgacggcacgttagcagataacaatcatcgttctccttatgacttggccaaatgtggtaaagaccatccaaaggaaatggtaattgaatttcttaaaatgcttcgtaacaaaggatataaaattcttactgtttccggcagagagtctggtactaaagaagaccctactgtttatcaacgcattacgaagaaatggttgttggaccatgttggcgaaacaggcgaacacttccaacgtaagcaaggcgattcacgcaaagacgatgtggtaaaagaagaaatcttctgggaccgaattgctgatcgttataatgtaaaacttgcagtagatgacagggcgcaggtggttgaaatgtggcgtcgtatcggtgttgaatgctggcaagtagcccacggtgatttttagaggaaagtataatgtttccaaagtattccgaagtagtaaaagtatcatttacgcaagttgttgctaatcatttaacagatgagtttactccatctgaagtagccaaaatgcatgcagagtttttatctgccatgaatgcacttattccaaacggcgaagttattaaattttctattgaccggtcaggcggttcatctgaagttaaaatttcttgtggcgaaggtgaacacgactggtttatcgttggaattattgctaattttgaaacccaacaggttgaaacttatgttgtctgatgctaaattttcgcatgatgaatttatttcgaaggttaaaatcttcgcacaggaagtagcaaaccgggttcctggaagtaaagtgactctccgacgagagtcatcctttaactatgttgatgcttatatcattacagttaataatggaaagagcaatcaacacactcaattggctttaaccggaacaggccaagttgaaatgactaacattttaggacatatctaatgactttacgtgaggctgtagaagctcttttaattgaacatgctcgtggaattagggcagaaattagccaaaatggtattcgtctaattaatgctgttattggttctgaccaaggcgtttggtcaattccgcgcgaagaatatgatgctattttgtacagtaacgttgatgttaaggaaggccaacctctttatggttatgtcttttccgatgttcttgaacgaggaaatcatccgtttccagatggtacaggcattcgtacttctcgagtagagagttttgcttctcctaccgacgagttaaaattggttaaaacaaataacacaacttatctggtgatttaaatgaaagcgtcgacagtactacaaattgcgtatctcgtatctcaagagtcaaaatgctgctcgtggaaagtcggcgcagtaattgaaaagaatggacgaattatttctactggctataacggttcaccttctggtggtgtgaactgttgtgaccatgcagcagaacaaggttggattggtgaaattccttacaaatctacgggattgcgtcaagacggatttcaagtcaaaaaagtcggattgctcaaagaacatcgagcagcccactctgcatggtctaaagtcaatgaaatccatgctgagcttaatgctattctttttgctgcccggaacggcagtagtattgatggagcaacaatgtatgtcacactgtctccatgtccagattgtgcaaaagccatcgctcagtctggtattaaaaaattagtatactgcgaaacatacgacaagaacgaacccggctgggacgatattcttcgttctgctggaatcgaggtgttcaatgttccaaaacgtaatttggataagttgaattggtataacattaaagaattctgtggaattgaataatgaaacttagaattgttgaaattaataaacttaacctaagtggtgatgttgttatatcatactcagtagaacgccggtattggtttaaatggaaaccactagcaacatttaaatttgaagatcaagcagttcgattattaaaagaattatccaagcgcaaatctgtaattatcaaaactattaaagagacatcaaaatgaaactgactactgaacaaaacatccatattcgtgaaactctgaaggctgtgctgagcatgggcgaatcccagattgtgtttgaaaaagctgatggcactattcgtactctgcgctgtactcgtgataaagacattattccatctgatttggtagaaagcactactaaatctgctcgagcagaaagcactacttcacttccagtatatgataccgagaaagaaggttggcgctcatttgcctttgataaacttatctcggtaaatggtatgaaagttgagcatctgctgcagatgatcggtaagtaatttgctttaaactgaccatgttaatataactacatggtcaaacaataaaggtaacacatggaacttccaattaaagctctaggcgagtatgtaattctcgtatctgaacctgcacagcaaggtgatgaaattgtttctccttccggtattattcttggaaaagaagaacaaggacaactgccggatatgtgtgaaatctattctatcggtgatgatgtaccgaaaggatttgttgaagtcggtgatttgactccactgcctgttggtaatatcagaaatgtacctcatccgttagtagcagcaggtgtgaagaaacctaaagaaattcggcagaagtttgtgacttgtcattataagtcccttgcatgcgtatataaataataatatgaattgggcgtcggacaattagttacccgagcaattctacgcggtggatgcccgagctaaacctcggttaccgtccaccaaattttaacctcatttgaggaacgattcaatgaacaaacaacttactaaagctctggaactccaacgtaatgcatggaattccggtcacgaaaactacggtgcttcaatcgatatctatgcagaagcactggaagttctgaaagggtttaaacacctgaacccagcacaagctgaatttcgtgatactttagaagcgatggatgaactgaagtatgctaagcatcttggttctgctgctcgcaaagctgttcgccactttgtggtaacgctgaagtaatttgtacgcccaccatgtgtacgcatgggtaacgtatgatgtggacgttgttggttatccccacgtaaaacatccgaaaccatcggtgatttgctaccaaagtgcagctagaaaataaacggcaagtgcatgctaccccgaggcgatggccaatcgggagtacgcctcaaggcctatacatccatcggtgtatatcttatccccgagaaatcggacccggaacctttaagctaacggtgtgcaacagataagagtttaaacgtaccctttgagggcttgcgggagctacaaccgaaagaactgtcgaaagaagttgaacctcggaagaacgtgctcccatgtatttctccaaaatggaagatgataaaatggctaaacaagctaaagcaaaaactgcagtaaaagaagttgttggtacctctaaacgcgctggctacaagcgtgggtcgaacaagcgtatcaatcagacggttgagaaaatcatgcgtcgggctcgtgcggttcttcgcgatgatgcttctcgttttggtaagccgaaagcataagttcagggactccttcgggagtcccttttttattttccgcagaatgaaaaaagttgtttacttctaggctcaacaaggttactatagacctgtaccacccaaacagatacaacggagaataaaatgaataccatcaacctgaatgcaactatcaagactaaagaccatgacggttataaagctcagactgtccacgagaaaatgtggattttgtctaaagttcaaggtgatatcgttccatgcatgacaccggacggtccatcagatgatttctgctggcatatcacgctaaccaattggttcacaggttctgtatatgttctgaacactccagttgttggtcgtattcgttctgaaacttacacagatgaagaagacggttactcagaagatgtaacctggtatgaaaatggtcgtaatcgtgccgatgctttaattgagcaaatgaaaaaggtcggtaaattaaacatggataattggactaaacagtaatcttgactggggcttcggccccatctttgaggatatcaaaatgaattacagcaaaaaccgagtatattgcatttccccagaaacttaccgtagatggaaagacgctaagaacacaattaactatctcattgccaccgttgtcggagttcaaggctggacgccgttagaacttgattcgctgggacgggtcgttaagattaaaaccgaaaccggtaaaatcatttcggcaaaaaccataggagatgaatatgaccggtctctgtcatgtttattttcttctcacgagttagaagaaggacgtgttgtgcaaataggagcgtttgaaaatcaaagctctgatgaccgctatgcagtttttgaaatcccatcaacgttcgttaaacctactccagtggttaaagatgggcgtagcgtcttcactttaaaagaagcaaaagaaatcatccttgaactaaccgatatcgtccccgaaactaccaagtatgaactgtttaaaagcaccggatttgcagaagtaaaaactgttaaaactgtagaggttaaaaatgtctgaagtttttgaataaaagttgtttacttcttgggtggtctgggttactatagacctgtaccacccaaacagataaacaaactacggagaataaaaatgaacttcactaacttcaaccgcaaatacgtacagaacaatgcttgggacgtttctactactttgctgtgggaacacaacaatggcacagtagctcaaatcgatatgtactgggaagataactacgtattcttcagctttgaaaatggtcctactctggatattcagttcaacggttctgaaatcaaagttggattccatgatgaagttcgtaaacgtgatttatcttcacatccgtcttggaacacaaatcgtcagctgcttgttaaaatttatctgcgccacatcctcggtcgtaaaacaaccgaagaacaacgtgaagcaatctgggatatcgtttcaaacgaaatcaagttttaactaactcggggcttcggccccactattgaggaaatgataatggaaaaaggtaaattctataagcttaaaaagactccaatcttgtctccaggcgctcttatcaagggtgtttttgagcaaatcggtaataatccgattaaaattaccagaacctttaaatatgcggaaaataccggattagttgaatttgaaatcattaagccagatggagaatgcaaacgcgttagtgtagatgaagttcgcttttcccatatgtggtgtattcttactaatcaagagtttcagcattattttgaagaaaccatctacaaagaacctgaaccgaagaccgacgatgatggaagcaatgattggggtgtttggacatcaaataaaggaaatgatacctacaatggcggattaacaaaggaagaagctgttaatcttgcaaaagtacaacgcctgaatgcaactaaagacacaaaagttgtaatcatgcaaccttttgctgtccctgtggttcacgttaatattcgcccgttttaagaggaaattgaaatgattgtatcagctttctatgattcacgaaagaaaaaagttgaaaccattatcagcgatactcgcgatggtacacctgctaataaaaatggcgtgaaagcatacattgataagtattgccctcctgaatttcgtatggttgatggtgtagattctctgagcattaatgttataaatgctaaaattgaattcattaatgcaactatgccaattgggtattctgacagtgatggctcaaatgccaaaatgccgaaagaaaaattcataactaaattttgaggaaatcaacatgattgtatccgtgcctaaacctaaagctggtattttttcttgcagtttgaaaaaccacccaatggttgatatcatgtcagctgatgttaaacaacacaccgttgagtatgaaattgatgctccggatttctttgaattgcccgaatgggcagtgagacttgatgcatgaaatatcatatcttcagtacagtaagattagcaaatggaattcctggagttgtatgtgatacggctccagcaattaaagcctacttggttgaaccttggtatgaagttaattgggttgatggcaatcgttcaatccatgcagaatccgagctttatccaattactcaattaagggctgctaacgacgatgtctattaatcctcacttcggtcatatggttgcccgacgtatcaccagggaaatgctaaagactgttgagtattataatatagaattaattgatatagaaccctcggacactccagggttaatctggttcaatttcaccggtgccgcaaatagcgtcgccaaatttaaacaagcattgaggaatttccccgaatgtcaaaacctgtaattgcgaccgatgttgatggaatcatcgttaaatggcaaagtggtctgccttactttgcccagaaatataaccttcctgtagagcatatccttgatatgatgactactgaaaaattcattaaacccgctgagctgtttgattgtgaagaagaactagctgttaagctgcttctgaagtacaacaacagtgattttattcgttatcttgctccgtatgctgatgctttagctacagttaataagctcaaagaaaaatacgattttgtcgctatcacggctcttggcaactcagtagatgctaaccttaatcgtcgtttcaatctgaatgctttgttccctgatgcatttacagaaatcatggtctgcgattatgatgaatctaaagatgctttactggaaaaggctaaagtaaaatacggcgatcgcatcgtttgctatgtagatgatttgcctaaacacattgctgcagctagcaaagtctttgaagacactgaaacccgtgtgttttatatgcctcgtggtgagcgagaaggttcagtgactgctcctggaattatggttgaagattggcatcaaattgtaacttgcctggaatctctgaaattcgttaagaaaccgcagaagtctctttctggattgtgggaagaagctatcaaagaccaaattcgtaaagagcaacatccttttaattggcctccacgacaagttccaggagattggtggaaacaacctatcattccgtttagtcctggtccgcatgttcctcctggaaacgactggtggaataatggtcgtattacatgtgataatcaccaaattaattgctaacactctgggtatggtataattgccataccctaggaggaaatatgtttgtagttcatactaaggttggtaaacgctggttatcatgtgattatggccatgttaatcagttttatcgttggaatccaatttggcgtgaagcaaagtcgtgcccgatttggaatgaatgcatcaataacgggtttgtttatatcgatggattaacttatcatcgtagcgtaagcgaactttcaaaagaattaggtgaataatgatttttgatatcatcaaagcaattgaagatgctaagggttctaaagccaaaacccaaattctcattgacaataaagataacgttgatttaaagcgagcttatctgctggcgtattccgggcgatttaaattctttattaagaaagttccagaatatactcccgttaaatatccaaatgttccttcaaagacgttttcagatggtctagattacctccaagacattctggcagcacgagtacttactggtaatatggcaatccaggggctagtagatttgctctctaagatgaatgagggtgatgctagtgtactggtacgggttcttcttaaagatatgcgttgcggcgcttcaggttctattgctaataaggtatggaagaaattaattcctgagatgccacagatgttagcatcagcctactctgagaaagcgctgtcatatattaagttccctgcattcgcacaacttaaagctgatggagcccgatgcttcgctgaaatccgcggagatgatttagatgatgtgactcttcttactcgttccggtaatgaatacctgggtctagataaacttaagcgtcaacttatcgagatgaccaaagaagcccgagaacgccatcctaacggtgtgatgattgacggcgagttggtatatcatgtcgaagtgaaagaagaagaaaacgacctgtttgatatgtttaaagagcctgagcttcctgagttaagtaaagctaaggaattccaacagacggctcgcacggaatcaaacggattggctaataaggctattaaaggaacaatatctgccgaagaagcggaaggtatgagattccaagtttgggattatgttccgcttgatgtagtatattccgaaggtaaagttcctggatttgcttatgatgtacgcttccgtgcattggaaatgatgagcaaaggctatgacaaggttattctaattgaaaaccatgtcgtacataacatccatgaagctcgggctatctataagacatacgtagaccaaggtctcgaaggtattatccttaagaatatcggtgcttattgggaagataagcgttctaagaacctcgttaaatttaaagaggttatcactgtagatttgaaatgtgtcggttcgtacgagcatagaaaacaacctggtaaaatgggcggcttaatgttcgtatcagaatgtggtcgtattcgtgttaacgctgggtcaggtcttaaagataagcccgaagaattacatgaacttgatcgtactcatctatggaaaaacagagattctcttccaggaactatctgggaacttgaatgtaatggttgggtaactgctgaaggtcgtgatgatggtacagtaggattattcttacctatcattaaacagcgtagatatgataaagaagtggctaatacattcgaagccgcgtttggtgttaactttactgaggcaacaggaataaaatgaaagctttatacgaagtgattgctaaatctcttgacggacgtggtggtatttctgttcacacagaagttattgagtttaataacattaacacattaagaaacttcaaagaaaacattgaagagtatgagtctgtaaatggactacaagtttggcgtacagtaacaataattaattaaggccttcgggccttttttcgtataaatagaataaacaaacgaggatatgtcatggaacttttaaatgaagttttcgatgaagagaatagtaaaatctatcccgtcgagaacgttaagccaaaacttaaggtaccacaggtctttttgattaaggtgccgggtaataacaatttaatgattcggttagtacaagggtcaggtcaaggtgatgcagttaagaacatcaagatgggtgataaattcatccaggtctatgttttctctgtgtcggaaaaaggtaacatcggggcgcttaaaggtggtttaggccaagacccgattggtgctatcaataccatttttgagaccgtcaacaaagtagttaagcaaattaaagctgatgcggtaatgttccgctttaatccgaagaaaatgcaaggacaggataaagccattcaacgcattcttgctcggttgattactactcgcaccggcggtcgtttcaatctaatgaaagatatggcttactacaaaggtaagtatgcttattctattatggttcgtaaaggtaagaaacttgaagagattgaaggaattcctgaaatttcagaagaactttacaccaaagtagattccaaagtaggcgaagtttatgtgtctaaagaaaccggcgaaaacgttaccaaagccgaagcattggctaattccattggcgaaaaagaagacaagaaatctgaactcgctgtaatgagtaaaatgaaagtgtctcgaaaagatttaatccgagcacagtacggcaaatttgtttcatatgttgatgaagattggccagaaaataaacgcgaacgttggtacgaattaactactaacacaccggttcttagcgcagaaggcgatacggtagacctccaaaaagatatcaaagccggattagaaaaatcaattcctttttatgttgatgatatcaagcactatcgtgttcgtggcggatatggaagtaattttggcgatgcagttgagagattatttgtaggccaaatgtcgagaatgcatgacgactggaaggttttcattccttcggggtcagacaaaatgaaaatcgctgaacaacgaatttcagacgttgctgacgttattgctcaagctaaaaatcctgcatctatggaaacaatgcgtaaaatcgttgaagtagctactcgtggatttgatatgcctccagctgacgatttcggagctttacgtcaataccaaaatcttgtcaattatatgatatccgcttatgtgtcaattgttggcgattctatatccaaagcaattgaatataaccgtgaaatgcattctcgtttaagcgaagaagaaagagatgcaatacaccattactgtggttctggttattcatttgttaataactatcttattggcatggaaagcttaggcgatccaattattgacaagaaaattcgtccgctcgattctgcctttgaaaaaggtttgcgtcttgaaccaggcactcttttgtatcgtggtcagcgaggaaaatatgaagactttaaagataacattgagtctaaaatgttttatttccagaactatgtttctacttcgttaagtccaattatctttggtgcttattcaaatgctggtgattcattaatgccagacgcacctagttctgatttagaaaacaaagaaacaactatagatgcagtatcttctgttattggaacagacaacttggaaagagttgatagaggcgaggaagttgcctatggcgatgagtttaagtttggattcgttatccatggggccgataaagttaaggtagttatcccgggtgtcttgtcaagctttagcgatgaggctgaagttattcttcctcgcgggttggcaatgaaagtcaacaaagtatggggaactccttttagaaatggagttggtgtagcgaataacaagacattcatggtagaaatgacggtagttccgccagagcaaatcgatgaatcggttcatctctatgatggtgacatcttgatggaacagggcaaagtggaacctcttgaagaaagcaagttcaaaggctttttaaatgagatttacttttcgccagaccgttctacagataaggttagctacacgcgtaccatggagctactggctggtgctatcaacctggatggtatcccagaaaaacttgcataaagttgtttacttatcacaaggacgtgatactatagacttacacaaaccaatgaggaaattgatatgaaacacgtatttcgctttaacggtattgaatggtctgctgatgttaaagatgcagagaagttcaatgaagaagttcttatcatgcttgaagggtttaacgaaggtactccgacggttcttattcaagatatcttccgtaagccaacagagccatcgtttgtagaagccgttcttaatggaaaggcagaaggtatcattcctgttaaagtagtttggaccacaaacgaaatgaaacttcttcgcactgagccagggtttattggctgcattgcataaaacaaaggggccttacggcccctaaattattctacttgttgtagtagtgatattagaaattccaccaccagccccgcctaaacgagacaatcttgaagcagacgcactcaagccctgatttggattaatcgtctcaattttctgaatagccttatcttccaaccaatccatagcagcttgttttccaaccgaacccgtttgcatgctacggtaagcaaacgtgacatcaaacactgctatcgtgttttctccatcatatgtaaattcgggagctccacacgctacaggcatagcccctgagaacaagcatacagtatgtggtaatccatttctagcatgaaggttaacttggatatcacattctacgtcttgtggcaatcctcgcagaccagtcactgggtcttcaacagcatttacccaatcttgcattgcccggtagttgcttgcttctgggtccatcctaaatgaaagaaccagcggttccatatctcttcctgtgatttttatattaggagcgttatggaacttatccatttcatatgataatctgttctctggtattttagcagaataaaccatcaatcctgctgttggaaatgccatattaaagaaatcgagcagataagtacctaccgtaaattctcctaataatgactgcaccacacgttgagtcattgcgccaatcataaatgtattcacacctgatttacgaacaacttgccgagttccttgtgtcactatagttgttataccctgattgaattcacctggggtcaatccaagccaatttccatctaaacccatattattatacagctctccaccaaagtcgtttagaagagcctgggttttactagagggtacagtagcgaatacaacagagaacatattagttctctggaaatcgatatcagccgcttgactcttaaattcttcgagagtaaacattattcaatacctccgatataaacgttacctctattaagagtaagtatttcacgcatagtaatttcaagcgtaaatgtgcttggaaggttaggagcaattgctaaaccattgaaatgtccgttcggcgttttatcaaagcggatactctgaatttggcatggaccaaatatatcctctctaccatccattgatgtagaatatccaaaattacgaacagtccaaatcgttgggttagaaactacaataacattgcttaaaaacgatgttatttgctcaaacaccgtgttttctactttagccccatctggagctgcggatttaagagttcctttataccattcatcaatagcagctttaacttcttttgcgtatgatgaatttccagtcacaccgtaagaatagtagttaaaaatttcatagatgcgaataatttgtataaggtcatctgcagacctaggagttaaatcccaagtaaacactttcgttctattatcaggtccggcatacatactacgggcagtgttataaatttgttcaccattatcggccattaatccctgcgttaaagactctatcgacccaaacaccgcagtagaagccacgttgcttaatacaccagtagcagtaccgccgccacgtgtaacaagagaatccccaacatcattaaatttatggctaactgaatcaacgtctgacttagaccgcggtaatagaatattagctactggtgcagtactagtggtagaacttgatgaattagccaatgctgacattggtgaatcgaatacagacgataacattacatctcgtctaaatgaacgcaaatcaggagtagttcttcctttaaaatcatatgctgtgaataataacccattgcgatataagtcatgtactctcatatcttgggcggaatcattcccagctgaacgttcagctgggaactgcgccaccttagtggttggcgcattcgtcagtttagatttaccttgggaaattcgagttcctgattttttgatgttttcaaggccatcggccagttcttcaaaaatcattatttttccttaagaggttttcatagcgccttgcattccaggagcagctgttgaagtctgtggaggcgttctataaacgtatgtgctattcttatttacagcggtattaacctgaataggttgcgactgtgtattagattcacgtgtacgagcagcttcacgactatccgcagcggctttaatagaagcagactgtttaacctcaggttgttctgctgcaggtatagcttcggcagttggagcaggttctgatattttagaatcaaggagtttttgcaattggtctaattcaacctttaagtcttttgcaacttctggagataatttctccaattctttatatctggtggttgtgctttgtactgcatccttagcagagtctaatcgagtggaatcagatgcgtcagttttttctacatacgcttttgttctcttcatttctgcttcagcattattacgagctgtgatgattttgaggcgttcgtcttctggcaagtctgcatacgctgactgctttttctctccgctcagcagtttgttatattcatcgtcatcaatctgcccggtgaatttttggaacttagcagaaagctttcttttccattcaggttgttcgtcatattctctttcttgacggtcaacatattttgctctcattttagcatcttcttcatcgagttctgctccagtaacagtttgaaatctgtctaaagcagcgccttcaatgttatctgccgaatcgttaaatcctaatgcgcgtaacattccagcaagaagcttactcattccgagcataatggtttctccgagcttatcaattacatcaaccaaacccgagccaatggcttttgctaatccgccccaatctcctttgacgaatgattttactatttcattcgacatctcgcttattgcagttaatagcggaccccattctttagcctgcttgttaaattcaacaaagttcttttcgaataatttagtccaataattaaaatgaactttaattaaatctataagcattatcacacccaaaaccatggcggcagttttcgccatttgggccaaagcgctaacagtataactaaacagcatactgctaattttatctgttaatgaaatagtttttccaaaaccagatttaacgcttttaattaattctccaaattttaggtcaagaaactttttattcttgtcctcagtttcctttttaggctcagctttttcctcttgctcttctgtgctaggaaagaaatccgcgtcaggacgtctgccatcctgaggaggaataagtctttcgagtaattcctctagcggctgctgagtaggagcatccgggacttgttctgttatcgtttctaatgatgttccagtaccagtcttttggacatcttgctgaacatcatgctttttagataacaagtcggcaagtttcgtgagcttatcattaattaatgatgcagtatcattaagttttgatactgcatcagttgtgcgctcagaagcttctgcggtcaattcgacaccagctgaaacatcttctactgatttgataatttcgtttgatttagtttctattacatccgaaattaaatcagtagatgcttgttggtcgtctaaacgacgaccaatatcttctagcgtattaatttgagcatcagcttgagactcagcctttttctgtggagccgagtcagcaataactcttctacgcattgaattcatttctgatttcttagtcattcaaatatttccattacgttaagcatgcctttgattggtccttcaggtccatcaatggctatagtgtttactaagtcatcagcccactttgtcacaaaagctggaagcttcataaagtttatatccattggttttccatctactgattcaagaaattcgctcaaaattgaatctactgaacctagtttggaataacgaggaggagctctgaatttgaattctttaccatctaacctttgagttaatcgctggcaaatgtaaaccttattcaaatcgtaggtaaaatcatctttaacaacagtttcttttattctgttgttaaatgctaataaatgtaatacaacaatatcagattcggctgctgttaatcctggacaaattgaatccaaaagaagattcatgttttcatctggacccttaacatctttcatcagattatggtgctttaaccccagttttggaattgatatcgtcttttcatttattactattttcttaataggaagaatcacgtttaagttcatttttcaccttaatcaaatctacaggttcaagggcagagccatttgtgaacatatataagttagttatagatgtgttatttgatatttcatggataacttcatctatataaaagtcagttctgaactggtcctttaaatcaacaaagttgattttcattcctggagttagttcaaaattaccgtaacacttagtttgagcatacccgtcatattgagccatcgtagaaatgcgtagtgcttcttcatagccattcctaaaaatcatgtcagaatatcctcctgacctattaatgaatacgctgttttggccttctccattaataattcgggtaacatctttgtccacaaacgagtgtgcataaaatgttgcgtttttcatgggatttctattatatctgtttgatttaacaagccattcaaaatcccatgctaatggatattttaatcctgcagcaaactgacctattgtttgaggagccccgaacatgaatacatttggatcctgggatatcattgattcataatccatcatgttaattccggtgatatcttcccacgcaaaaataaattgatcgttgtctgtagaaatgcctacatttctaacatatcgtaagtaatctttgagggtactagtccagggaacccgtgggacgtaagcgttaattccgttgataggaggagcaatcaatggttggtcaacatacattgcacctatcatttcttttatagtttcatacgcagaactaaaaaacgctctgctgaacttgagattcattatgtcatgcagtgttccaagctgaagggtgataatgctatcgcctttatcatcaacaccaactgtaaagtgtttaatcccataaattcgggtttgtgttctcgatgtgttactgtttgcaacagatatttgaactagttcatcaccgttcatacgcgtgtgcatatttttcgagtcataaaactgaagtaggccttcgttagtcccgcgtaatgaatctctcattgttaatgtaataaatgtagctgctaattcaacgaatctattagctagccacgcatcatatccagaatataattttatgcttatattaggatatcctaatctttgtgttgtcatgatttaaggtccttttcaataagcgataaggttatgccacgctcaataggcagcatcttcattatagaattcaagtcatatttaccttgagaaaccaatctatggttaatttggtaaaatgtgaaaatctcgtcaggatgtagcaatagcttaaagatatcaacaatgttatcatattttaatactgtcgtggtatcacagcatgacgtttttagctcaaaattaaacggcttcatctgcgataaaatcttttccaaggtttcaacatctatagcatcgataacggtcaatttattgctatcgctcaattcattccacgcgtattccccagatgaatccttcacagatataatgttatctaaaatcattttacctgtatcgtcaattatttctatgggttttttgaacttgagcgttaatccagcaacctctactttcggatttgtcaacggaggctgattaagattaaaaagatactgcttatattttccgcattttgggcacttcattctgacaggtattttggttttaccaatacttgaaagaaataccttaagaaatatataaggacgatactcagcaggatggtcatgaaaataatcatccattaattctgctataagctgtttttgttcttcttcagacttggtgttcatgtcgtttctaaccaataaaaggtctctataatcttctactgtaaatggcttaaaacgttggacaccatctggtaattcgcatctaactatattggccataaggtaatcctctttatactatttataaatatttgaataagaggagtggatatgaacatcacatacaaatttgaaacaagaataaatggcaagaatatccagtgccgagcttttacactagaagaatacgctaatttaattgcagcgaagaaaaacggtacaatcgatgaatgcgttaaagcattgctcagagaatgcactaatgccactgaattaaacaaacaggaatcggaattacttatagttatactttgggcgcatagtataggcgaggttaatcatgaggtgacctggaattgcacctgtgggcgtaaaattcctgtgccattaaattatacacatgcgcaaatcgatcctccagaagacctctggtatgacttaaagggatttaaaataaagttcaagtatccgaatctttttgacgattcagacattccaatgatgatatcaaaatgcatagattatatcgtggttggaaatgagcagatttactttaatgatttaaatgatgcagaaatcgatgatttatattctgctattacaaccgaagatgtagttaacatcaaaaatatgctattgaagccacaggttcaattggcagttcccattacttgtgaatgcggaatttctcacattcatgtaattaaggggcttaaagaattctttaagattatgtcatgagcaatattgataaattatattctgaccttgacccagagatgcgacttgcttgggataccgatgtgtcaaaaacggtaggagcacgatcggttaaaaatagccttcttggaataataaccacaagaaaggggtctcggccatttgacccagcgtttggttgtgatatcacaaacgaattatttgaaaacatgactccattaactggtgatacgataaagcgtaatatagtctctgccgtgcgtaattatgagcctaggattaaccgtctatcagttgatgtgcttccgttatatgacgataatgctataattgtcaccgtgcagttttctatagtagacgaccctgatacgctagaacgtatacgcatacagatgcgtagtaatgctaactctagcagtagagtataatggtactagtccttccaaagaaacagtagagtggagatagaatgagattagaagaattacaggatgaattggataatgatttgattatcgaccagactaaactacagtatgaagcggctaataaccctgttctgtatggtaaatgggtgcgtaagcactcgacttgtcgaaaagagatgttaagattagatgccctcaaaaagcaaaatcttaaagcacgattggattattacactggccgtggcgaggttggtggtgaagtatgcatggatgtgtatgaaaaatcagaaatgaaaactgttttaagcgctgataaagaaatcttgggtgtagatactaaattgcaatattggggaattcttttggagttctgtagtgatgctatggatgctattaagtcacgaggttttagcattaagcatattattgaccttcgtcagtttgaagctggcgcgtaataaataaacttgtaaactaaggagacaatcatgtcgaatacggtatgtgtcgtctgtaaaggaccaatcgatgaagcattggttgtccaaacagacaaaggcccggttcatcccggagcttgctataattatgcgattgaattgcctgtcactgaagacacagaagagcaattgcaagaaacgcagcttttaatttagtctagtgttgatgtagccaattggctttgccccttcctttcggttggggcttttttatatcagaagtcttcgtcgtcttcatcttcagaatcagcttcaagagcttgtctacgccccgccaaagcatcacgcacaatgatatcatcagaatcagcaagagtagtttctttagagcgcttatcgtaatacttctcgagttcttccagaccatctaaggtctggcaagcattaattttactcatgaagttatcgatagtagcctcacgaattgtggcttcgtaaatatcttcaaatttaatcatagatttaccgttttcattacgtagttaaatttttcatcagcatatcgttgaatacgctctaatgcatgttttaagcaatagtttaaatgtgtgtatttctttttagcattggctgacttcggctttacacccaggtcatcaatgatatcccacactgtagccaaagatttatctttatgcttacgaagaacacgaccaatagtttggagtacgataatcttcgatttaactggatgggctaaaattacatgatgcaggtttttaacagaaataccggtagaaaatacaccgtaacttgcgacgataataattccctttccgttttctgccatagcctttaaagcattacgtgtttcggtattaacttcgcctgacacataatagacatgctcatgaccagcagctttaatcatctcgaatagctctttaccatgagctacatgtttaaacatcacaaaggcattttcgtcacgcgctgcaagtttagtagcaagattagcaatccaacgatttcttttcttaacattggtgatgaatttaatttcttcttgatacgtttttccttttaaagcatttgcggctgcatctggatatcttaagaagattgtattaattttaagctcagttacttgtccgtcttccattaacttagaagttgatactggacggaagatttcaccaaacataccaacatattgcatgatattagctttgccgtctttaagagaaccagacagtccgtacttaaacatgcaatttgtaagacctgcaatgattgttgaaattgacttacccgttgcaagatggcattcatcattcatcatcatgccgaattgagaaaaccattctttaggctgcttaacagcggtctgccaggtagatacataaactaatgcattcgaatcacgagcagtaccacctcgaatacccagcatagcattacgaggaaataaacgatagtcacaaaaatcatcaatcatctggtcaactaacgcagtagtaggaacgatgataagaaccttgccttcgtaattttctacataatatcgagcaagtaatgcctggataagagacttaccagcagatgttggaagattaagaattctacgtcgattaactagaccttcatatacagcatctttctgataccagtgaggttcaatcttagttaatcctgaataaatttctttagttgacaaccaattatcaaaatcctcccgcgaaagagtttcttgctcgaatatagttggatcgaaataaaccttatatccgaattggtcggcgaattttctaatttggccaacaagaccaaacggtaagagacgattataatctagcagacgaattcgtccatcccaatgtccatagcgatatttcgggttgaatctgtatccatcggcttcgaagctaaaatagtctctgagttcatagaaaatcgagtcatcacactcaatatgaacatgactaaaatctttaaatttgacttggatgtcgtgcactgtactatcctcagtttataaatacaatcatatttatacattacatgaggcacacccaatgctagataaagactatattaaagaaattcaggcactcgataaaaaagaagctaaagacaagctcgacgaatatgccaaaaccttcggtattaaactgaagaagacccgctcatttgacaatatggttgctgatttggaaaaagaactggctaaattggccgatgagcctatgccagaagacaacgatggtctatcaattgctgatttaatccaagcagatgatgaaattgaaggaaaatcacttttcaatgatgaagcgtctgatgaagcaaaactactgtttgacgctccagttaatgttggtattaaaattcatgatattgacccaggtttctataaagaaacccctaaggtaaatgacccagggtttgaagtaaaaacaccttctatcaatgataaaggattttatgctgaagctcctattggagacagcgttattcatatagatgatgaaggacaagttaccaatattccggttagtatcacggaccccgaagaatttttcaaagcaatggacaaagtagttaaaattattaaaacagacgaaatcattgagcttcctgaaaactttagtccaaatatgcaattgctaggtaagaacccaggatatattactcttccatggtggatttaccaatggattaaagataacccagattggaaatctcggccaacgtcgtttgaacacccatcagcacaccagacactgtttagtttaatctattacatcaaaagaaacgggtctgttatgattcgtgaaacacgtaattcttcatttgtaactttaaaataaggaacagctatggcttatagcgtatctattgctcctttggctgcttcggcagtcattggagcaacaaccaattttactgcaacaacttctggagccgcagctgaaggcacagaaacgtttgtatggacagtaaatggtgtaaaacaatcttctgttaccgcagctatgaattatgttgctgcaggacctgcaggtagtaagaccgttaaagtagttgctactgttactccggctgaaggcgatcctgaaacggctgaagcagaaacaactcttaccgttaataacaaaactatgcctgcaattactttaactttgagcccgacttctgtttctaaagaaattggtcaatcccaagtagtcacagctgatgttactggtgccccttcaggagcaagcattgcttatgtttggaaacgtggttcttctgttatttctggccaaacgggtaaaacaattaccttaaccgagtcaacggaaactagctacacactgaattgtgaagtaacggtttctgccccagactataataatggaactgcaactaaaggtattgctgtcgcttttactaaaaagaccatgagcggtgtttctgttactttgactcctgagtctattacgaccgaacaagggtctgaagcatcttttaaagccaacgttatcggtgctccagaaggtgcaactggggtttattcttggaccaaagacggttctcctgtagaaggctcaacaagcacgttagtgattgacacgtctgatatagggtctcaagtgattgaggtttctgttgaggtttccgcagaagattacaccccgattacagtcactaaaactggcgatgtaaccattactaaaagggtagccccggagccagacggagaacttccgtatattcatcctctaccgttccgtggaacagcctatatctggtgtggatggtgggtaatggatgaaatccaacgaatgactgttgagggcaaagattggaaactcgacgaccctgacagcgattattacctgcatcggtatactctagctaaaatgctagatgattatccagaagtcgatgtacaagaatctagaaatggatacattgttcatcgtactgcgctggaagcaggtattatctatccgtaatattcgggagccttcgggctccctttttgctattcacggattggtttattatgtcctcgtcacatagatgaggttattatgaaagcattacaagctcacttgatgcatgaaagcggaaaggattttcaagaaattgcaagggcgttagatatcactccagcggaagctgctaaattgtgggtctcagttgagaaagcacacgaacggtttaagcaaaaagaaaaagtcgtttatcggaaacgcttaacaaacgttggtataaaatctcgtcataagaaacttgttaaacacatgaggttattatgaaaatgcctaaagtagacccaattgtagtagaacgatttgaagaaatgctttctaagaaatttacgccagctgctaatggggtaaatgtctggttgtttgcatctaaatttgttagtaaaatgatggctgttcagagttcttactactataaaagtggtgcacgtaaaataacggatttgattaatgaacggtatggaaaaattgattggatgctgatggataaagatattccattagtacttgaggttggaagcaaaagtcaatttgaaatcatgctaactaaaagcggatatatcatgtatcgcttcgtgccgagcggctattaattgctttaaaaatcgatgtggtataatgggctcaggggaaatcctctgataccattttgaccaagatagactcctggttttatattatttattgagagaaaaattatgaaccttgccgatagaatggctaatacagccatcaatattgctacagaagaattgagtgcagcaaaagaagaagtattaacccagattgagaaaaccgctttagcgggtcaacgtgagttaattatgtatcctagcagtttagttaagaaacatattacaagtgttcttaattatttgcatgatgaaggatttgttacaaattataccagtgcccagcgtaatggtgatactgactttatgaaaatcacattctaaggaaattataatgtttgcaaaatattctagtctcgagaatcattacaacggtaagttcatcgagaagattcgcggtgctggttttgatatgcatactgttgagtgggtggctcgtgagaagattcatggcactaactttagtgtgattattactcctaccgaaatcgttccggctaagcgtactggacctattttagaaagtgaaagtttctttggtcatgagattatcatgaagaagtacaaggattctttcgttaagatgcagaacatgctgaacgccatggatttagtatctgttcaaatctttggcgaatttgctggcggtggtattcagaagggcgtagattatggtgagaaagatttctacgtgtttgatattctgtcagattctggtaatgaaaaagtttattgggacgactacgtagtagaatcgtttgctactggtcttggtcttaaattggctccacttcttggtcgaggttcatttgccgagctatctcagtatgtgaatgactttaaatctattgtcaattactataatgagcttgttgacacgactgaccttgaacatgcaaataaacatgtgttcggcccacaggcttcttctgaaactggcgtagctgaaggctatgttcttaagccggttcatcctaagttcttcaataatggtactcgtgttgctattaagtgtaagaactctaagttcagcgagaaggctaaatccgataagcctattaaagcgaaggttgaactcaccgagaatgataagcgtgttctggaaatcttttccgaatatgtaacctggaaccgcgtaagtaacgttctgtctcatattggtactgtaactgctaaagatttcggtcgtgttatgggtctgactatgaaagatatcattaacgaagcagcacgtgaaggtcatgatatgttattcgctgataatccttctgcggttaagaaagaaatcactactttgattcaaaatactattcgtagtaaatggcatgaggttgtagaataatgagattggcgcttattggttcacgagaagcgccacgcagagttctgagtctaatgactacaataggtcaacgcctctcggaagaggggcatttttcatattcaggtggagctccaggttcagatgaagcgtggttggcgaaatacgataggtcaaattcttgtaggattattccttattctggcttttgtggccatgttcctggtacaggtgttgttgtatggtctgaattatcaaacgaagccaaaatcaaaagcatcattaaggcgagagaagttacgtcgtactgggatgaatgctcgaagatagtgcagactttattcgcacggaattctatgcaggtattgggcctagaatgcactgagcctgtagataaggtattatattgggcgcctgagaaaagatgcgggagtgtatctggagggacgagagtagctgttgatatagctcgcaggcacgggatagaatgtgttaatctatacgataagaaagtgtttaaatccctcgaggaggaatactctccgaagtttgacatatttagtttatagcaaaaagggagcccgaaggctcccataaattagtccgcaatcagcttaggtaacttaacaccgagcataacagacatctgacttcttcctgccatcttatccatatccgcagcattaatcacacgagcttcgtcctcgtccaatcctacagtatatgggttaaccgacagcgcgtaacgaaccagtaaagctacagaaggctgcaagctagctgggtcaacaataactttaaatgcaccaacatgctcagggtcgtctaaatcaagaccttcggtatacggcgcatagaataatgaacctacagtttccttcccaccaaattctgccttaacaccaacaataacgtaatcaatcggactgttagtatcacaatacagtggaaggccgttattcagaatgccatatgcgttttctggaatagtcccatcgttcttctgcattaaccaaccagaagctgccagtaccgctgcacaacgagtagatgctactgcgtaggtgccagaataagaagtattacgttgaactgctgaattcatttcacaaatgaaacgatacagagtacgaccttgttccggggcagaatcctgcttagttaaatctaatacacctttatcggatacaccagctactttaaaccgagaagaaaccgtaatcaatgattgcaggatgtctttattaatgtcttctgccatttcagtagcaagtaaatcatcaataagctctggagcatcgaacccgttagcttctaagtcttgagctaattctacagttaaatccgttttaagcttacgcgatttaacctgggtctgccatttatcaattttaaaactggcttcggtgattgggtctgaatcaggtccttcgaatttttcagtgactgcagcatctgacatcatacgaatattattagctgctactgcttcagatacaattccaaattcatcggtttctgctgtatcggtaaacgggctatctttaagtactttaaagaccacattctggtatttgaacatatcgtctttattgaatgagtctttatttgccatagtgagttcttcaattgactcacgttctggcgccccgatttgacctgcataagttgcacccgtattaaacgtcaggtcaccattagggttaagatatttaataccatacagtgctgctacaggctgtttagtacgctgtgtagcaacaagatcggtatagattaatttagtagttgcgcgcgttaatgcaacgagattagggcgaccaattaagttgctactcgttgtagttgactcgcgcagaagttcgttgattttagccattgcgctttcctctgtggatttataagtttatttatatccattaaaacaactaaagggagcccgaaggctcccttattggtattagatacctttaacccatacacgacggaagtaagcattcttaccaacagagttgacgatagaaggcataccagaggtaatacgacctttcggctgttgagcagcagaatcggcgaacgggttaataccgataccgtaacgggttttgaaccccatgaccggttggaagttcttcggatcggaaccacgcagcggggtcagtgcaacatacggagcatagtagataccagcatccatttcgttagcacctttataaccgatggtgaagtaatcctgacgagcatactggtcgatgtatacacggtagcgaccacccagaacaccagcaaatactgctttagtggtgtcggtattataaccacgacccagaccctgagctgccggagatacgttggtatcaacagctgccagtacgttaactacgttacgggaagcgataatgaagttaccttcaccgcgaccggtctgacgagcgatttcagcggattctttgtcaatctggaacagcagagctttaaagctttcacctgcccaacgagcaccgcggatatcaatcgggtcttggaagtcgaatacaccagctttagaaccaacggtctgggtcataccagatttaccaacctgagcggagtagttaatccagtcaacaacttcacggttgatttccagcataatttcggtagccaggattgaactcaattcagcatcagcgtccataccgtgaacagcacggaggtcctgagccagttcgatggaatactgtgctttcagctgacgagatttcgcttcgatagtttgtttatcgatacggaagcccatttcattccacgggttatctttagaaccgttaaatgcttcttgcagttcagcaacagaagtagccataccttcggcgatttctacaactttaccagcttccagagcggcagttactgcagcgtccagtttagcagcatcagtagcgccagcgtctacagtgaaatcttcaacaacctgcagatgagcacgaccggtctgtgcgaaatcgtgaacaacgatatcaccaacagtcagagcatcaccggctttaactgcttcaaatttctcggttgcaccctgaccagagaacattgcatccggagcgtacatcggatggaaagcttctttagcaccagcagccagagggtctttgccgtaaacagcgcggagagcgaatacctgaccggttgggttagacatcggctgtacaccacagatatcgaaagcaatcaggttagggatagcacgacgaaccatacccataactgccgggccaatctgggttacagcaccagaggtctgaccagctgcgatgttctgtgcatcataaccatggtcaccgccaatttcggcttcagacaggaaagaaccaaatgcttcagcgattttttcatcgcggtattcaggagcctgattaatatcagcttcctggttttcaaaaatcttagcgatcagagcttttttgctagcgccaacaatttccggcagagcttcgttctcaagcagcggctgccatttttcgataagtttattctttttcatgtgttgtataaccttttaaattaagaaagacgagccgcttgggccacataagcatccataacggatggggttttagtcgcaggagtttcttctactgcttcagttgtgaagtttaaaccgtctgcttctttgtcgatagtatttatatcggcagattccgttacagactgctctacagaaccctgcaccatttcaacaatagctttcagcttagttgaaaacgagtcagaataatccataccctctgtcagagaaactactttctctttttgggtatcagtcagttcacgggttgcttcttggatagcatactcacgttgggcataattgatatactcatcgcgcttagaaacttcttcaaataaacgagcagtttctgctttttgctcagcaagttcttcttccatctcagctactacgtctactgattcttcaggaattacaacgttgtgctcaacaaacagctctttcataccgacaaacatggattcaaacaggtcagctttaataccgcggtcaaccgccagctggttttctgccatccattctgcagcgatatggtcaaagtatttagaagcagcttctttcagctcttcgcgagcttcttctttagctttttctttttcttcttcaactttttcttctgctttctcagcaatcttttcaatatgagattctgccagagctacggcgtgttttttgactgttgcttcgaatacagtgctgaagttagctttagcttccggagaaagctgaactgattcgaaaatactgtcaagagcgacggaagcatcgatagttttagcttcggtcattaaaagttctttaagcatttttgatgtcctgtgttaagttacataattatttataacgcttttaacttctctgcgagagccataaaagcatcatcagcactattggcaacttgtgccgaggtattttccgaaatttgtttcggttgtacccatgcatccggagcactaggaccccaaactgcgtctacaccaacagtcaggcgaaagccttcttgtacgatgttatatccttttcctgagtctttcaaagaaccgagcccgcggcttgatacaccaggaatccaaccagcacgaatgttagcggctaatttatcacctggaccgtggtctccttcgatgattcttgctcgcccataaacatcgttgcctttccaccacatatcttcgataatgattgcggcttgcatcgggtcaacatttgcacgaggtggatggtttaattctcctagagcctgacgagtagcaacctgttccttaatataacggcttaccgcagtctcaagaatgcgttttggataaagacgtttattacggtttactacttctgcctgcataaaaacaccttcgatatacagaccaggttttaagccagattcattttcgccttcaacgataatagattccagcatgggtttaccatcaattacatcgcccggttgaccccaatgctcaattaaaagttgttcattgaggttttccattaacttagccccagagcctgacggcgtttaagtgctttcttacgtttacgtaatccacgaatttgagcagatggattagcacgttttgattttactgctttacgcgcgatttggcggcgtttagctttagaaagtccggttgtttggaacgcgttacgctcacgtgttttacgatccttagtacgtgtaatagtacctttagaatcaacgtgcttaacgataaattcatttaattgtagagattcgttaattgaacctaaagcaattgctaaatcaggctcagaagtaaccatgttctctacaattttatttatatcatctttagaaagcgctgcggacaacttatcaaaacgtgcctgtgcttcaggaagaaaagcttcgacagcgtcgataactaattcatgattttcaggcagtataagcattactcgtcctcttcgtcgtcgtctttctcagacttatcttcatcttcgtcgtcttcatcttcatcgtcaacgggctcttcaccctcaatcatgacagacgctgcgataaattttttgcgctcttcaattaaaccagatgtccgttcagccataattgcaccaaaagcttttttggctgctacgaggtctctggattcaattgcggaaatataattttccattagaaatcctcttcattttcttggtcttggaagcgagcctctttagactctaattcaatttgcttggcttcttgttcaatttcttcgtcagacatctgaaggaaatctttcattgctgtcttatgagaaatatacttgccgataaacggttcagccattgtgagcatattgattctacgctccataacttcagcatctttcaactcggtgaaatatgaatctttatggaacacaatcttaatattatttatttcgtcttcccactcatctttagacaaaacttttttaagaattagattagtgcgaagtggatcaagcataatctcttcgaatttatgctgtaatctacgaataaatttagcaaaatcaagctcatcgcgagtaattgctgtgccagcatcaaactgcacaccaccttgattatttgcatctggcatgcgcgaaagaggaactcgcaatgccatgtataacgctgttctaaagtaacggacgtcatccatatcactcatacctgacataccaggaagagtatctacttcagtaactgctttaccatctctacgctgcaaccaatagtcttctgtcattgacatattatgctgttggtttttaatcttaccagttgacgcatcatatacaacacggtttttcatcgtgttcataatatgctgcatgtgtgctgccgctttacgagaaggcatattaccagtgtcgatgtaaaacacacgacggtcaggagcacgagtaatacgataaattaccaacgcatcttctaatagctttaactggttggcaggtttaacggctcggtgtaaataaccaatgatgttttgacctgagcaatcaactagcccagaatgtgcatatactatagcatcgcgtggaattttaattttcgttccggcggaatataatctaccatctgcgtaataactttctttgccagtatcgtaaatgaaatactctttgtaccccttaacgattttagtgccagcgtcatcagcggtaacgatttcacggatgaattgtaagttgcgcgggtcaagacgtctcagttcctgaattccgtctttcattttcttggtgttgacgattttgtggaagaatattcttgagtcaacataccaacggcggaaatggtcggctccttttcgctcgaaattaaggcatgttaaaactgtattaaattcttcaagaatgcggtctttaattgcttgactgaagtcggtagaatctaaatcaagagaaactactggatgaccgtcttcgtatacaaccgcgtcagaaactatttcttcaacagcattgtcaacttcgtagttattcattaaactacgataagtgttgattaaatcagcggttgttttcattccaggttcattggaaccaaacatcatttggttgaatgaattatactggatttcgttttcgtttgattcaacttcacgagctccatcatcaaattttggagcagtgattgactctaggtcattgttgatttgttgcttatattcagcttcgtcgcgtttttcccacggagcgaataagtccaaaatatgaaaggccattggagtctccgaaattatctataagtatatttatatcgaagttttgtcagatatttaagcaaataactcacagaacttcgatacggggccgaagccccataacattattcccaccagtcaatagcaaatgtagtttcgaacgtttctacctcattattcgaatcccagtccatctgtacttcaccaacgttagttggccacagaccggtaatggtgtgttcatttgtgatagttttgccatcacgactaaactggcgtaccgtagcaacctttttgtaatcggctggagtcataccagagatatcattgccttgagcgtgggcctgagcctgccaagcaataattgccttacgtacttcatgtttatcatcgttatagatggtaacagtccagtcgtcataagtacggtcaccggcaacgttaatcttacggttcatgtacccgactggaactttttctacgatacctgccggcatcggtgctgctttacatttgaaactgaagttacgacccagataaggaatttctacctcaaacaggttaggacgtgcaaagtcaccagattcaaacgcacgggtgatgtctgttaattccatcgttgtttcctatagatatttatatagcctcttgattgactacatcatcgtagaggctattaaagtgtgcggtaatataatttatcatctaaaggttagatgaccccagaatgtcctggggttcatttcaatagatcccataaatcaatactagatttctttgattttgaccgattttcttcccaagtgattatctctaaattatcaatgcttcctataatttcaggaggaactttgttgtaaaacccatatgcaacagaaaccttatggtctaattgatacgctccaggtattccacatagtccaatcttatcaaaattttcccatgtagaataaattggtttatgcttagaagtttctcttctaactttactagcatattcattatattctgtcttgtttggattccagcgaggatggttttctcctgtcatcgaagacaacactttacccttattagctgttccaatagtatttcctatcttaaattttccgctacggcaatcatagcacacgtcagtgtctctgcaataacgctgtgaatattgttcaccgcatttatcacaaacacaatcaacatatatgtttgacccgggctcaagatggtcaacactgatatcaattgaataatatttgaatccatgcctaggcgaacccagaggaggcagcttgtatccaagttccgaaaagtatttaaaatttttaggaattatttttactttaacaaatttagagataatcacttggttttccttaattgcacataatatttcatatgtgcaattgtatcaggatttagcgaaaatgtacaatttattgtggtccgatcaactcatcgaaatccgctccagtcgctgtagcaacaaagttaagcgtaatataatttatcgatctggctggtttgatgtagaagctcgctacaaactcgttgcggtcgataactgctggagtgttgttcgtggtatcacatacaactcggaagtcatatacaccacccagagctttaatacctgcgaggtattggctggtttccatacggaaagaactacgggtaaagttatcgtttaattcaaacagctgccacttagaagaatcaccgatgttgttcttcagcatgttaaacaagcgacgaacgttaattcggtcaaacggagttggaacagtggttgcagtcttatcaccaaacagaatgaaaccttcacctgtaccttgacccgttaccgggttaatacctgcttgatacatacggtcacgatgtgcttgacgaggttcaatcgcaagtttaatgcagttcagaatctgaccacgacgataaccagccggtgacatccaaggctgagcaatatcatcagtgcgagcacacagacctgcaatatcggcagccagtggaacccaacggtttacgtcgttatatttatcatactgatatttatagttaccatcaattgccgcgtacgtggtattaatgttcatgttagcagaatcataagttccatcgccttggcgccagtcgattaaattatcaacagcacgagtcagaggaatatttacaatcgttgaccttggaggcgaaatgagtgctaaacagtcttgacgctcatctgcaatagacgaaacatgtttttgtactgtacttgcgatttcatcggtttcaccggcacaagcaccagcaatcagaaggtttacacgcaatgcttcacggtcaccaaataaatcccagccttgaattaaatcgccagcagtaactgattcattagctgaaaccccaccacccagacgaataacaccggaaaatccttcaggccatccttgcgcggtagcaaatatataacgtgaagaacctttggagaaataatcgtccataaagatgttgtttccgtagatgtctttatcttgacggcttgttgataacaccgttgattcaactaccgcaccatctctacgaacaatgatagcgtactgtgtatcggtctgaggaccatatccaaatacggcttttgcggttgatgcacgctgtccaccactcggataaatcgtcagctgttcgcctttatcaaaagcggcttttgatacaatttcaatttccagttggtttccgagctcgccaggatacgcagctacaattccaggcattttatattgcgcaagcgcagtctggaattcagtttttgtcatttcttcatgggcagtttcaggttcagttaacagaactgttgaatcagaaataattttgcccagagtaataacagcggaaacaccagaactctgtgaagtaatagtagttgtccatgaatcacctaaatccggatactgattaatgctttttgcatatgcaataatttttgccgtcggaatgaacaccgacataatttttccgtcactatctacttcagtaactgaaccagtgtcatctacagtttggtctgcatatttaaccgtaattttatcaccaacttcatagttactaccagcagttgtgatttcccactcaatattatcaaccagtggagatgcgtttttggcagcttcacgattaactacacggactgtacgtagatcattaccatattgcagaaagttcattgctgacataaagtaatcagcagtttggttattaggaccaccaaacatatcaaccagttcaacttcgttagtgatttgagtaacttgatatgcaggaccccattggaacttcccgacaattgcggcacgacctgtagcgttaagtactaccgtgctctgtacgctcgtttctttgagctcaattccaggagagactaaaggcatgatatatcctcaatgttgtttgctttttattatttatacaaatgaaagaccatgttcttgaggcgcatattctgcgctattcacggcgtcaacgaacactacaggagcgtaatcgtcgttcatatcttctaattcgcgtttaaaaacttcagatgctaaacgcatttcatctttatccacgaaatcagcaaatttttgctgtgttgttaaccatgcgaaaattacgagtgacataattaaatcgtcatgatatccatcttctgccgcccaggatactcctttctcagagaaagtacgaaattcttgaacagtagcacgatggtgaataatgagtttatctttttcgataaggtcttttagtgcagaacatccgacggcttttgaccttttcgtctgtttcattcctaaatcaactattgaatcgcaaatgacattctcatattctaaatccatataaagactcttcgctacagaaacacctgtagagttaagttctatatagatcggagcttcgttgtactccattagatatttaataactatatccgggaggattaagtgagaaattgtattagaatgtaatactccaacttgttcccattcagatgtagtcacgtcaataatatttagtgcatggtaatcctgaccgcgtccttcagcagagtcaagagttgcaatatatttgtggtctgcttccgcttctttaaatttataaaacccgtgcgagtcaggagtaacttcaatccaatccatattggcaagtttcataccggaaatgagagtaccggatgtgccatgaaattccgcacagtgctcttgtttaaactgttcaagagaagaagcactgatagtttgaagtgaccattgccacccatcatcaaacatatcttcgtcgttatatagacgttctttaaccgagttccaaattgcagtataaggcgtaaagccggatttaccttcaacagctgcagtccaaatatcatagaagtggtttaatccacttggtgtagtcgtgataataattttagaacgacgacctgatgaaataacaggttggatagcaagccatgcatctatgaagtttggaataaacgcacattcgtcaatgtaaatcattgcaaatgagttaccacgaacagcatcaggactcgaagcgtatgccccaatagatgagccattatctaattcgattgagcctttgttccattcaacaataccaggctgaagaaagtcaggaagtaattcaattgcttgcttagtacggtcgagaacttccgcagacattgagcctttatgcgcaagaatacctactgctttatccttattaaaacacacgaagtgcgcaagaaagattgctactacagtagttttaccaagctgacgactaaggttacaacaagtcatacgtttagccgccatgatttctagcatgtccctctggtaatcacggagctggactttgatagtaccgtagtcaatatgcgtaattgcacagtaggtctctgcgaagtacacaatatcgtctcggcatttcttccattctgcaactatttcacgagtcaactgcattttaatatttgctcgtttaaggtttggcaatcccatatagcgggtgcgcttattatttttgtccttaaacgtttggaaatgagctgggtcttcaccttgcaaacgaattttaactatcccatgcaacttaagatagtcttcaaatttctcaggataccacttatcatcccattgcgatttaaagaaacgaactccgttttcgattttcgtttccatttcagacgggtgacgaataaccgtcagtttcccgtcatttaaaggatgggcatcactcagaacgttaaacggttgagtctgttccatttactattttctctcgagcttcttgtgcttcataggcatcaccgaattcatccatcatatcagcggtagaccctacaaagactgttgcgttttgaatattcattccttgttgaggattagctccttttccagtactaacctgctcagaagtaatgtctttcatttctttatgaagcttaagaatttctttgttggttgtagtcatctgacccataagagttgcaaatacttccatatgtctaggagagtcagcattcttagcagtttccaaaaatattttagctgcgtccattaacatttgttgctggaagtgcatgttcttgcgaacgaccgaatagtcatcttcgaggtcaggtttacggtcatttggattagatttaacttcaactaattcaagtttttcataaactggaatttcttgtccttctattccaggaattccttcgatgtctaataatttagccatatctaattgtaattcactcatttttcacctctcggtccaggagcctccggatttaccggaataggaatatcgtgagaataagtttgtttactagaaccatcccaattttcgtgttgaacatctcgtggagtgacttcgctatctactgattcaaagtttccttctggagttagctctttgctgttagcgaagaaatctaaataaatggttctaatttcgccgtcaacctcggcaacaggaggatataaccatccattgacttcaaacatcagcgaccattctaatctacgacgagtgatattatctccatcaacagcttcatccggagaaaatgactgtaatacaattctaacatcacgattaaagcttgtgtctttgtcgtaaagttcagttatagtcgtgttaaaatgcggctgaaaataaggaacgatttgctcgatgatttgatacatatcatcttgattgcgtgtataaattcccaattcaaaaatcatcttaatcggagtaggattatactgagatgtaatttttgaaggggttttatatgatttggttctattcaactgtgatgttttatacatcgcgttgtattgcatatcaaccaagtgcaaattcattcttggcaaaacagtttctatctttgctttattctcggtagactggatagcagtccattttccgagttgagaaaggaacttttcctttgaagcataagtgataggtactttaatatattttagtccagtgtcttcacgccaacgagcaatttgtacatgagaaaataaatctccaagcaatacaatgtatcggcgtaaggacgaattataccaatgtccaaacatgatttctcctaagggacccaaaggtcccatctttattttatttattcaaaaaatccgtcatcaaacgaatctgctttaggaggagactcaagtcctcttccgttattaacataatacggatgaacatattcagaggcttctttattaattgcatcgctttctgcgtattgtacgtcagaaatatcagcaagagaatcaatgtttttgattggttctaaatcaagttcagagaactcaggaatgataattccttcattgcgctgcaattctggttgaagctgctcaccggaataaatgtatttctgcgcagtaatcttacgttgaacattttgacctaactgataaaatggatcatatggttgaacccaattaatttcaaacagcgaattatccatcgggaaataaatcaggtcacctgcctttggttctgaattattggtttgatgcttgaacaaattaggattaatagtcaaattgacttcatcattaaccatcataccaaatttactgaagaacgtgttatcaccagaataaccgtcaaaagagtctaagtaagcagcaaatttccaagccttggtgaatttacttgatgggtcttctccgaaaagcaaatccggattgttatattcgcgaggaaggaaataaaactcaattcctctcatttgaatagcctcagctgataaaacatctgctaacgtttggctatttctgtgattataaaaattcacataaggattgagaatttctgtctcattagttttattgtatcctcggtaatcctcaaggcgagcgaataaactagaattaaatgtagtcatcttttaccccaacagaataggacaacccgggtcaagtaaatcaagttcctctcggagcctctcgatttcttcttgggcctctactttaagtgtttggccatcaactgtaacgccgccggctaattgtagcccttggtgtttaaacagaatttcaccccacaactttttagtcagtgctgtagcataatcttttacccaacgattattataagcaccttctctatttgtattaccttcacctgcatattggccgttattgcgaaggttaggattctgatacctatctcctaagccccaatggtcggaagtttgttcaccagcgaagccgtaacctgcagtattacctaccatcatgtcggtattcataaatgatttagtccagcattcgcaaacaatgatgtcccccttcatgaagttgcccattactttaagcatttcattatcagagttataccaatagtctggaagtggggcaagcaaatcctgcatcattgaccaataagtcattaattgagtaaaatagcccaggtcagcaccgaaagcgtttggtccataactcttattacagcttgaccccattccgccattaattccggccattcccattaaaaagtcagtaaaccacggataggtagcattaccatccattgaagttaatgaacctacatttgttctaacgatttgagtgacagcaaatacattacgaccacgcaaatcaaacacaccatttaaaaatcttgcgttgtcagcttcatcttttccaatataaaaaacttgatagcctttattcaatccgttaaagtggtattcaccatacaactctaatgctcgttgaatacaatcataaatttggtcttcagttacttcgacattaattaccggcgctcctagacgtcgaagtatagcgtctttaagcgtttttgggttgtatgtgttgtatgacatataagctcctctttatattctatttatacgaaaaagggacccgaaggtccctttcattatactgctggatgaatagtaatatccaatgatttaatactaacaggaacttttgattcttctgaagcagctctatacacaattttgattgcatcgccagacgaaaacttaataagtttcttggttttcaacagttgctcgccggttactgctttaacacctaggctataagtaaacacctcaatgttattgacgagaataacaatttggacagctttatctgaatcagaagcttcgataactgtatcagtttctacacaaaatacgccatcgtcatcaacaataatatcatcaacaatacgaatgccagcattaaatgaagcagcgaccaatgagttaggatttaccaatgcatcagaacttaaatcaacagtgaaatcttctttactgaattcacctattgatgaaggcttcttaaaccattcgccccgtttacggaggtatgctccagtctgttctacgtcagtaactgcagtcacgaatttatcttgcaattctactacagtagcgtatacaccatcccgttgaactggattttctgacgaaaagtcaccattcatttgagtctgtaacgtaaatacagaaccttttaacccttcgctgttattgccaagttctacttgaatgtcctggatagcagactgctgagagttttgcatcccttcaacattggtcattctcgctaaaattgaccccggaggaatcggctgtccgccaggaacaataccaacttgctgatttatccatgctacttgaccctgaagccctgatgaagtatcacgtcctacaacatcagaaatgtacccttggtcagttgaaagagaactaatttttccttcaatagtatcaggcttatcagaagaccccaaacgagcatcaatattattgacacgaggaactaacccggtttgtgcagagttaagtgttgcgtcaactatacgataatcgttttctaatctagtagtacgagctccaatttttactggattggtaaaatcaatggcttggttaatagcaaagatttcattattagctgcggaaatagcatcagcgttattcacaagccttgcataaattgaagctgacgtagctccggatttaggaccaacttctttacgcaggtcgtttacttcaatagtcagagaacctacgtctgaatcattgtatgcatcctctagcgcctgaatacgctcgtcatgttttactatagctgacgcattgttgatgattcggtatttcataccagaacccggagcgtcttgcttaggctgtccgttaacatcttgcccaggatacgcaccaatttcacgtttaacccaaactatattatcacgaactgttctgtaataatcatctttactagaatcataaacacctacatcctcttcgagaaaatcaaggtcagttcgaagtttttcggtgtcttcttctaatttaagaatttgtccatcatgcttttcaatattctttttattgatataaacctgctcaatggcgtcagaagaacctgtaatttctaacgattttttgatttggtctacatctacttgaatattttctacagcagttccaacgttgttcaaatcgttatgtacctgaaccacatttttctgaatctgcacagaagctctattcagttctccatcatttccatagcgggttgaagccccattaagaggctctgtattttttatccagttaattctctgttgaaaatcgtctggaattccgtctacaaacggaagcgagtctactaattttgtcatataattccctatcggttggtgcaaaacgttaatgacgctgaataattatcgccacggatattttcaaatggctcaatttgaactctggcgttaggaggaacatcatttataatatatgagcctgtagcatatccttcaaatctccacgaatgaccatttctaccgcccttggtattctctatattgagtgtatgttctcctctattttccccgttgacagttattctaaatctccaaattctattgtcatagccgtcgttattacgttggaattttattgtgagagtcagcgccaatctagaagtggcttcatatggagaattacacccaaaccagtttccagcaggaatataagttccaccttctacccaagtaatattaccgacacgcgttccagctggcatatatcttccatccgactcagggcgtgtataacaattgatatcgttattggtaattgttatatcgttatcaagggtttttccatttattttgcgagttttaaagacagcatcagtcgcagctgcagcaagtgaagcatctgatgttggagaacctgataatcgggttaatccatatttatccttggttgattttaacgcttgtagactttttggagtaacagccaaattgttagaagtagctgaagccacatctgagtctttagcaaattttactataccaaatacgctgtcagacgcttttgatgccatgaaggtttttggagttactgcgtatccatcgtgaacagcacctgctgctacctgggcttgggttgcgacacgaactaatcccaagttgctttctgttgcagaagtataagtaggaggattaacgctgaactttccaatcatttctacaacacgcttaggagttactgcggtggtttcatcagttcctgcttgagcttgagcggcagtcgttaacctaacagttccatctacgttttcttgggcttttacggttttaaacacatggccaagagcagcagctgtaatagttctatttcctgcggttaatgctgcggcttcagtattagttgcgtatcgggttaagccaagaattgcggtagttgcttcaggccgggtaattgtggattttaatgtagctggggtaaccgcagcattacctacagttccagcttcaacttcggcctgcgtagctgtacgaattatacctgctacggttggagatgctgcaggtaatccaatgtcagttcttgcccagcttccaatcaacgctagcgctgattggacgtcttttgtagcaactggccattgtgtatttgctgggtcaaatatcgtatatttggccaaatcactgtagtgattatagttattctgggccattatcccatccttctaaaatagtggaatgtaaatgtgtttgcaccgaaggttttagtttcgttaccaatagcgtcccattgtccataacccgctttagcaggtgaagtaacagtaaactcaacagttaaaccatattttttatatgtttcaaaattatggttctgataatccagatgaataatatcaacatactgaggagttgcaggtgattgagtaacttgttgaaccacttttccaactgcttctaattcttttaccttatcataccacctggtagctactgctgcaaagtcatcaccattcgcaattctaattggcaatccaagaatgtgaattattactgggtcgccaacagaaccgtcttctttaggttctaacgaaactacgcctgaaaaagtagcgcgtgtaatttgctgtgctggttgtggagatattccggtgtcattacaaataatagttccaatttctgctgactgtaatgacattaaatcattaatagcagcttcagtgtttggataccaaacacctaaatccatttgttcaaaggttaggctccctataggagccttatttcctaccgcaatattctgcgggtctacgcgatattctgaaaaggcagttaatcttgaattaactttagccccttcacgagttttagtttcaatcgtcattttaacctaccctaatccaacgataaacggtgattgttggctgaattttagtgatgtcatttggaactacaccgttgtttaccgcaacagtgtcttcacggtatttagaataacctggaccttgtgcgtctgggtctaattgacatccgccaataactacgctgccatgttcagggtctgaaattagaactttgtctcttgacattaactcaggaatgtgttcttttcctaatgtaaacgtcaaatctccaaccgttccacctgctgttaatgatggctgaccattttcgtttaagttattgttgttacgcgaaaaataaggatcagatgaatcattattccaaccagcagtaacacggccttgtgaataaagcttccacaccccaaatcccatatagtcagcagggtttgcgtggttgtgagcgttttcataaatcgtgccaatcggataaattacgtcaaaaaatgctgcaatattattgactttaatcataatatcgtcagcaaccggacgcatatttttctgattaggttcatcataatttgtgtattcaatgcgattttttagagttactaattgctcagcattcatatacacttggtcggtttctgccatgatatcgtcaatatccatagtagtaccgatgttattattgaaccaacggacggtaagaaggtctttatcttcaaacgcctcaccaaaaataatagcttcgacgttagtaccagttgagtcaaattccagtctatagtcttggttagaatttacccattgaccaccattgtttatacagtcttctgcatatccaccttccgcgccttcacaataaaataaaggaagacctgcagttccagcttcgagtaattcctttccgttcaatgaaatttcaagcgagttaggatttacccctacgcccggaagtacacccatgtcatccagagtgattctgcggagagtagtaaggttatctactatcattgacccaggaatcgtctgggatgtagtctgggctgaatctcgtatctggatagccaacttgttgtatgaagaccgataaacaccaattccatctaggaaggtttcaaatgttattacttccccttcaacacatggaacttttaaacgaatgtctttaccgtttaattctaccaattgacctgctactgttccaggagaaccgtaatcagcattggctttatccataacgctggtttcaccgtaatataaaatattaccacgacgatatacattaagcgagtcttcgttatattctacgccatcaaaaatgttaagaaagtcagtctgacccgcagcagcaataattgattttttcgctacagtacttaagttaccgttagttagcttatctaccgttttattttcaatatattcccagcggccaggggcgcaataaaccaattccaaatcttggaagttagtattgaaaattttaggagaagctgaaccttttaatgtatcgccttgagcaggaataactgtgattgggcttaatcgccaggttgaccaaacatcacgaagtttaataactttgttatagtcgttggctgtaccctttggaagctgaacgttaactcttgctgcctgggtattaatagcaaaggcctgaccaaacttagcatttaaagtagttccagtagggctagctttaaaagttttccatgcacctgctgcaaatggaactgaaccatcacctaactctgaatataaatcatcaaagttgttattaattttaagaccacctttacggaggtaatcaccagacccatcatctacagattggcctactatcaaattttgtttcattattgagatacccctacggtctgtgtagcaataactttaactgccaaacgtgcgtttccataagatgttgaagctgtgcatattaaatctttctgcgcgttaatagagtatgaaatagaatacatcttttcattttcagatgattcaccgcttcttaacactgcatattcagtgtcaaatactcttccgtttggcgctgatgaagtaatagtcgggtcaatcataagcatgacttcagatgattgccttttgatggtttgaccacctggatttgcgctgaagcttaataacaatttaacagtagagtaatcatcgttatatccaagccgaatattaataggagaacttgttaaattatatgtagcttctaacggtgaatatgtgctgccaaacatacttgaaattgaataatcccaaactgcagcaccgttagctttgacttcaacacaccacaattcaattctacatcttggcgtgttgataatcaactctcgcgatccatctttaaatgcatctgctacaccttcgccgtttgttgttatttttatggatctagcttttgatgctgagccattactatttacaacgaatacagcttctcccgctttaccttttgaaagacgaatttgaactgccccttctgagcaatcagcatctatgcatgaacccatcggaactgtaccggccgagttagcatcaccaaattttatcttttgataataacttgttgcgtggattttttggtttaaagctccaccaccggctgcaaataatcgttgatcagcgaaggcgttataaatggcgtcgaagttatcattaattttcacaccgccatcatacagaatgtcgccggtagaagcattaccaatctcaccgacgtcaattatttttttacccttatctgtatacataggttaacctcatatcaaagtatagtcttatttatataaaaatggggagccaaaggctccccataattaaaactcgaaaattaaatttaactcttctgtttggtccattgaacgtataataggttgtcgattttccatgtaaatcatttcacctgactgtctttcaagaccagaagcgctataccaacctttttcagccttaacgttaggagaatttggcattggcttaacttcaagcggattagttataattgacaactgcctaaacccagtatttcccggaagactaaactccggaaaataaattgcatcaaggtatgctttaaatctaatcgtattacacttcatacgatagattaggttaaagtcgttttgttgccaagttaagttgttttgaaatccccaacgagctggagattcttcaatctcttctggccaaggaactacgatatattcatttgtacatctgttaattgatacgtcggctggaatttcatatagatattcccaaagatatccatcgcccaaatcgacagtaccatttgcatcaccacgcccacgaggcgctgaaccggaaatagttgatggcgtccatttacccccaagcttaatacattcttctttgcttgtaagattaccaattgaacacattccattctttggaacatcaatacatctatataccatccatccaaatccagcatcagttctgttatatggcgcagagttagcaacaacgatatcgccgattaaaaatgtgcgtggattaggatatcttgtatctccccagtctcttcttggaacaacacagtcaagcatagatgattcaattttgactgcacccatcatatttgtccaaatatcaaccacaccgtcttcattatcggccgggtatggaggtgcaaacccaggttcagattcgttatctgaccacggagtgcttttaccaaatgaaacatacaacgtgttttggtccgttcccggaccaattgatttataaaatgtgtacatcttttcagttctaaacttagatgtaatgatagcacgataaatcgtgctacgcgttgaacttgctcttgttgaattactcatcaatttttacctgtgtcggattttcaggatcgcgaggattacctgcatcgtctttaagacgttggttaactaaatcgcgataattagcaaacgttactgctgattggtcaaacgtaggacttaacggcttacgtcgttgtccagggttttgtccagcgataacactattgttattttcttgattatagttagcaggtaacgggaaaggttcaccagcttgagcacgtgaagaatacctaggctcattggttattgggtctctttctattgtatcatctgaagcgataatagcaactctatcaggataaactgatggcagtcctgcatcccatttatagttcttgagtttatttatgatagtctcaacatgcttcatatttaagccactattgataaacattgtcagcaatgttataccaatgaaaccgaaacctaccggatgaacaaaccttaatacatcgtcgcggaaccgagaagtaggaagctgagacttaattttcataacatagtaagaacggctgcggtttatataatcaatgttattactcagcatatcctttccacgaacaccttgaactataataccctcaaagtccgtacgctctgatttaatttcctggccttcaatgaaccgtcctgataagttatgaatagtaatacgccataacagacgaccatcccggtattctctctcgatataagtcacattactacgaccggaagcagtataaatcgtacgaccaactaaatcgtcagaaatatttgtactttcaacaataatgtcatattcggtagtgttctttgactcaatatcgatttcgacgtcttcgttataaagaagtttaaacaggaacttatatgagtcttcaattcctttagtagcatagaaatcattcttgcgtgcttcaaagaaacggacgacagcgtcacgagcgtctttactcagataaatgttgcgtttataaacttctgaccacagatattcccatgcattttcttcgcgaggatatttgttcttaacaagattaacgagactgttgtaatgtgttccatttccatctgaaaggaattggagatagtacttacaaaagtgttcaaaattactatcttgtagcaagtaactatccggcatcattttagtaagatacggacgtaaatccgggtcacgcaagcctggagtatgttcaggagtccaatcttcttcacgggtttggttctgcagaaacgccttaaacattacatcagttggtttccagttaagcgttacctggtcacgaacacgataatcgaatgcataataacctatcagctttccatctggctcgtgaaacatgataccagaagcatactgcaaaaatccgttaaatgaaaccggagggcaataaaacgttgcgtcgcctttatcccacacttccgaaagaatacgctcggtagttccctgcgccgctgcatctattcttttctgataaagaatatcattataaatgacaactgcatggtcagctgtacttatccagcatctgttaccttcacgagccatccagacaaaccaaggctcagcataaaacctcatcggtccaggaacaaatgtttcccatcttgaaaattcatctgctcggaaactcatcatgtgataatgcttatcagagtgatactgaattgggttaacatttttaactgcggtagaaattagttctggatatttcgtctcaagctcaatatcctgagcgtactctgttgtcttaaaattggctgatgaaaagaatatttcctttccgtcagttgacatagaagtccataaatgctctatacgacgtttttcttcatcggtattaccaaatacacgcttccaagtatttgtgccttcctggtaaacatagacgcctttagttgcagaatccacaacgttccttgggtctgttgggtctaatcctaaggttttaacttccccggtaataagggcaaagattttgcccccaacggaatccattttaaagcatacagatttaggattgcctgttatatgagatacttccttttcaaataccttttcaccaaatgtcgggcttaaagggtcagtatctattggagcatcttttaatttaactttacggacagtgtcttttgcaacaacatacaaatagtcgtcattgcaggtaaacgcttcagcatatttggtaacgtcagcaggcaatgatgcatacgttccgaataactctacttcaaagccaagctttaactggtctcccaatttagcaaatgtaacttcgttatcgctaaacttaacttcattcgatgaccaacgtacgtcagatgatttccttccgtaaaagattttatcatatcctaaaacataagaagtagttttagattgataaattaccactctagaaaccggatttccgacacggtcattaaataactgaacgtattgccaattctgtcctttatcatttgatactttaaccatatgttggaatctttcaaacagatacaaaattccgtctatttctcccagcatagttctatttttatcaacacacactgcttcaataggtccctgaatttcatgatatccagattcacctacaacgaagttttcaatagctgataaatgagaatattcaggactaaactgaaaagactcagtcatcaaagatgccatcatggcagatgtgttgaagttaacatacgacatgttgtttaaagaaaacttctgtttaatgaattctttcactaaactgaattcttgcatatgctcaaatgtgtatgcgttttcttcaaaagtttggaactcttctgtttcaacccattcagacggctcaaaccctgctgacgtagtttgaacacgcattttataataagtaagcggttcaatacgattttgttcgaaccaatcattatccgcggtataacccagtgaagaccaactcaagttatcagcggggataacttcccccgctctgtttcgagtttcggccagttctacaaaatagtagaagtttgcaccaacgtcatcccaacgaatattgacctgattcgcagatagcttatgaattcgtaagctggtgacgaacggtgcaattgtcattgagtaataggctccaatttaatagttgtgtattgaggacgaaggtcattctcaaatacgataagtgttccatcgcgggcgaagacgatatcctgggtaggagtagaataaagctcaatactctggtcttcaaactgaagaggatcggctccaatagctccaaggctccagtaaatattatcaccataataatctacttcaccgattttgtaccaacgagttctttctccattagtagttctatcaaaatcgtcttcagtatatggctgaatatgagtattctctttaatatcacctggtttaaatggtccaatgaccatatttcctttaccatttttatctgggtcagttccaacgatattaactggatatgaatctgcagttggagtgacagtaaagaccaaatcaccagaacgtaacgtccgcggagtaatagtattatagtatttaatacctgcgctaggaagagtgaaatagttgacaatttcacgaaccatctgaatatcaacagaagaaccgatgattgaatggtcagtatcatcaatataggtcaataatttagatttactgaaatttttgttaaacatttcaacttcatcaacgtaatatctattaattgagtctataatttttgactgtaaccactgctcagattcttgtaacttattcagcgcataagaagctttaatattatgacgaatgaataagtaatctgggctcattaccgaaggagtaattggagcaagacagaaaggttttagataatcctgaatgtcttctcgttgaacagcagttaactgcaacccagattttggtttaattgcgataaatgcatatccgggtttgtcctgatcagtaaagcattgtactgcttgtacgatagaaccaaagcgtgaactaacgaatgattcatagtcagttttagacacgcatcgcatctgagattcgcgcttaatctgggcgagctcacgaatacgctcgatgtcttcaggttcaccaccgccatcagctccaacataatcaggagaatctgaccagttttcaatgattttgtttactacgatatattgcagagtatcagcatagctgaaatcagttgcgccattcgcagattcaccatcagtacgaatatattcaataactacctgcgcgcccttagtaggttttaatccaccaatgaaattactttcaagaactcctcctgctacagaggcttctgccacgccttcaccaaagaagaattcggtatttccgtcgacagtttcacgcatataataaattgttgaaatggatgaagcatgaaccattgacctgtctgtccagttagtccattcagcgccatcaacccacagcttaacctgcttacggtcaatcgactgatcacgaataacaataggtttcttcgggtcatatgacaattgagtacgaataatacgtccttgtgccaaattgacaataggaagatacctattaactccttctggtgctgaagtatctcttaaagcaataacattttcggtaacaacaaagttgtatgggtctactgatgaatctcgtgcatatgctaaaaacttggttccacgaggtatttttattgctggctctggatttggatgagttacctcaagcataatagatgcagtagccgctgatttggaacttggcaaatacccgttttgctgagctgcttgaacaacggaacttctcaagttagctgttccaataaagctttcgtataaagcagtattactaaattgctgtatgtaaagcgtgttatatgctaataaatctaatagcacatttaagcgcgaacccgcaaaatcaaaatcttggaactctttttgaccactaagccagttaataagctgatttttaatttcgtcgaatgttgctccagtaaatgcgtctgggatagcgtttgcagtacgcgttaactgataatttaaaggttctttaatagccattagtgtatgaatacctttgagcttgattgcgcgacagtgtcgccgcaagaaattggatcggccatttgaacagcttttttgcctgttacaaataccttggatgtgcgaggttgaacaactcctccatgcgtatcatgagggtcaaccgtcttggtgtgtggggtaattgagtcgccatcaactaataccgctattccaccagtgaatactttactttgtgtagcatttacttctgtcggaggatacgcactatgcccggcagttaagcatttattaaatgatagtccagccatttagttccccgcatatacataagcacgaagctggtcgccccatctactccagttgcctttaactgtttgagagtaaatcttttgctttttatgttctgttatgattggagcactagaacctccggatgaacctccagacgattcttctgtcactgtatatattatctcaactgtataggtaaatgtcttctctagtgttctgggggctttccacaggtataaatcagcagttttgggattaggtaaatcctcccacgctgaagcggacttcagctcatcgccttcacggtatttaagcacatcgtttccaaaagtaaaaactgagttataattacctttataataggtttcagacacagagatatcagatactggttgatagtcgataatatttattgattttaatgtttcgttggtagataattgagcagtaaagtactgctcaacgtattcaccttctattacttcgcgtaacgtggtattaataggaagtatatcagccatgattaacctacatcaattcgtgaaccatcaacagtgtattgaccttgggcgattgagctcatagaagccattgtctcagtccaagccccgccaacattccaattcacagtacctgctacttgccaagttaagttaccaccgacggttacgtcgtggttgccatctactttagtagtggcatcaccgttgacttggatatcagcatttccttcaacgactatcttaatgttacccttgacaaaaatagtaccatcgccttcaatagttttagtttcatttccacgtacataaagcgtgttatcgccatcaatttgctgtcgacgattatacatgttataataggtctcgttccctccaacgttaaccttcttatccccagagattaaaatatttccatcaccctgagtcatgtcatataaatcggctacagtttttctggtacggcgtccatcgggagctacttcttcgtatgaacctgttgggtgaacaatacgatagcgttcatagccaggtgtatcatcaaactcttggatatgacctgattctgtttccattgtgtgaacatatggatactgaccattatatgaagactcaggttctttgaaaagaattcttgaatcttccggagtccatgggtcttcaggattacctccagactttggttctacgtaagcagcagacaggttttttccttctggctttggagcaggaactccatatgattccatattacccgttagaataatcatggaaacacgagaagcacgaccttttgtctgattaaaccaaacagagtttcttgcttctgtataagcggttttccaatcaccaatgagcatggcatcaagcattttaccaaattttgctaaaccacctacacccatttgaaaactcatattttctaaagccatttgccttgatttgttgactttagcatatacaggtcctacacgtgaattcgttttaatatcagaaagcattttatcgcggtcttgcttaaataacgcgactgcttcgtccattgtaatgataccgggatttcccgtaacagtacgaccaacctgattagataaagttttattaatgacagacatatcacgtactttttgcgccatgataagatgcccaatacctatagtaggatatccttctgtgtcccaatagaccttcaatctaagaccttcatccctattaagcatatctgttattgtaattgcaggatttgggtcttcaggaatatcacttaagtcagcatcatcaggattaatgccaatgtctaaatttctgtcctgaatgatatttggtatagcactatacccagtttcatcgccttgaactagtgggttggtatctgacccgacctgtctaggatattggcctgtaggatcagaaaagccttccgtgtagtttggcttcgtttttctatgcgcagaatatgttcctattactagtcctgctgttttgaattcatcaagccataacccaaacactgatgttccttctaccattccggttatagatgagccaactccagaaatcccagctgagttggtaggctgaatcactgacatccagggaaggtcttcagtaggaagacctgttatagctccttgcaccttttcaaatgggtgaagcccataaacacgtactcgcactcttccttgtttcaacgggtcttgtctgtcttcaacaacaccggtaaaccatttcaacgaatcattcatttcaatcatacaacttctccaattgtggtctgggatttatatcgacctgattcatattcactgtcaggagccttttccatttctcgtataatatcagaaagaaatgcttcaatatcactaggattgataatgtttatttggcgcagtttttcattttctataatagagtcttcataaatgtcaacaccagctaaagccccagtatattgagggtactgatgattaaagtcccctttatcataccaaatgcctgaattttcaggatattgctcgaggttataataacgattgccgtttgcatccacgtgatagagtatttggtctccacctacatctgcatatttttgttgtgcaaattgatagcatgcatcctgggttttaatccaatctctaaacgggtcatatacgttattacacattaaaagaatccagtacaactgactatttccataaagaatatatgctaattcttctggtctaggagctccacttatgtaatatgtttgtaaaagatagttttctgctacagtgtcgaaatatttgcgataattacgaaatatgtcagcggttgggatagcttttgccttagcaccttttacggtctttgcagaataatctatcggactaaaaaatgagaagagcatagtttatcctcttataaatattaataacagtatttataaagttgtagtgtacatgacgagtggtttatgatattattaccctactaactacttaggagaatagcatgaattaccgtaaaatttatgaccaactaattgcaagaggcaaatcccgcaatttagaagggtacaaagaacggcatcacattgtgccacgatgcatgggtggaagtgatgataaagataaccttgtggacttaacagcagctgagcattatgtggcgcatcagcttttagctaagatttatccaaataatcataagttatcatatgcagttcatataatgtcttctaaattagcaggaagaaataacaaatcatatgaatggattcgcaaaagggtttctattgctaactctgccgtattaacaggaaagaagcgaagtccaaggtcaaaggagtggtcagctaaactgtctgcagctcttactggaaagtctcagacgctagaatcaaatgaaaagcgcagtatttctatgacaggtatttcaaaaagtgataccatgaagaaaaatatgtctactgcagccaaaaatagaactaaagagcaccaaactaaattaaatttagctaacaccggaaagaagagatcagaagaaacacgagcaaagcttagagctgtttcagaattgcagcctatagtaacatgtcctcactgtggtaaatcaggaaaacctcgtggaatgaagtgctggcattttgataaatgtaaggagaagcctaatggcttatagcggaaaatttttaccaaaaaacataagtaaatataagggggaccctcgtaagatcacatatcgatctacttgggagcaatttcatgatgcggtggttagataatcacccagacgtagtccaatggaattcagagtgcgtggtaattccatactttagtaatgcagatggaaagaaacgccggtatttcatggatttctgggctaagttttctaatggtcaacagttcttttttgaagttaagccaaagaaagaaactagacctccggtcaaacccacaaagttgacgacatcagcgaagaaacggtacattgatgaaatttacacttggtctgtaaacgttgataagtggaaagcagctcaagctactgccagtaaaatgggtatagaatttaggttaattaccgaagattcacttaaaaaattaggatggaaaggctgatggctatatttgaatttatcactgaagctgcagaatcgcctaaagctaaatcccgtagtgaaaatcaatgggtagcattaggagttgaatactctgctgctcgtaaaaaaggcatgacgtctaaatcattcgctgaaagcaaaggaataaatcctgctacgttcagtaaagcaatggctcgtcatgcatcaagaattaaaacggcaattaaagtagcagaaattgagaaaaaacctgctaacaaaatgaccaaacaagagcgtgctcttgtgatggtaaattcatttcgaagctctatcaaagataaaattcgtaatgaaggcgcagcagtaaacaataaatctgctaaatggtttgcagaaactataaagaaaaatatacgtggtcattctgtaaccaagcctcaacctggaaagctatatgcttacatgtatgacgctaagcacaaagacactcttccattctgggataaatttcctttgatagtttatcttggtcttggaaagcaaggtacaaccacattgatgtatgggttaaaccttcactacattccgccaaaggctcgtcagcagtttttagaagaacttcttaaacagtatgctaatacgccagtgatatctaataagaccagattaaagataaactggagccaagttaaaggatttgctggcgctgacaaaatgattaaagcatatattcctggtaatataaagggtgctttaattgagataaaaccggctgattgggcgaatgtagtcatgttaccactgcagcagttcatgtcgaaaggcaaacgctactctgctacttctgtatggaaatcataatgtctactggactgtttaatcaaactaacacaactaactttatattagaggtccctgatgggggcctcacccaagcgtttaaagctaatcttcaaacagctgtagttcctggaattcatattcctgctactgatactgtaggttcgcctcaaggcatgcatcgtgctaaattgcctgggtctacttttgagtttgacgctgttcctgttagatttttagtagatgaaaatcttgattcatgggtacaaatgtacaaatggatgttaagctgtcaaaactacattgaccgagacaagtctggatggaataacggcggtgaaggatttcctggtgcagttttaatgcatgttcttgataacgataaacatgatatagtattaactgtccgctacatcggaggttgggtgagtgatttatctgaaattgagtattctttaaccgaagaatccgacccagcaatggtatgtgtagcaactttgcagtacaaatacattgaagttgaaaaagatggtataataattactggtagaccttctgtcaatgatactcgcgaatcccagtatcaacagaaagttatgggaatgcatccttctatgaggtaataatttgaagcttttatttttgattggtaaaaaacgtagtggcaaagatacaactgctgactacattatggataactataacgcaacaaagcatcagttagcaggtccaattaaagatgcgttggctgatgcaatgcttactgagtggtatcgcgatacatcacgtcagtttcctcgcattactcggtcaatgattgaaggtattgattacgatcgtgagcaggatttaaatctgtctactaaagacgtgattcgtattatggcgaatgctattgaatatgtccatcatgatttgcctttacctggggtggtttatgatagcaagcgtaaaattcttgacggcgatacgatggaagtcatccgtcaagttgtaataaataaacctgttgagccatggtcaattcgtcgtctcatgcagacccttgggactgacattgtctgtgataagctcgatcgcatgtattgggtgaaacgattcactttggttatggctgatacttttggtgattatgattatttcattgtcccagatacccgccaagaccatgaacttgatgtagccagggcgatgggtgctacagttattcatgtagttcgtcctgagcaagaaggttctaaaaaagatactcacgtcacagagcgtggacttccgattcgcgaaggcgatatcgtaataactaacgacggttctctagaagaactttattcaaaaatcaacactatattaggaattcaaaaatgactactgaacaactgcaagcccaagtcgatactttgaaagttcgtgtatttgacctgtctgaaaccatccaaggtctgtccgctctgcgtgcacagtatgaagaagtactacagaaactgattgctgtgtccggcgttgaaatcagtgaagacggtcaggttaaacttgatgacctggttgcaaaaatcgaagcacagttcgcagaagaaactactgaagaagctgatgcctaatgaacttcagtgattttagcactggtctatatgtagctgctaaattctctgagaaaactcttgatgctattgaggaccttcagcgtgagttgaaggtccctaatcctgtacctcgtcataagattcatacgacgatatgctattcaagagttcatgttccatacgtttgcgcttcaggaagttttgaagttgctacatcaggtaaacttgaagtatgggacacgcaagacggacgtacactagttcttaaactagattcagaatacttaaaattccgtcaccaatatgcaagagctctgggagcaactcacgatttcccagattactcaccgcacattactctcagctacaatgtcggtccagctcacttcgagggtgaagttcaagtacctgtagtgcttgatagagagtaccaagagccactaaaactgaactggtcagaagatttgaaatagaaatttatttcacaaagttgtttacaaccggtcctagtggtgatactatagctccatcaaaaacaaactaacaaaacggaagcaacatgaaaacgtaccaagaatttattacagaagctaaaagacaggatgatgaactgccgattgttacaaaaaccgttgacgggacattagccgattttaaaaaagttcctagtgataaactttctaaattgactggcagcatcggtgaaaaagatggtaaggtaactttttcagcccgaggttctgctaatcttaaaaagcttttaaaagccgctggcgctgaataaagttgtttacaacgggttgtagtagtgatactataaccctatcaacttgaggagaataaaatgaaacgttgtgaattaattagaaatgttgcatcaacaatctgcatgggagcattaggttttggcattataggtgcagcctttatgtctcttcctgaaacagtatcagtgttaagtgttgcatttctaatgggtatcatttctttcataatggataaaatagcacatgaaaaagattaagcagtggttcatcaaaaactatgatttaaaccgtgaagaagtaactaagtatgattatgttactttgggtgtaggactaggtgcactactggcagcactgcattcatcactacttgctattgcagtgcttcttattttggctcactacagctggaaacgtaagtaatgtacgcacttttaacttggtctaattattatcctgctcctggctctgaccaaatcagaggtgtctactctacggtagaagaatgctatgaagccctccagggaacgtatcaagactattttgagatactgaattcccgatttgagaccgttgctaaaggttcaactgaagcatacaaagattaattgtgaggaaattgtgatgaatatcagagctgcgtttaatactttctatcaagagaattataagcttcttgcccatgaatactatgatgcacaaggcgttccaattcctaatgatttagttacgcctaagcatgtcaaaactgattctcttgacaatgaaatccagcctggtgatttggtatcatactattgcggcgggtcactttctgcagcaagcgttggtattttgctaggatttacgcctaaaggttatcgtgtggttccgttccatacaagtccaattcctgagcaccgggtattgctctctcatatggattcaccgcatagggtattcctggttaaatcaaagagctcaccgattgtgtaatatgctttaggttttctttgttattattaatctatcaactgctctgattaatttcagggcagtataaataaaaatatccattggggcgttagaccgtaggggtagcgggacagactgtaaatctgttgctcaaaaggctcgggtggttcgactccatcactccccaccaaatttagggatactagctcagttggttagagcaccggacttttaatccgggtgtccgaagttcaaatcttcggtgtcccaccaattcgggtcgttggctgagagggtaagcgacggactgttaatccgtgtcagaaatgactaggcaggttcgatacctgcacggcccgccaaatgaagaagtcagaagacgttctgataaatcgtcggcatagaattccctgtgtacgagttccctcaacgataactacgtgcttataatttcttacggcgttgaaagttcgctttcagggatacatcttagaacagagtgctaaacaagattcatctggtaccaaggtgatgagagttctgttcccctttgcttcggcatcgtgccagagtatctctgaaagcgaattatggacctatagtttagttggttaaaatactcccctgtcacgggagagagcacgggttcgatccccgttaggtccgccaaataagaacgtggcagttcttgaagatgagtttgagtcctgtaagataatgccgaggacgaagctgtttgttcccacggaataagctctatattcgtaagattatatctttagcgtgttctacatcaagctacttgttagtacttcaagaacccggataaatgcggggtaacttcagttggtagaatgttgggctcatatcccgacacgcgcaggttcgagtcctgcctccgcctcttttgtttactttatccgtaccatgtgatataattatcacatagttggtatggagaataatttatgtactatttgatttataaaataaccaataacgtaaatggtaaatattatgttggagcccataaaactgatgacatcaatgatggctacatgggttcaggtgtattaattaaaaaggcaattctaaaatacggaattgagaactttaccaaggaagttattcattattgtgaatcatctgaggagatgtatttaaaggaatctgaaatagttacaccagaatttttattaggaaacgtatataatttaaaacttggtggcgaaggtggatttgactatgttaactcaacatattggactccgtcaaaaatgaaagcaagaggaatacttggaggaaattcaaccagtaataaaattagaaatgattctaaatttaaactgaatttttcggataagattaaatctggaattacaccagatgcacgttcccgcattgcagacgcagttaaagctaatatagctaaaaatggaaatccgtttttaggtaaaacacactcttctgaaactaaacgaaaaatttctgataaactgaaactagctcaatccggttcaaaaaattcacaatttggcacaatgtggattaataatggaatagaagctaaaaagatttcaaaagattcccctataccagaaggatggtataaaggaagaaaattagtaaataaataattggactatagacaagcggttaagtcaccggcctttgactccggtatctctggttcgaatccagatagtccagccaaattaatattcattcaacgcgtctacaggggttgaactgatcattcttctcttaatttcgtatgaagtcctcatgatggatggagtgaatattgatgtggccgtagttcagttggtagaactcgagattgtgattctcgtagtcatgggttcaactcccatcggtcaccccaacaatgaaggaatggtggaaaaatacacggtccgcaaaacgctgtggctgtcgctaagcgaattgtgtctatatgacacttccttcaccaattaatggagagtagcgctagtggtagcaaaccggacttgaaatccgggccatcggaaacggtgagggttcaactcctttactctccgccaaatttatgaaagttaaacgctgcccatagcagtggtacatcaacaatcagatgattagctttccatgggagtatagctcatttggtagagctctcgaccgataatcgagcggtgactggttcgagtccagttactcccaccaaataacaggttcttagtataacggctattatgctgggctccaaacccagtgatgagggttcgattccttcagggcctgccaaatttgcatccatcgtataacggctattataggtgacttccactcacttgataagggttcgattccctttggatgctccaaattactccgtatagctcagtctggtagagcgctccatttgggatggagaggtcgaatgttcgagtcattctatggagaccaaattaacggtatgacacaatacaagatggcgtaagctgagtagcgggattgcagtctcgttcagatatgctatcgagtatgggtgatatattaaacacatggattctgcaaagtcaatgtgactcggttcgaggccgggcataccgtccaatcgcttgccattgagaattatattatgaaatattacggcttcaaaacatcccatttcgggaaagcatatcgtacagaaaacattgatagacgccgagcatattacgaatcactgcataaagcaggacgttctcgtgcacgacaagaaggccaaaaacaagcgaaggaaatagaatgaatatttttattggtgttgcgaataaagtaaatgctattacggtgaaattacaatggaatcgtccaactaattttgctttaggattatgtaaatctgaacgtgatttaatgcttcatgctgattttgcatatacttttgatgaacgcaaaggtatgtgggtctggattaaatgcagatacgaagcattaatcaaatatgagtacttcagtgagcgtgatattcaagaagttattgcttatcattctggctgtaaagtaagtaaactgcgtcaagttattccgtttactaatgcttcaaatgtagaagagctaattactgattttaaacgaatttatcaggcgaaatatgatgaaagattctaaaggtcgagacgtacaagttggcgatatcgttttctacggagaacgtacatataataaaggtggtcgtggttctatgcgctgcggtcgtattactgatattgcttcaggattggctaaagtagataacgactacgttgcaatgcgaagcaaatcattcgttaaggtttctcctatgttcgcaacaatgtgggaaaacggaacgattttcgagatttaatgctacaagaataacctgttattattactacatcaaaacaaacaaggaaaaagaatgaaacgtatcgcactgattgttgaccaagaagctatgttcgctgctaccggcaaattccatccggtgagtaaatttgttgctcgcagcgagaaaatcgttggtctggtagaaactgtcgcaggtgatgtaattgtttctattaaaacgtctgaaatttctccggtagttaaagtagcagttgaaaatgacttctgggaagtagctgattttatgtgtgagtaattctgcctagcaggtggatagcccgacaaggcgccctcttcggagggcttttataaaagtcataagatttctataaaggccctgtagctcaattggtagagcgttcccctcataagggattggttgcatgttcgagtctttgccagggtcaccaaattatcaactgaggaaattgaaatgcatattaaatttggacaagttattcctaaaggcttagcaatggcaattaccacttgggaaaatgatgccgatcggtattctacccaaatggtttatggcttagaaaaagaagagattaatcaagtaattcacgttcttgaatggttctcttctaatggtcgccgcggtgaataccttggaaataatgattacaaccatgaagcaattcttgaaaagcttcatactgaacagaagtatgtaactcctgaattttccaagaaattctttggtgttgatgttcctgcatatgattgctcagacgaagagtttgatgcttatttagataatcattattcttgttcaaatgaagttatgtatgctattcaggcttggctaggtaatccaattgaatatgactatgatttcatgcgagtatttgagaaagtagaaatctttgacattaaagaagaaattcgtattcctgatgctccggttgcattccatattggaattacgtataagcagaaagaaagcccattaaaagttgattggttgaaatacgtgaaggaaaagtaatggatattggttcaggtagttcatatccatcatgtgctttgagtaattttgctcctcataaatttatctatgatggcgtagaatgtgcctcaatggagggattcttgcagtccctcaaattttcttcgcctgaaatgcaagcacatgtatgtacattagttggtaaatcggctaagttcaaaggtaaaaagaaacggtggtggccaactcaaacactttattggaaaggtgttcctattcaccgtgcctcagaagcgtatcagaatttactaacaggagcatacgatgcacttagtaaaaatgaaggattcagaaaagctttggctgctacccggaatgctacgctcactcacagtatgggtaaaaataaaatttctgaaacgattttgactgaacgcgaattctgtaatcaactttatcgtttaagaaatgctataaataatcagtaatataattatcttgttcagtgttgaaatcggtagacatggtgacggacaccttttgagctcgcatattgcatcatatgctggcgacggtggtaaatcgctgacggaatcagtcgtgcaggttcaagtcctgcctgaacaatctcggggcatagctcagctggatagagcagcggacttctaatccgcaggtcgaaggttcgaatccttctgcctcgaccatttcgcatcgatggtggaactggtatacacaggagacttaaaatctcccgccgcgaggattgagggttcgaatccctctcggtgcaccaaattatgaagaatgtctcagtcgtgagaggatcaatggtgaaaagccatggtgttcctgctgcaagccttaagtggacagaacagccaacctagtgacgtaggtaattcttcaccaaatatgccgatttagctcagttggtagagcgcttcacttgtaatgaagatgccgcgggttcgactcctgcaatcggcaccaaattctggtatgtgatagctcaaataggtagagcgtgaggccctggtgctgaatggcttgtaggttcgattcctacccataccaaaaattaatgaggaaaatatgaaagtatatgctgtagtaaaaaataactggaactgtgaatatggctatgaagaatattctttgcctcttaagatttttcacactaaatccgaagcaacatcatatgcggaagaacttgaagcaaacgattcctattatcagtatctagttgaagaatacgatgtaatgtaattcgaagggaaacttgcgtataccctcgttgagtcgtcagatagaagagaatggttcgtccattgccgctagtcggttgttcactgtcgcaagcataacctcctgacgctatacttctttggatgagactgatgcctccgagtccaaagaaatgaatttcgcaggtcatctgccagtgggtgatgctgtcgattattagagccctgtcttcggacggggctttttagtataaatagtaatttaatcgacactaaggatttttttgcaatgaaatttaaagattttttaaccgaagaagagctttttgaagcagctcctggccgcatgactaaatcgaaatggcgtgacgctctggtattggttccacgtggtgaacgccatgattttagcaaatttgcggcttctgtggaaaagatttatggtattgggattagcgatcctaaagactatgctaaggtagcagctgcctttgaaagtttaggcggaaaggttactacacctgcacgtggagcttctccggcacaagcaccggccgcaaaaccggctccggttaaagcgaaacctaaaaatattcctggccttaaaattagtggagaccatggagacatcattggttcaggtgaactgtttaaagctatcgataaagctcttccgctagtaagagataatggtcctctttataaggcagttcaattctatttcgataatctgtggaagtatcgtgaatcccaaggtgctaaaccttctgcacgtgaaactcagcatatcggtgaagtgaaaacgcttttagctaaactgaatcatcaccttgttgaactcagtcgtcagacagaattatcgtacaatgtataataaaatgtaatcctacagccctagaattcatctagggcatttttgtatccccggctgtataaatccattctaacttccagaaagttcctccagatgccctaaaatttttgcacaaagttgtttacttcctctatcaactcggttactatagctccatcaaaacaaagcagagtaacggagaataaaatgtctaaattcaactttatccaaattgaacgtggttataacaattacggtactcctgatcgttatcgcgcgatttggattaaaggtgaacatgaacacgcagtgttcaacgtagcagaaactcgtgaactgaaagatttgattaagcatgttcgcaaagattggcctgctgttgaagagtactacgttcgagtttaccatgaagaagctgctaccgaaactgttcaaattaaattcgcaaaaactgctagtgctttaaccaaacgaattgaagcggtaattaactgctaataattttggggagttataatgaactccccacctactgaggaaatagtaatggatacagcaaatatagttccaaaaactcttgctgatatacgtcttgaagctaaaatagctatcgagcgcctaattaaggcaacagtagaagaaggcaaagaaactgttcttattctcgggttagagtcatacgttactgattacatcgagatattcgagcgcagcaaaaatgaacagggtctaatcattaaaccatatgtttatgattggattaatccgtacgaataaaaccaccataactattgaaaggaaataaaatgtctattctgaaaaaacttgttgaattcatccgttctaaattcggtacctttgttgcacagaacacttctgttgaagaccagtataccactgcggcaaatcgtattattgatgaaatcactaaactgcgtaccacgcatgttaaatcggtaaatgaagaaaagcgtctgctgaaacttgctgacgaaaaagaccaggcaggtgcttccaaagagcgcgaaattcgtcgcttgatggcagaaggtatgaatgtagaaacccatgctaaactgggtcttctgtatcgtcgtactgctaaggctttacgtgataaagctgccgaatataaagaaatgcgggcccaaattgaagaaaccgtagttaagcttgatgaccaacgtcttgatttggcagtgaaactcgaatacatccgtgagacccgtaatgcttctgctctgggtattacctctgctgatgacgtgattgaaatcgcggaactcgctaaagtagatgtacaagacatcatgatgaaagttgaaaccttcagcggtactcagcctggtattgaaaccaccactgctgatgtccaggaatatctggaaagtctgaagtaattttatcggggccttcgggcccctaacttggataataaaatgttatatgaatgcgctggagatattccaatggcaacacctcaaattaaagaattaattgcagcaggattcccaaaagaaatcactgatattcttgagaaatttgcttattctgatactcggcctgaaaattggaaaactcgctataacgggtataacaccacagttttaccgcgggctatcgttcttaaagactattccaagctgaaaaacttaatttctaatatttcgtctatttccgacggagttaagcttgtagatatctttgcacttcggtacggaatttattctttcaacgattctccatcaaatctaacatcagctcgtactaatgccgatggatattttacttctagctccacaacatatacagtagttatcgagattatctataataaaactagttatcgtctcggtattaatctggttaaatacgtgacatctcaggatgattatagcaattatttaaattactgtgttaatgaattaccaccaaaagtcatgggtatgtttgactctaacaacatggtaggcaaacaattaatcattgatgaatttatcaaatactgccgtgagagggtgcagaaatgagtaacttatatctgccaagtgaacctcccgtttataattatgtctataaatttgatcagattgattatgcccttgttcctggtattggtgcaactgtcggcgcaatgtgtacctttgccgcgattgatatcatgcatttaactgatattacaccggcagtgttattcggaattctgcttgcatggtggggaactagtttgctcatcatgggattaattgaatgttcccgatgggttaaatggtctcgcaataattataagcgtaaagctgaatggaaagaacagtgcaagaatttaactcttgaatggaaccgcaaaaagtcgtttgagtttattaaagaggtgagaagaaaatgaatgaatgtaaacctgacgggttttggaaccaagatgggctggcgccagcttttggaatcgtgacatggattttatattgtgcttttgtaattgttggagggacattctttggattgaacgtctcagagtttatgattatgcttttatttttaggtgttttcgcattcagcctcatgtggatgctaattatcgcgttgattaattgctgcacatttttagcttaccgtatgaaatacaagaagtggaaagaaaaagaagatttcaacacctggattaggagctgcagaaaatgattaaaacttgttatcgtggaatgattaaagatgatgatttcttgtatttcttcctatttctgcttatcctgttttccttctcaacatttgttggtgttgggatattctgggggttctacttcttttcaccagtatttggtgatacgctgtactatctaggttggatgtcaggggttggaacctggtttgcaatgcttgctcgttggttgcaattcgtttcccagcgacagcggggcgtatttgataagcccaaagtaaagaaagaaaaatctaaagatgattctcgtaatgaaactttatcctggattaaggagatgaaataatggctgttgcagtgcatgtaaaatttgaaaatggtgatactcgccttctgtgttacagcgataatgaatcactgagcggtatcgagatttcacttaaagaagaactgcttggtattaatggacctatctgtgatttctcggtagagggttcatataattgtgatggtgtactagagtctatggtctatactgccatggaagatattcttgaagaaagttggaatgaatgccaatgaaagagctcagtgcaggaatcttattctttaccgatgacaaacggcttttcatgggtcgtatgacaaatacatatgtccagggcagaggctctagatgggatattccgaaaggacatgttgagcctggtgaaacaccaaaagaagctgctattcgcgaatgccaggaagaaacagggtttactgggtttgaccaggacctcttatatgacctcggacgacatgattatgccagcaataaggatatccatttgtttggatatatgctccctgtgagcccagaagtgtttaagaattgctgttgcacagcttaccataaagatgaaaatggaatttctttcccggaaatcgacgcatttgctttaattaaaccttctcaatggaaatatgtgatgggaccaagtttgtataaaatcatgacacagatgtatagcacagcccagtgaggttactatggaagaagctgttgaattaggcattccacacatttataagcatgaactacgatttgttcgtgacggaagatggattagcatatttcatcctcgagataagttgtcacgtacactaatgaagtcacggtatgtcttcggtgacggcgagtatacaaaatcagcatattatatagcagaacagctatatccgggatttagtgaattgcccgaggacgatagaagagattatgtgtggtggaaaggtaaatggacaccatacgagaagtgtagccttgaattattcatagccaagtgcagggccaaataaatactcctataattaataggaggtccttatggatatttttggcatgctgcgtattgatgaaggatacgatagcaaaatttataaagataccgaagggtattggactattggtattggccacttactgactaaagacccgtcaaaatctttggctatttctaacctggacaagcttgtaggtcgttctactggtggccaaattacccaggctgaggcagaagtaatttttgcaaaggatgttgaaaaagcaattaagggcattgtggctaatgctacattaagcccggtatataatatattagatgatgttcgtagagcagctctaattaacatggtattccaaatgggtgtaggtggtgtcgctggattccctgcttccatgaagctcttagctgctaaaaaatgggatgctgctgccaaagaactggcaaattcacgttggtatcgtcagacacctaatcgtgctcgtcgtgtaattgaaactatgcggaccggaacttgggccgcttatcaaggaaaataaatgaaaacttatcaagaatttttaaatgaatcccgtttagcaacagttggcgtaatgactgaatctgttggaagtaatcttctgaaatttaaaaaaggtcagaagatgacagccacgctagaagatggtacagaaattgaaatggacgttgttggatataactacgtagtagacggcaagttatataataagagccatgctaagtttgattcattcgatgatttcacctcttctattgaagatgagtcttctcgcaaagcagtagcatctggcgatgcacgctccttaatggcatttggtcatgagcgtattaagtctaagcagaacaaacctggtgaagataactttgcattagtaggttatcagtctggcaaaacttctaacggttaccaacgtactgttaccatgtacatgcgtaatggtaaaattgcattcgtaaacgatcgcggcgctattcgttacgctaaatcaattaagtaagcaatttcctaataaagccgaacacgacctctcctcatgaacgtcgagtcctctgagtgaagtagcttttcctacctgtaataaggtcgagcccaagtgcggtaaggggtttacatagtgtgtcgatggattaaacatgtgccaaggaatggcccctttaactggaatctaaaatgaaacacttaactcccatttatttgaccctgatgcatgctttcagagacgctgcagacagacgattgaataatcccaactacagtttttatgaaccgtcttgccttatgcgagagtacggtacccttcgtctagacggtggaagacaaaccggaaagaccgcagccttatgccaattcgctaccgattggttgcttgaagatggttcggttataatcttatctactcgatacacacaatcatctgaactgatggaaggtattctacgagaatataattcatcgcatttaattaataaattaccggctaacgagatagctaaatcaattgttccgatgacaatcagggaatttctatccaatgattcctcttataagtttagaggaagaaagtttggaagagcattaattatcattgaagaaccaatgaaagttcccgatatgatgaagttctatgatatgtaccaggaagctatcagatggtctatgcctaatgataccttacctttatttttcgtgataggaatgcaatgatgacacagacagaaattgttgatatgattacagtaatggaaaatacaggattttccgatatgaagcaattaataacaatggttacggctggaaacctgcttgagtacaagcgctacaagtttctgtctggtccgtttaaaggtgcagaattcatttctaatgctcctaacacgaagtggatgaatcgctatcctaattttagaattgagtttatatctggcaagctcaaaggcgtgattagttcaagcttaatcacatatgaccaacgcattcaagagaaaacaatgcaatggctgaaattgttataaagtgtcctccacatttagttgaaagcttctgtgattggttcagtaattctggtgagcaagatttttatgaagctcatcagaatggaacttggaatgaagccacaaaacagtgggaagaagctacaacgtatataggcactcgtggatatggagttgatgagcctattgaaattgtagagtacgataaagaaactgatgaagaaatactttatgctaatgatgccagagaacgcttatggcgagaatctgaattagaagcagaagttattcgtcttaaagaagaattaaaaggaccaacgggttttgctacatggaaagacgctgctatttctgaacgtttagcacgggtaaaattaatgccagaaggtaaaatctcgtacttgcaggctgcatccaagttccattctactgagtggaatactatggacgtaattaccgcgtacatgcgtggttggaataaagaatctaattaagaggaaatatgaaagcatatcaaattcttgaaggtgaacttaaaggcaccatttacatcgaagatggtgatgacgcacgagtaatcgtttcaaaagttcttaaagaagatactattacggatgctgaaactttttatggctacaaggcgcgtgaagtagaaattgaataccagccaacggtaaaagttgaaggcggtcagcacctgaacgttaacgtgctgcgtcgcgaaaccctgctggacgcggttgagcatccggaaaaatatccgcagctgaccattcgtgtttccggctacgcggtacgcttcaactctctgactccggaacagcaacgcgacgttatcgctcgtactttcacagaggcactataatgtcaatcgaagatattaaaggatacaagccacataccaatgaaaaaattggtaaagtgaatgctatcaaagacgctgaaacccgtcttggtcttatctttactgctcttgaagaagaggcattaatcaactaccaagagtcagccaatgaacccaagcaggtactcgatgaagcatacgaacgtattgcccagattcgtacagcaaaacagaaactgaaggaagcttctatgtgggcttgccgggcagtgttctgtccagaagaaaaatattaaaaagtagtttactttccttacgggccatgatactatggccctacaaacaaaggagaatgaactatgtcaactaacccagaagtattcattcgcagaactaaactgcgtcgtaagtttgaggaagcttttcgctctttgaatttatctgttcgtgcccgggcgaaagccgagggtaaagagcctttcttcactaagtactctgatcatttgttggaccgtgctattcaacgtgaaattgatgaagagtatgtattctctgttctttccaaaattcctaatcatcttaaagaaattaatgaattcttagcaatgccttggcttccaattgacccaaaagacattgatgaaaacatcgagtataagccaatgcggttagaaattacggatggaaatctgtggctagggtttaccatggatattccaagaccaggaaaaggacctagtataaagtgtcgtatggcattcgttaatgataaacgtttgaaaggtaaaatcagcacaaaagttatacacattaattgaggtaaacatgaaaaaagcgcttatcggtctaatggccttatgttcaacggcctttgggtctgagccaactttcagtaatgttcaacttgacaacttacattacgcatataattttggtgagcaatatcaaaaatccggaaaggaaaaatctccgcataaccgatatgataataacggcttaggatatataatggctgctatatcatggaaagaatcttcggcaggagccaatttaaaagcaggaaaggggcatcattcttatggggtatttcaaaattacttgcctacggttaaagccagagctaaattagaaggcaaaaaccttagtgattctgaaataagaaaaatgcttaaatctagacagaattccgcggaatgggcatatattgagctttcatattggttaaatatacataacggcaatatgcgaaaagctcttgctagttataatgcaggatggaatgtcaaaaggggaaactcttatgcgtcagatgtcctagagaaagctaatttcttaaagaaacataaaatgctacatataaaggtggaataatggtaaagtacgccgcgcttcttggattggtactggcattctctgctaatgctgaaaattcaatgacagattcacttcgtatcgctaaaacattttgcaatacgaactctgaatgtgttgatatattagcgcttgaattagattcagcattcagcgatggagtaaaagattcacgtagcccggcccagtggacaacactaataaatcgtaaggctaagagcatgaaagatttatgtgtcaatgctcctaacgaaaatatatgtttaatgtatcgtgaccaattaatggctcgttatatgtcaggactatcatcaaaatgaaaaaagcagctattttattatgctgcgcattttcagttaatgcctgggaaaagctcccaggctatcctgaacctgtactagcggcgcaggggactaaaatagaaagcaacggtccattcaagaacaatattgaaatagcatttgtgcctagcagtagaaaattgctaatgtcattttataattaccaagataaagatgaccaggtaatagttccacttgtcgaatataatgctcgcggatgtggaatgcagagcgatggcgtttctattgacggagtaatgcatcctaaagaacaaggagtgctgaaccctatccttaattgtaacaatgctatatttttaagagtatacaataatcttaatgaatatgcaacatataaaattccataggtgaataaatgattactggatatattaagggtaatattgtagaattattcatgaagcatgaatgcgatattgctcatggatgtaattgctttactacaatgggtgctggtgtagcaggacaacttgctaaagcatatcctccaattctcgatattgacatcgatgaagaccgttattatgacaataatttagccaagcttggaactcatactcgagccattcacaagaatggcactgcatattgctataatttgtatactcagtatgctccaggtccaaatgttgattacggcgcaatttttaatgcattccatgaactaaattctggtcgtattgtttataatcgtcctctatacattccaaagattggtgctggtattgctggcggtgattgggaactaattgagaaacttattaatttagcaacccctgatattgacattacagtggtagaatatgaagaggctaaaagctaaatacgtcttgttagaggtaaatagatgattactaaagagcaaaaaaataaactgtggcagttgattgacgattatgcaggtgccgagcaagtagtagctattagtgccatttacggaaatggtctaccagaagaatacgatgaactcattcgttctaagaatgctatttctgattttatggagacactttaatggcacagctttatttcaactacgcgagtatgaatgcaggcaaatcagctaaccttcttacagcagcccataactataaagaacgcggcatgggaactctcattctgaaacctgctattgatactcgggattcggcaacggaagttacttctcgtattggtcttcgtcatgaagctaatacagtagacgaatctattgatatccttgagtttttcaagtgggcacaaacacaacgtgatattcattgtgtatttgtagatgaagcacaattcttgactgctgaacatgttcttcagctatgtaaaatcgttgacttgtatgatgttccagtaatggcatatgggcttcgcactgattttcgcggcgagttattcgaaggttctaaagctcttctttctgtagccgataaacttgttgagctcaagggcgtttgccactgtggacgtaaggctacaatggtagctcgtattgacgaaaacggaaatgctattaccgatggtgaagtagtagaacttggtggtgaagacaaatacgtttctctttgtcgtaaacactggtgcgaactggtaggtgcttatgatgaagccaagaacgtataatactctcctgatgctagttttaagtatgctattcatttggatgggtgtagcagcatctattcaaagcgatagacgagaagaacttcaaaatcgtcttgattccgaatgtaaagtattggcacagggtaaagactttattgctaatatgaatgggtgttatattaaacatgagtagcttatttgctatagcgggtggtatagtactaggattcgtagttggattcttgctgtacgtaatattgctttcgttgatggtttaatatgaaaaaatatgtgatgtgctaccgttgtcttcatgtatatgattacaacactgctccaaagacagctaccaagcgtcttaaaaataaagaacctgaatgtcctaaatgtaaatgtaaggtcatctattcatgaatattaaattttttaaatcaggattttactatcgttgaggtactttaacttaacgaggtaataatgtctagaacaattcgccgtaaaggctggcatgtagtaaaatcttccaaatggaacgatcagaataataacgaatttgcttatattaaaagctataacgaatacgttaaaactcagaaagataaagaaacccaacagaaatatgttgaactgcgtatttctgaaaatcgggaaagaccgctagaggccaagaaactgattgctaaatcaaagcgcgatggattctggaaaactctacgttggacccgttatgctatgccgatcccacgtctatttcataaagccgaaattaaacgcgcattgaagtatgacgaagaatataactgggacgaagctggtgctag

SEQ ID NO: 19 - DNA, 167210 bp, unidentified
  source 1..167210: mol_type = genomic DNA
ccttatggaaagtcgaagccggtaatgctttcactttatggaacttacgcttagcatcccagaactcagaccagggtgctttaccgcctttattccagttcttatatgtatctgcagtttttgccaagaaaaattgaaacttattcatttcttcttcggatgagatgacacagattttctctctagcgtactcttcatcgtcgccataggtttcaatatctaatacccaatgacgaaccagatattcacctggaacacctctggcacctaaaaatgacgtggtttcagttgcatctaatatgcgaacaaactgaccattattgaaaagaatttcgctgaatttcttcccttcaaatttaagttccttggtaagaggttcttgcataacaacaatctcacctactacgaatggtcgttcagtttcatagattcttcgcctgattatttcattcagtttatccacagatttattagtgaacgcaagcattcggttttcaaataaatcttctggtgttttaactaaattaaaataatttagcataaaatctttaagggcagttccttttgtaaaaccacggactccatgaccatcaactacacagtcacgaatccatccaccatttctgatttcagtagcgacttcaatgattggggcattactccgcatcacctcggtcaaatgaagttgtaagaaatctttatgagtgaagaatggactcagtgcaggttcattacttccaggttctaccggacgtatctgagccttatcaccaatggcaatgacaatacaccaggcaggaatagttgccatcaaaatcttaaacagtttacggtcatacattgaagcttcatcacagataagaactcgaatagatgccatatccggaactttcttttgttcaaacagaacgttttcttcatatgtcgtcgggttgattttcagaagactatgaatagtactggcctgcattccgctgagcttagataaaacctttttggccccatgcgtaggtgctgccaacgcaatgccagagataccctgagaaatcaaagcgtcaatgataaatttggttaaagttgttttacctgtaccagcaggtccattaatcgtaatgtgttgacctttggctccttgtttgaccatttcaatgactttattaaaaatcgctttttgactttcttttaattggtcaaacgtaatcatgccacttttaccctcactacatgtagatttttaatttttgctttgagtttttcgcgctcaacatcgctaagtggttcatacactagctcagttgttttccaccaaagcattcctttggttttgctttttccagtaaaattcccttttgctaatttgtctgttaaaaccgacattgtacgaatccgtgctttattagccgattcttcattagtgaagaccacacatcgttctccatcgtacatatcagttgtgactggatggtcaaatccgtctttatccttatacgctactacatatccatagtgttgcattacattttacctctcaaaagttggaagaaggacgcagtcaatggaagaccttttttcaattttaacttatctagcattgagcatttttctaaccgacgaagtgagctaacaattagccgtattgattgtacacggatttcagcatctgacggacgattcggaactgacgctaaaatagcagataacttacgctcaactttagctaattcagacttaccaccactgatacgagttctcaatgcattaataagttctaaatctgccgaggttgcagttccattcttttctttttgcacaaattgagaaagatgattttcgcgattacgtaagttagttttaattgatgttatagttttttcatactcacgaatcttttccaaacgagaagcttctttatcacttgttggcttaacagaatctgaagaacgaactatgcgtgctgcgatttcattcgcttttcgttcaaggccttcaatcgtattatttccgcgcaaagtattatacttttgcttaacaggaataacattccccattacataacccaagtcattattccaacgctcgagcgtcatgctatcaggatgatttcctttaacagttccaaacttttcgcctgagtatgcgcaatgtgtctgctgcatgatgttaaacagatattctggggtgagattgaactccttgtgccgacgttgagcagaacctaaagttgtaattaaacgagtataaactttagcggtttcagcagtaaatttcatcatgttttcctcaaaaatgctttcgtcttacggacggtataatgggtctaggtccctagttctagataatcactagttgactaagctatagtaacactaaagtagtccataagtaaaccagatttttcaactttgttatgacccaccactttgaacttagttcccatcggtagcatcctttcttgttctttatcaatcatctcgatgtcagcgcttctgcgctgagcaatgttatcaatcacatcatttggtcgcatgaattcagaatctggtgcagtaattaaaagcgatttcatgttggtatgataatcaaatgattgctgacaattattgacttcaatgactacaaaggtcgagtaatgccatttgcctgcaaattctcgggcaatcgtttcatctgttgtgaatgatgctacctttccgaagtcaaatttctctcctttaataagagcgtcataaaaggctttagcctcgcggcatgatagacctctatagagaatgtcactgttatcaatttgatgacgtctaacgatagagtcaagtttcttatgaaattcttcgccaatcttattgttcatgcactgccacagaattgactgttctttgcagtcaaaacgattggctaatgcttcccatacgcttaaatcatataaaggtaatcctttgctttctcgcgcgaagttaagaacatcaatggagcgaatgggttcttcgataggaataacctttgataattttactgaaatagatgggtttaatgaaatagccatgatattctccatttttggttacgagaggtatcatatcatggctttttagaagagtaaactactttgtgaaattattttgcccacggagaccagggcggcgggtcagaccagattgaagctagttcatctagaagagcttctggggctttaataccatacttctgtataattatacggtattcgtctttgatgtccttagaaatcactggatgaacctgaacctcttcctgaggctcttccatcatttcaaacaaatccatcacatgaaccactccatccgacgatattgactgttactattattatatgcatcagcagctttttgaagcaaatcgctcggagtaaatctggcgaaatcagcttgcataaatgaccatactaactgagtaaatactataaaagcgtcttcattgtcaatgacgatacttttgccgttaacgattttatcatttgcatattcaaacagatcggtctcatgatatgcattggtatatcctttaaggtgtaaagcacctaaaatattaattggacttcctggcatgtgtgaaacatcaaaagtatgggctgttttgacaagtccatatttactattaggacaccacccgcgtgcttcaaatttattgaccagttctttaaactcgtcataagaataattgtaaattgctacagtgaatactttatcagaatcaaaaccttcttttagtttgcgctgtaaacttactttatagatttttgcgtcggccacacatagctccttcagtcatgttgttgtcttcaaaccacttatcatttgctttaattaaagcaggcgcagcttttagtaataacgctgcagctcttacacctctgtaccaacaatcaaaatgagacttctttaatggtgattgataccagggcttagtataacatatcattttgttctcctcagttagtaggaataatatactattcccaatatagcataaaaggactcccgaaggagtccttaattttatacttcgctgtcagccggaacagcttcaaacattttcgcgttggtggttgcccaagttgcagcatcatcaactactgttgaataagcggctttttcggatgggaaaatctgatactgtgcattagcaatgcgatgtgagtcagaatataccttaaaagctacagatacttcagtacctttaacctcgccatcagcagtggtatggtcaaaagttttgatatttacgtaagccattttaatctcctatttagtttacaggagtatttatatagctgctgtaagcgtctttaatatttctttatcaatttctcgagtgatttcttctcgaagggccaatactaaggcccgttctttttgttttctgataatttttaaacgacgcttagatattcttttagccatcagtaaccactgtcttgacgagcaaagttctcggcgtttttcagataatacagcttaaagatttcttcagaatccagaccaagcgccataaacatattcagaacaaagtgcaggatatcaatcatttcaaatttgatttcaagctggtctttatcagacaggtctttgatataagtttcctgcatcttgacgtggtcagctttccatggtttccacacagcactagctgccttttcaccgttactcataccgccaagagacgtcagcaattcgcggaattcgtcatcaatgtaatctttttgattacgcagccactgtacgatatcaccagcttgagccaattcatcaggatgcatgttagtaccaggcttgtcatttgcaagacgaacctgaagagatttttgcatatcaagcattacttgcagagggtcaccaccaactttgcgtacgatacctgtgtatcgggcttcagctttatctgcaccagcgatcagttgactacattcgttgaaatgtggcatgttatttttcctttcttatgaagttttctatcatacgtctatagcagatattaggataacctgccttgacagctattttattaaattttgtgcgcttaggtctattattataaacccacaactcgtaaagcgaatcatacgagttccatatctcaccacgtcttggattcggtaaaccgtatctaggagaatttttaccactaaaccttccaatacgagcattgctcatgttagctttagcttcttccgaaataactttgcctttgtgagaagctcgcattttagccttagtttcttctggtgtttttaacccttttatccatgatggctttccaaaccttggattattttcacccgagaaaagaacagagttttggattttaagggtttctattaatctacttgttaatttaacacctttattatatcgcattaaatttacagcataatgcaatcctttcacatttggatatattttagttaataatctatgagctataaaatgctcgcgcgcagttaactcaacaagattgtttttgtcatctgctcctcccatacatctaggaattatatgatggcgttctttatatccatcaagatgccggcatttagcctttgtaactaaagctgagtaaattttttggtaattcacagatatcctttcaattagataaatattatatcacttaacataaatagcaggaggattcatgtctgaagtgaaacaagaatgtaaagacaaaggaggatttggaagatatctttacgtcggaatcgccactgctgctttagctgcatggaattatgtggtagttccattagctagcacacacggtctagttcttcctccaatgccgttagaaaaagttgtgtcgtttattatgaccggaggattgctttaatttaaggggctttggcccctatatcttcgcgtatttgtcaaggcgcaatttagccattaaaccttgcgatatattttgattaatataatccgttatttcagaagcagttgccccctctttcataatcatatcatttatatctttgcttttccaaggcgacttatcccagaaaactaccttttcacccgcgtctactaaacgcttcatacgcttaatcgtatcaggatgacgaggttcatggtccataatccatgctcggttatcatgacatggaacttgagctaaatctaaagacccaccggtaattgcaatagcattatcaatgaacagcgaatctattggtccttccatgacgaatacgagttttgactcatcaatagtgtcgagaccataaattttggtcgcgtgttcgtgggctttgattgtgatgtatttttgtggagcattctttcgtagtgctcgtccttgaaacgactcaatctctcctttcttgttgaagataggaataaccaaacgtggttcgttcgtctcattcttataggttcctggattaacggagttaacaagagaaggccattggttagtaaaccataaccttttccaagaagtgcttggaatacatctggcagtcacgtatttaactatcggatgttccttaggaagtctatctaatcgctcgcagaaattaagtttttctattacggggagttttgcattaattttctcagacggttctacagcctttggcttatcaaagacctgctcctttcttttctcaagaagatactctcgatagaggtcgggttcattatctttaagatactgcgatagccacttgttatactcgcagttgaagcaatgacagcgtaatccttgacctgcatcaaaaatccagaatcgtgctttattgatatctttctgtgagtcaccacaaattgggcaacggcagtttaacttgaatgttgaagatgtagtaacgtgtctaaatttaggtaggtgagatattgcgcgaattgcatactcgttatcaacccaagacataatatttcctctggccttaaactaataaggccattttatcactttttcttggcagcgtctttatccgcttttcgtttctttggaagagtttcgggtcctttattgacgatgtccccggaagttgtacctgatgcaatattctgtggattgccgcccgcatcacctgcgaccatctcagtaacaaactctttgtatgttttcatagagcctcctactatttattcatgcgtaatacgtaagcatttatatgtaggatacagcgtcggagacattgattttggattgtctttgataagcataaactgcttgcctgtatcttcacacttttgcttaatcacggcttcatctttaccagtgaatgccatcttttcagtagacattccacctgaaccagtagatagcgccattattaaaacgtatgtaatcatcctaaaatccacttaacaatgttgaagttatcaaactgggcatcacagtaaagaacataattcaacttaagtgctgcgccgtcgtctttaagttctgcttgcacttctgtttgtttgctcgggtctacgttttccacaatatgaccaacatctgcacgaatctgctgagctacttcagactcatcagcagtcattgaccactcgcataagtctttgtcatagttggccatggcaggaactgcagagcaacttgatactgcgaacactaaagcaagtacaatctttttcattttggtttcctcaagcagcttgtacgttaagagcagaaatcaggcgataatcaccgtttgcgtatactaacattgacacattgccatcagtgtttttgaatggctcaacaactactaaaactgtatcgccttcatctaatgcttttcgtactacgccatcacaacgcagattagcatgtggagatttaactactttgcttccaactaccataccgcaatgcggtacagtttccgctgattcatctttactcttaaagactacgtctaatgctttttcaattgtccacatgatgttttcctctactcgttttgtttcagtaaggccatagtatcatggcctttggagaaagtaaactaccttttgaacaattttttcaacaaaatgtcagaggtcagattcttggtaggtaggtatgtagcagagttaacccagatgccatcgctgttatacaccttgacctctccatagtcgcatacagataggtctgctttgttatatgcctcaatgcctcgatgaatggtatctgtggctgttacaacaaaagagtgacctgactggtcacggaccgcgctaaacacaaaaatcatagaattccttagaattttaactcttctgccagagcatcaagcttagaacgtgatactcgttcttgacgattagattcggctacacggttctgtgcaccggcaccttctcggacggtattgcttggattaggcttagttgggtcgttttgctgctcaatttctacccaacgctgattagccttatgtacacccatagagaacttattgttgatgttcttatcaccgtaacgtgatttaatctgcttaattaattgttgcttcatctgagcaagttcaggggtttcaatcacagccaacataaagtctgctgtagcaggtagaccagcagattctgcaatatcactcatgtccatatcagaagcatcccacgctgaacgacctacctgagctgcggtccaaagaacagtttcagattctacagccaatgcacgaagttcttctgcaatagctttaactaacgtgtaactgttttcagtatattgacgaatacggcaagaagcacaaataccaagatagtcaatgatgataacagtcggtttaaagttcttcttgagtttcaactcattcagaagagctcggaatgtattagcgttagcaccgccagtcggatactgtttaatgattaaacgaccaagagtactagaactacgccatttttccattttgcctttatattcggcgtatgatacacagccatcatcaatatcgtcaagtgatacatcaagcaaattagcgtcaatgcgtttagcacaaacttcttcggccatttccatggaaatataaaggacattatgccccatctgaagatagtctgcagccaatgaacacaatcctaacgatttaccaacgttgacgccagccatcaatacgttcagcgtaccagtctcggcaccacctttagtaattttgttcagaatgctaagtttaaacggaactttacgagctttattctggtatgataaccaacgagcttcataatcttccatccaatcatgaccaatatagctatcaaacgatactgataacgcttcgcgcatgatatcaggaatagctcccatatcaggaagacgcttatctcgcttatttggctcaagctgggcattagcctgaatttcaataattcgagacgtagcgttatacatagccttttcttgaacgtacttttcagtttccttaactaaccaattcaaatcttcaggagcatcagataacttatcaataagtttctttgcgccttcatgttccgtttcagttatagacgaattatccagtgctacacataacgcagtctttgaaggaattgctgtgtattcattaacgtgtttcttaattatgttaaacaccgtctgagcaggtccttgctcgaagtactctttgtccatatatggccaaaccttcgtaaagaaagcctggttgtaaatcagattagctaagattgtttctaccactttaacctcttaaaagattttccataatgattttttcttggtctttaatgcactctggatttgttgtttaacacaagcttccacatgaggataaagttcatccttatgagcttcagatggtgtactgaactcaatagttacttcccccgaaggagaaatatttaatttatgaacataaaccaagtgtgattgaccatttaattttatcacaatttcttggataacagtcttcatagcttcttggattatttcatggcttttcttgaacactcgttcttgacgctcgaagtctccctcttccgagggagattcttgttcaaatttctcgagttcagattctaaatcaaactcagtcttcattcatgaagttctctaattcatcttcaacttcagcagctgatactgaaccactctcaggaagtttaacaccatcaaccttagttgaaacttttgagttaatcatttctgctaccgcttcatcaaccgcagcgtttgaatcaatagcacccaactgataacgggctttgatagcgtcacggaatggctcgtgcttaaacagaggaccccaaaattccgtactgctcgtatcttttgcccgccaggatttttcttcacgaatcatctcaccggtttcaacatccaggaattctcgtgcataccatccgtttttcggtttaaccacaaatccgatatccagagccatatcaagcagaccactgtatggatcgataccaccatcgaatttaacatcaatgaagaacttacttttctctttgacagtacgtgatttctcggcgttcaggacaaactgatatccctcaagctcagtaccatctttaatttgacgtttaccgatgatgaacacagtatccgcagaatacataggacctgtaccaccagtcattaccgtcttactgaacatctcgatagtctcgattgtgtggttaaccgcgacacaaggaatgttcttaatagagaagtaaggagttacgatacggaagagagacttcagacttttcgcacgagtcatatctgcaacagatttctcgttcagtgcatcttcggtttcctttttagacgccatgttaccaatagagtcgataaacacgatgactttttcaccacgctcaatagcttcaagctggttaaccatatcgatttttaattgttcaaccgactgaaccggtgtatgaattacacggtcagggtcaacacccatagatttcagataagctggagtgataccaaattctgaatcatagaacaagcagactgcatcaggatacttattaagataagcactaaccattgtcagagacatgttagatttgaagtgtttagatggacctgcgaagatagtcaacccggactgcataccaccatccaacgctccactgattgcgatattaagcatcggaattttagttctaactacatctttctcgttaaagaattttgatttagtcagttctgctgtcattttagaagtggatgctttaatcaggcgagattttaagtcagacattcattatattccataagtctccattatatttttctcacaggttaaaggatagagtaattatattactttgttcttgaagctattatcagaagttccatttcttcttggtgttataaaccactgtttccatatctatttcatagtgtattttacatccaacgcacatgccatgccaccagcaatgcattccatctgagccagtagttccttcatgaacaaactcatcagatttacatacgaagcatctgaattcttcagccttgaatatattaccagctacgtcagatttatcatagatgttcataagaggtccttggagggctttcgccctcacagatatggttctaccttaccaaattcatggaaggcctgagatttcactcgagtgttaatacacatacgaattgatttcagaggttcattatcaccgaataacccacgtctttcgccgtctttagatttccaacgggcttgatttgggaaagcagcatgtagctgttcaagggctctattctgacgagcagtatcacgctgtgtagaacaaccaccaggagactgcactttgccggatttaacgagatacttaaacagagccagatgaggatgacccatgttaattaattttagaaaagcataagcatcttcgttaaggtcaataactccgtaaccaatatcttctgcggtaagtttagtcaaatcatagaaagtattggtgaacccaaaactattctcgcgataatgaccccagcttgatgtgattttgaaaatcggcaagcgagcatgaccgtgataataaccacaatccatagcagtctctacgtatttgaccatatcatcaaatacctcttgactcattgcctcgccggcaccaagtggaacacggcgatcgtcgcgttcacgaatttcagtcagatgaatggtcgtatcatcatcaagcatccaaattcgttgtcctgcatacatttcagtaatcagacggcgagttcctgcaattccatcaacatcatcggggacagtaacgattttagcagcatgaccgtgccaagtttcgtatgcttctttttctgattcacgtactacaagatgcggaacataaccttcaggaaacatagtcagggcagtaactgccccggcacgcttataacttggaattacaaactgaatcatttccactcacctttatagtctttctttgcaatatgagtttcaccagtataagcatagttatctacaagatagaaatgacgctcatacacgtgcaaagacccgacgttccaaataatgtcaccaactgaataatttttacctgatgcattcagaagtttggttaactgttccagaacatagagctgccacgcatagtcattacgatatccaaagacgacatcattagagcgcatgtttacaacagcatgaactttattatcacgaatcagatactgaacattgttagtacacatgaaatcactcatgccatcgcgctcaaaatcatactgcatttgaggtcgtgtataaatcataattccgcggcgagaatcaggattactgataagttcctttgcgcagttagcaaactgcgaatagttttgtgatgaccaaactgcccagccatagttagaattaatctcaccatgtttggatgcaattgctttccaaatagctggggtttcacctggaatatctttaacgaataaactttgagatttataccactcaagttcacgggcaatgtacccatcattaactgcaccaaaaatcaggggctcatctgcaataaatgatgcacctacgatttcaatagtcttcacacccgtcttatcaatcacaaattctttgttgagcaaagcatcagcgaattcttgacggatatcttgtactgtcattggagttacaatcatgagacctcttatttaacttgctggataataattgtattctgctgtgcgttagaagcagaccaaatcagcgcaattaaccaaccgataatggaccaaccgaatactagatttgtgataaagattccaccccgtgatttatgcttacgactgcaagctacaaaggtcggcaaaaaatagatgaagaaaagaatgattaaaccaaatactgcttccatgttaatctcctcagttagacatgcatttgttgtagatgtgattttggagagattttaactgctccatacgttgtttatgctcattataactcaatccgccgttagcaaaatcagttaaacgaatctggtcattcactgctgccgcttgagcagtgcatgtacgttctttttgagttttacgcagacgcttaatttcttccagctcatgcttattctgctcaatcatgtcgagttccatcgcagatagctgacgattaggattagctttttctttcgccaaccgacgctcaaccgcgagcgattcagcagagacctggttgctagcacgatagtatcctacagtaccgccaattgctcgcacctgtccaacagaagaagccgggacgatatcaccttgtggcatttgacaaccagtcagcgtgagagcaacgataacagcaagtaacgatttcattgtaatctcctcagtatgttatttcgagaacaatggtaccacatccttgtggcaaagtaaacaacttttttaaaaatcgaacatgtcaagaagagacgatttctcttcatagtctaaccctgccgcttcagacatacccgtcagaggtttaacaaacgatttttggaacagaacactgtggtcaagccacactagaacttcctgtcggatttcttgtggcagctcagtgcccgatggccatgccatgcatttctcaccgtacgggttaccttcacgcagcgggatgaccatcaccttctcgccttccatgattggtgttataccttcaaatcctgcggtagctcggttatacgctaaagcacctttaacatgatatggcgtacctttatctggatatcctgcaccatcatcatacttgccgatgttgttggcggtcttaacttctgctattactttatagtcaagttcacgatattcagactcaaactgcttataatattgttgtaaagattcttcaccttcctgcagcatacgccgaatagattcttccaacgcattctgaacagcagttggtgtagaactttgctgagtttccatacccatgattttcaggtgcggttctgcataacgagtaccttccatatcataaacgttcagagcatatcgtttcttcgctttccagaatccgccaatgccgtttgaccccaacggaggacaagaaatagcttcacggtccatgaacattaaatgttctttattgttcatgtattcacacatctcacgatatgattggtcaatccaaggttccattttcttcttgccgaattggttcaggaattcgaccaaatcgttagtttctttgaaacgctcaagacctaccttctcgataaccttatcaacacaaacgtaaattgagtcagtatcaccagctactacaaacgaatgtccttcagtaccacataccttgttgagatattcattaactttacgttcaatccattgaattgccatttgaccaaacaacgtgattgctgatgcgttacgcaaatcataataacggaagtaaatgttacccaatgcaccataaagtgagttgatcagaatcttacggtttaactgattagtattacccaagatttcagcatgtttacattcaaacatcagtttgtcaaggcactcttcggtatatgtcagcagttctgctttcatatcatcagagaaatcttcatagacattaacttctgcgaatttatcgatagttccaaacttcttatcattcagaacctttttaatcagttcttgatttcgtttggcacccatcattttatttttccactctttacgctgataaaataccttcgcgatttcaactggaatgacaccatctacatctttacgatacatccaaccattgggtgaacatgaatattcgtcagacggacgtggtgcagtcttgttaatgtactcacccaatggatgaagtttaaactgtccaacgatggtttctggtgaaatattaacttgtcggatgattgacggatacagagatgtcaagtcaaacgacatgatataacgatatgcagcaggaactggttccttaacatacgcaccaggatatgactgtttaacatgagaacgactttgcggaataaccttgtcctgttctttcagactgttaaagatgattgcgtcccatgttttaatcggactcattacaccttgatacggcatcttcgcataataagacatcgagatagccaggtcaataaatccgcgaacagcatcaatcgcttgtactgattcaacgtcgatgatgttatacgaaatataccgttggtggttagtttcacgcaatttattgattggaccgtcatatgctaatttacctttcttggtttcataataagcaatgaaatccaacttatacgtcggttggttcgtgaaactaaacttcttatacaaatccatgtaatcaagaatagtcacacccatgatagaataaatttctttatcaccatacatgtttgtgataatcttagatgaaactttattcagaggagagaaccgtttcatcgcacgctcaccaagaatctgtttcacacgattcatgatgtacggaatatcaaatccttcaatgttccagccagtaaagattgctgggcatttctgttcccaaagattgatgtactcaagcatcatttctttttctgaattgaatggcatatacaccacacgatcaagaatatgttgtggaacttcatcaccgccttcggaatctaaacgagcagcgagtttcttgtcccactcggaaacagaaccataaagagaatgcagtaaatcaaatacgtagaacttatcatcaaccgaatcgtaatgggtgatagcatcaatttcatattctgctttcatcgggtctgggaattgagatgcagtaacctcaatgtcacagtttgcaattcggatgaattttttattatagacgatttctgaaccgtaagtatcactgatataagcaagtttgaaatcatccatacccattgcttccattcccatatcttccatacgacgcatccaatcgcgtgcatctttcatagttgggaatgtattcttcttgcaatacttgccatagatgtctttgtactttgtttcttccatgcaatgactaaacataacaggagaatacggaacacgacgcatgcgttcctcaccagtagaatcgatataacgttctacaatgtcattgcctagagtttcaacgctgatataaaattctttcatgggtttcctttgtttatagaccgagttattagtctttaggtgggataattatactccgatttttataaagtaaaagggccgaagcccttttcttacgcaccgattgtgtacttagattttaaagtccattcatgtttctgtttgaatgtaattactcggaagttattctgcatctgtgcaagagtttgaccacgattaatactcagtagaccccagtcagagagcagttgtgcgattgagtctcgacgaatttcatcttctaagtcaatagtaacagggcgaccatcaagctttaacatctctttaaaatggacgatatagtaacgaccctgtttctgaagaatgtggcagctttgatatagtaccttatctttgttattagcaattcccatacgggtcagagtttctttaactttcaggaagtcttcaggctgtttcagtgtaatttcaatcatctttaccattccaatgctgttttcttaagatttttctgttctttcacgtttttcgtgattgtcttgaccaattcatcagtcacaagacctttcattttcttgagagcaggtttaagcttgtttttagcttccagggtctctctatacatcctagcatcaatcgcattgaccttgtaatatgtcattataacttgaagaatcaatgcatcctggatgttttctgttaacttagcccatttaccataccgacgacctctaggaacagaggccatcatatagttatagtgtgcttggtcagataacccttgaccaacaaggttcataacataaaccgcaggcatacagtcagcgtgctgagaaagagcgttttcaaccatgaattttgaataatccatcgtcgagatattcaaatgctcttgcttttcgttaatagacccaataattgtgaagaattgattttctgctttttctttatatgaatcagataattcctggactttcgtccagtctttacctaaccaagctatttggtgctcattatactgatcatcatcttcaaataaactcatcatttccactgcatctctacaacaagttgaataagcatataaaccaaatgtaattcaatcgaagctgctatgccatgatactggttattttcaccgatgatttcatacattctgataatgcttgggccagtaaccattgtatacagctcagaagaaagtttatctacaaaccaagtatagtctgctgcatattttggagcaagagcacggagttctttgatgttcttagttttaatagcttcgatgacatcttcaattgaaccacggtcattcagaacgatagacaagatacctgcatcaatcacacccttagaagaataatgatcaagcatgttaatggtcttacggaattctggaaaattctttttgaccaaagcagctacaactttcttatcttcaaccaccacgccttcattttcacaaattgcgagacaacgcttgagcatctcgatttgcattggcttaacatcagatggagatggtttaccaaaattaattacacggcaacgagactgaagaggtttaatgataccatcaaggttgtttgcagtaatgataatagtacagtttgtgctatacgcttccatgaatgaacgcagatgtcgttgagattctgcaagacctgcacgatcaaattcgtcaatcacgataattttctgcttgcctgcaatggatgcagaacttgcgaatgcagttaacggtccacgaacgaaatcaattttacaatcagaaccattcacgaacatcatttcagcattaatgtcattacataatgctttagctactgtggtcttaccggtgccaggagaagtactatggagaattaaatgaggaatttttcctttagctactaaagccgaaaaaatttctttatcttcagcaggcaatacacactcagaaatagtacctggacgatatttctgttcccacataaagtctgcttcgtttactgtcaatttcatttatatttcctcattcagattaaagatggggccgaagccccgaagttattactcaaagtcaaaggtactatctgcttccattgctaccacataagaggctgatgcaccttcaaattttgctgcagtctgtttcttggaaccgttcatttttgcccacagcatcagtttataatcaccgatggtcatcttcatattgctcatgttgatgataaagttaaagttaccttcgccatcataatcaccgagggtcagggaatacttcggacgggtcagtgcagcatcttctactttgttataaccgcgcagaacaattttaccatcaacattggtgatagcaattgtgtcaatctgcatgccacgagatactcgcatcagctgttgcaggtcttcacctttaaaatcgataattacgtttgccaccgggaatgggattggtttagtcgggaacacgattgtgctcgggtcagctgctggccagaagatagttgagcgagcatctttaattgccaggttaccatcttcctgcatgataatatctgcatcatcaccaaccagagacagaatgctcaggaaactgttcaggtcataaattgctacatcagtatcgatagtatcagagattgtggcttcagcataagtcgtaccattaacagcacgagtcatgataaaattgccaggtttcagcatgataccggagttgatggtggagaagtttttcagaatgttcagagtttctttagagaatttcatttcaataccttttaattaagttcaggataattatatcaagctgcgaatgtagcagttaattcttctgcaacaatctgacctgccgcaacgagttgctcatcagcatctacgcagtaatcattttctagacgttcgccaccatgacggtcagtaacaattttagcaccagccttgattgattcgttgtaatgcttacgcatcaattcaatccatttttctgcaacttcgtcgtcaatagatttatagaaagcaaagcgagcttcagaatctttaatcttatctttaatagctgctttagtttcttcagttagagccagaacccaagacttacgaatacgattttggttattcgggttggaatctgcacgtacgtttttaacctggatatctttcacatcaacaaaattaatcattatatttaccttaatcgtaataatcttcaaccatccaaccgggattcctgctggacatgactctattatattcatttcctgtaaaagcatctcgtaacatttcttctgttactaagtgtttttcatcagaaaacaaattagttaacacatatcgctttacttcaggaaaggccagcagatgctggccagttgtaaactcattcattccatcaccgtaaatcgtcctactttcttcatttgaagatgttggccatatgcctgcgggtcgtggtcacggtgagaaataataaacacattggcatctaccatcttattaagaatagcagttattgccttaacaccttctgcgtcggtggccgaatcgtagacttcatcaaggaacagacagtttattttaacaccagaaactttttcagcaatatcacgccatgtgaatagtaatgctatatcaattctggctttttcaccttgactaaacgaggcataactaaactcttctcgtccgcgagatttaatcgtttcagagaactcttcgttcaacgtgaacgaataatcagcttccataatttttaggtagctgttaatttgcttattgaacatcgggatgtacttcttgatgatagctcctttaataccggagtctttcagcatttcagttaaaataccacgacgatatttttccataaccaaattagttttgacgagaataattttatctaattcttcttgtagcagttcaatcttgtcagagttatcaatgaactcctgtgatgctttatcaattgctgctttaatacgacgtgctttatcaactgcagttaaagtcatctgtttcaaattactcatttgatttttgatgtctcttgcacgcgtacgaatagtattatactcgcgagctagttcatccagttcactctggcgcgtctttaactcgccaagaatggtattacattcttcaacatgatgattaatcttagtgattagagtgtcattagaatgcaaatcctgcaagcacgttgggcaatgaccgcctttatcatacaacccaagaacctttgagtatgattcaattttagaacgaatcttaaagattttaccttgaacttcttgaattgactctgctgggtcatcaccaatcacgagttcaagcagttcgctttgaagagtttctaattctgctttatatcctcgtgcctctttcacctgctcatcatacatcgcctgcaggcgagctacgttatcaccagaaagtttcttctgcttttctgcatactcatgatgagttttaatttcattagtcaatgcttcacgctgaacatcattaacctggatttgctgattgatttctcttatctgtgtcttgttcagtttgtccatatcagccaaaagagacacttcaagcaaatcttcaacgagctttcgtctattagcagttgataaccccatgaacggagtatatcctgccgttcctaatacgacaatctgcttaaacgatgtgtatgacatgccgatgagactttcaaagtaggattgaaaatcctttgaacttgcggcttcatcaagcttattgccatctcgtaaaatctcaaagacactcggtttttgcccacgtttaatgtagaaactatgaccgtcatactccatccacagttctactacagagtccttcttattgaaggagttaattaattgacctttcttaatatcacggaacggtttaccaaataaggcaaaagtaatagcttcaagcatagtacttttgccaccaccattcttacctgtgattaaggtcttttggcatttatcaagttgaatgtcaatggccgcttggccaactgacattatattcttatacttgacacgatttagtttaaaagtcttcactgattttgtgcctcaatgtataactgtttagacataacctttaaggctttgatatcatctgcggataggtcttcaagtgcttggatatattcttccattaaatccaataagcttttaacttctacttcttcgccatcttcagactcaaccgagttgtcaactttagaaacagttcttaattcatgtactaccttttcaagttctgattcaaacttaggaaggtcttcatcgaccgcagtgataataatgcgtactgcgagattacgaaactcttcaaagtcaatttttccagtaacaggataaatcagttttctatgccaagtgatttcattagggacgaaatcaaaggttgataattcagtgtcttgaacccagaagccacgtgggtcgttctcgtcacccgctgtaagcgtccaaggcgttccgatgtacttaacgtttgctgcgcttgatatggtgtggaagtgcccagaccatacttgtttgtactttttgaggaaatctggttccagcccatgagacttcattcctttataaaaataaaagccattaagctcccagtgaccaatacagtattcagcagacgattctttgatatgcttcatgatttctgacgtgttctcttcacacatccatggacacaagtcaatcaaagtcccatcaaaatccatagtcacgggcttttcaataacagtaatatgcttatacttaccaagaacttctgttgatgcattaggcgtcaacgtattcttgtagtgcatatcatgatttccgacgatcgtaattaagttaattccttctttctcaagagactccgcaatttcacgagcgaattccattgtcttatgagtgatagctttacgaacgtcaaaaatatcaccgtattgaatgatagttttaattccatgctttttggcataatcaatatgctgcttaattccgtgtcgttgtacatcctgtacccacgggtcatctgcgcggacacctaaatgccaatcgcctgagtgaataattttcatataacctctctagtagagtttaattttatattattccatgaatagcaaaaagggcccgaaggcccattacttattttgtcattaactcaaattgttctttaaagcaatgctcagaatcttggtgttctaccaggaattcaaatgctttatttcgctctttatcatagagcttctggtcagatgacagatgtttcattcgttcaaagacttcatttttattttcatcattcaaccacagaatgccagaatcatgagaagtcaacggctttccatcaacccggaatttcaaagcatcaccagtagctttatggaacacaggaatagttccacaagcgcctagttctaaatgcgtgtattccagcgaacgctcaaggaatttatctggaagacgtgacagctgataaccaaatccagactgagacatacgctcaagcatttcagagttaacatatcggtcaagaacttgaggattcagacctggtccagttttaacctgatgataatgacggcaataatcaatttcatagcgttctttgatgttaataaatgcaggactgcgttctaacccttccaagatagtcgttttgcctgcggggcgcagatgactttcatgaaagtcaaacatcaagaaatagcctttccacgtagtagtacgaccaatccaacgatgaatatcaaaatcaatagcagagaagtctttccaatacttatcacgaattgctttgatgttcatagcaggttgaaagttataaaccggaggagctgagtcagaatcatcaaagaaactcaacccgccgcttggaaaatattcttccattagcacggtattaaaatcgccgtttgagctatgactaaacagtacatcagcacgcttaacggtttcttcaagaccagcatttctacgaagtgacaatgctctatggtcatgttgatatacgactaccctaacttcaggtttaatgttctctatgagcttcttatagttatcaatcgctgcttctggagcattgatagcaggtactgagttaatgataagaatgtcacatgcgttaagcagagataaagtcttatcatagtcatctgcaagagacacaggaatagttacatctttatagctatgtgctctattacgagtaaacgctttatctttagcgtaaatgatatttacttcatggccatgttttactaaccactcacggtgctcgagactgaacttggttacgccgcatccctcaagtccgcgagccattaaaatattaatcttcatatattgacctttgttgttaattttggatattttaccattcccgtaataaagcaaaagggccgaagccctttaaattttcttgtatacaacataacccactgcttcacatatacgcttagcttcttcaaagcgtctaagcatatctaccttagcattatgaatcgcttcataatcgggagcaggtgcttctctccgagcagtatcacatttataacagaagtaactacgctttggtcctgtataacgttctgaacaattactgcaccggcacgtgtaatttccttccggccaatcatgtccaggattagaacccatcaaattcgtcatacatcccaattctcttcactagtaataaaatcagggtgttcatctaaatcaatgaatccccagttctcttcatttaccattcataccaccgtttaacttggaaggtgtcaacccagacaagagagttcttatcaattagcttacatccttcggtagagcctaacacgcgatattgattatctgctacctttactgccatcgtaccagtcgcagtgtttaaagtaaatcctgcgtctttacgaacacgtttaaattttacttgtaccagcatttagaatgtcccaaacagatttacgagaggtattccaacaagtcagaataatctcatcattaaaaggttgttttaaaatagtacgcagtttttcaatagcatacttgtaagcagggaaattattgtctaataccgcgtctccagcatgagctcgtaatcgctcaagttcacgacggtttttacgaacaactttgttggctcgagcaatagcttgttcttctgccgcttccattagtttctgttgcagctcgtcgcgctcttcctgggtaatattgttcatgttattcctttggatggtaatttatttcaaatgtgaattcagtatcagtccaattataactatgttcaattatagcagaatctgacctgaaatcagcgtcatgtggatttttcgggtcaatgtgaatatcaagatcaagcacctcccttaaatacatctttagcaaataagggatagcgtctaggtcttgcacatcttctaaaaacccgtcgaggttaatcttcagcctcatataaaaattccagattaggtccatcgcttgtaggttcgctctttttagcagaccctggcgccttataagcggtggattcatactgcgtcattttatcgtagatgtcctgaataaaggtttcatctgctaacgcaaccatatcatcgtcccgtgaatcatacacgttatggacaaaatagctgtatttctttgccatttctttgcgttcttttttgatacgctgaacgaatgcattgaaacaagcttgggttatatacgcatgcgggttatcatacttagtttcatcgaagttgattaagcctttaattgcggcttcaatcccgtctgaaatcatttcttgcttccaggattgggtgtatcctgaaaagttgaaacgcttactcagaccttccgcgatcagcataatagcaaggccgatcgtatcgttctgttttactactcgagggccgccagcagcttcagactcccggcacttctctttccatgcacagattgatttatacagttccttgttatttacataattactcatattgcctcttcgcttcaattaataatatctattatatcaaatttgggaagcgagaggattaaagcattacttaatcaattcagcgcatgcaattaatttcatcatgatacgatagaaatcgttatatgtaaactcagcagaaacattgaccgagcattcaaaatcttcgaagacacgttccattccgatgtctggaatgtcatctacatcagcgtaccagtacttgccttcctgcacgaatgttatttggtccttttccagatagaatacgccattcaatatttcgtgagtaagagttaactgaattttcataggtcacctttcatgatacgatagcactggaaaagtttttccataatacgtttgaactcaattaaactgatttcaaagtattcggattcatcttcttcatgcatcatgtttaagaatgaagtgtacagactttcataatgtttttcattcagcatagaagcatgagtttcccagtacattaattcgttggagaaccacacgcccatgtaagaatctattacgaattcacccataccttcaacagtgattgagatattatctatttcagccatttcttcaccgtatcgatagcatcttcaaatttagagaatgcatccacagaagtatattcattctcgccagaacgttcatagacccagaatgcatcaaaatcatcttcaataatgaattctccttctggagtttcaatcaagtttctgccgtctttagttttagacacgaaccatccgagtaaaccgatttctgcaatttgttcttctaccatttcagttctctcgctaatagaaaatattccattgaagttcctttattgatgcgatcaacacagaacttctttaatactgattctgatacagtatgaattaaagcagaatcagtaatgatatactcaatttttacaaatgctggtgattttccagcttcatcgtatgctaatcgttgagcgttacgaacatcttcttttgaagcgtttgaaattctgacgctgtcaaacacccaacggctggtaaaaatttctgtgtatagaataactttacgcatcaagatattcctcaagttcttgctcatttaaaccttcttgccacatctctgacggagacggaagttggctgtctagagtggatgaatcaattggaaatactctgataattacgctagtatcttcatcccattgatttgcgagtatccgtttagcttgactaatgtcaggctcagaatgagcccggatatacttaatccttctatgccatacaccggtaggaatagatgcgcacacgatatatgaaatcatttcgctgccttaaccgctttaacatcgcggaagcctttcttacgttgattcttcatcttacgaatagtgctttcagaaatttcaccgatacccggcgtgattggttctacaccaaaggctttaataccaaattcagacagaagataagcaaccactaattcacggatgcgggctttaccgattttttgaccttcttctttcatcgtaccgtgaagctcaacttcccactgatcaagcaaagacggagttacacaacgtccttcttccagcattgcagatactttatcataagcaaaagagttcagtacgtttttgattgcttgggacatattaatttcctcagtaacgattgttttgacagaggagattttaaatcaaatctcctgtagcaaatcaatctttgagagattttagctcttcgagcatatcgtagtattctttactagcaaccggagctacagtgcagttgtagctattgaattcatggtatttcacgaagcgttctaggtgccacttaatcagattgttaattcggtgaagtagaaccccatctgaaccaacgtagacaaccacttcaaattgaagcccatcccaaattctggtacggacgatatcacctacagcaaaagttttcatgcgatgtaccaatgttcgttttgccaagactcacccttgtaccagcgagtcatatcatatccattttcgtcacagatgactttgttcttcatcaagaagtattcgtcatcagtaaaatgcacatgctttactttacagcctttactcatagcttctagagcttcttgccaatttaaccagttcatattttcctctcgagttaaacggtatgctgttatccgttgatagggctatagtatcactcatcaactagcttgtaaacaactttgtgaaaggaatttaaaaataaaagagaggtcccataggaacctctaaatgaagggtatagaaatatacataaggtggtcaagatgaccttagaaaggaaccggttaatcttctatgatatctgggtcatgcccagcagcaataagattggttttgaatgttggaatgtcatactgcttaacgttatctataaaaatgacaggataccgaatagcaagcgatggatagcacccgatgcgtttagcaagtgactcaatcaacggacggtcataaaccggttgaccgtcaacctcgttgattacgttatagaactcatacggaagttgcagcttatcgagcaagtcacgaactgctttacatccagggcatctccaaacttcttcagggatgccatagatttctatcatttcatgacctgttggagtttagcagtcagagtgttaactcgtttctgaaattcttcattagataacttttcatctttcttggtaggattaatccaatctgcgatgataataaggacaatgaacggaattgctacgaaagcacctgccgttaatgcaaccaaagcgataacgttagaaataaatttacgaatagcattaatgaatttcataattttccttaaatagtaaagatgaacgctgtcatagccagaaattccggtccaaacagttcagtagccatgtggttcagggtaaacataattttgtaagtcagcatatctatttcctcaatcgtgtgtccaggtagaaccatttcttacccagagtctttggttgtcagaaccacgccagtttttagtagttggcagtgatttctcatatttcccatcaattataacatcgatgtgttgtagcaaatctaaatctttgatatcttcaaacttatatcctgtccacatccagatatctttctccggaaatcttgctttaacccaagaaactaaatttgaaatctcttcccgattctgtggataaagcgggtctccaccggttaaggtaagaccttgaatatacgatttgcttaaatgggatgcaagctctttaacagtattcatagtgaataactggccatttctagcattccaagtagatttattataacacccttcgcatttatgcaaacacccggtgacaaaaagaacgaccctgcatccagggccattcacaaagtcagaagggtagattctgtcgaaattcattgaaccttacctcattacgtgcttctacttctgcatcatatttccagggctcatcagtttgaatagccccagccgataatccactttcggggtcacgggttatagcaattccaagcgggtgcagaacctctttgttgattttccaaatcaatccccattcgctaagttggttccaatcaacttgcttcattggtttctctaacatgttttaccctatgcataatttctttgttcttaccaagattgaacccacgctcagaaggattaccaagatagccacaagtcctacggattgtattcattttctttggatcagtttcaccacaaattgaacacgtgaatccgttttcagtaggtgtcatctcatgagtagaaccacaggaaagacatttatctactggcatgttaacaccaaaataatccaacttctcgatagcatagtcccataccgcttcaagaccttcaaggttgcgcttcatgtcaggaagttcaacataagaaatatgaccacctttagcaatggaatgatatggtgcttcacggtcaatcttttcaaaaggtgacaggttttcttctactgacacatggaagctattagtgtaccagcctttatcagttacgccctttacatcgccaaacttggcttggtcaatcttacagaaacgatagcacagactttcagccggagttgagtacagactaaaggcatagccggtttcttccgtccacttgtttagcttagtgttgatgtacttcaggacgagtttaccgcttcctttaaaagtaagcatatcaaattcgtgaatgccaatatatcctaatgaaattgaactacgtccatttttgaatagctcaagaatttcatcatcaggtttcatacgcacaccaaaagcaccttcctggtaaagaataggagcaactgatgcagtaacgccttcaagggatttaattctagttaaaagggcttctttacaaatatcaaggcgttcatccaatagtttgaacagtttattactgtcatccgaacttttataatttgcatccagagctatcctagggaggttcagtgttactacccctagattattacggccatcaagaacgggtttgccagaagagtctctccaagcaccaaggaaacttctacagcccattggagatacaggagtttctgaaccggtaattgctctattatttcgagcactgatgatatcaggatacatgcgtttagctgcgcattctaatgcaagctgcttaatatcatagttcgggtcttctttacgtagattaatgccttcttctacaaacatcacaagctttggaaagattggagtaattccatcacgtcctaatccacgaatacgattatcaagaatagctcgttgaattaatttttcttcccatgacgtgcccataccaaatgtgatagtcacaaatggagtttggccgtttgaactgaacaaagtattcacttcatattcatatgcctggaaagcatcaaacacgtctttttctgtttttgaaatagcataatcttttactaatgctacttgatatttgcgagcatcacgtacgtgtttagcgaatgtcttctctacataaggagccaatactaaatcgacgttagcaaacgtagttccaccatattggtgagatgctacttgtgcagtgatttgcgccatgatagcagtagctactccaatactcttaggagtttcaatttgagcgttaccaagtttaaagccattctgcaacatacccttcaaatctaccaaacagcagttggtgaaaggcaaagctggactgtagtccatatcatgaaaatggataacaccttctttgtgtgcttccattacagaggcaggaatgacctgattggcgatatgtttagatacgataccagccatcaggtcacgttgggtaggaaaaacacgagaatctttgttagcattctcgtttaaaaggtccttgttggttttattaataagtccctggatttctaattcgatattcattttaaactcttacgaagctgcttcttgtattttgaagcaagttgtgattttccatcactttcctcgtatgtaaacccatgcaattccatttcagcaatcatctcaggcttaccaagacgtgaaaagcgtttagccatatcggcaacatattgcgggtgaatattactgtctttacgattctggcggagatagaccagcaaattctctaaccattcgaggtagtcaatatcttgaccttttaaaccagagcggttgaacttatgcttcatttggccttctgccgcattacacaggttacagagcaagcctctgacctttcctgcattgtcaccttctaacgcatggtcatggtcgaggtgattcttttgaatatcctcatctaaaggacgtttgcagcaaggacataatccgttctgtgcctgatatagtttttctttttcttctttatataacttaccggttaataacatactcttacctcagcgattagataagagtatttatagttaaattaacgagtaactactatagatgttatgattagactcttttatgcagaaagaagtacagaaagcatagatgccttcataatcatccgcattgaactcaatatatgaattagtttcttcatgaagaagactcattttagtccaagccattccattgatgtcatcgtcgtaatagcctccactaaattctactacatcgccaacttcataccaatgactgcgtaaaatttctcttgtaacacgatgaatatcagcgaaatcgagaatttttactgtaatagttttagtaatgcacgatttagacatggcgaactccaagacgttgttcaagtgcgacgatataatctgctgctttttgcattaaagcatactcttctgaatcgcaattttcctgtccagcaaaggcataaagagctctggtaattggaacgattgcaccttggaaatggttaagtttaatttcagaaatcagaggaacatcttcaccttgaccaatttctttaatttggtgcatcgtatcttcgctgtagaaacaccagaaccaagattcgccgtgtggagttgggtcgttaatagtaatgattttgtttgtcagcaaatcaattacggcagtaattccacacatttcaaggtcatcttcattaactgcattgataacctgaaatttaaatccaggaacaaactggggaaattgttcagttaattcatcatcattttctataacttcaaactgcttaccaataagttccattcactttgtcctcataatcaagtagttcgttaatggtaggttcagaagtattataatcttcttcaggaatagcatcttcctctggctcgacagtttcccaccgagccgcataccaaggttttatgcctttgctgctttgcatggtgccggagcggaatcattaacagaatcgtattcaatacgccattcaacttcagtacgagtaactactttctcgtgacgagtgacgatatctacttcaggaggattataataccaatcggtatgatatgaacctgaacgagactctgataccatgaaatggacgccgcgtgctggataataccaaatctgagaacggctttgatacttatggtcctgtgtccaatctccatcttctactaaaacaaagatttcttcctcttcatcatcaccgttcggtggatattcgaaatcatagttgtcgtcccattcgccagtgacaccagcaatatgtttgatttctttaagcaattcagcgttagtcattttagcctcgcagtttttgtaagtcttcatcgtcaatccagctttctaaaccagatggaagtgagcattcaatttcccataacagttcttcaatagcatggagacgatcaatctcttcagctggaactgttaccattcgtggagtttttaaatcatcaatatcataactcataactcttcctcatgccaagaacaatcaacttcaaaatctggtccgagctcttcatcttcccaacgccaagaccctaatggattaccagcatcgtaatcaacttcaagaccaatataactccactgaacaccatgaatggtatttccttgctttacaaagaattcaccccattggtgcatgaaagcatactgcggatcagatatagctctttcaatcattgctttacgaagattacgttctaaatctacttggtcgccttcaggaaaaacaaactcaattgggtatttcataatttcaccatacactcgccgtatttccatttagacataaccttaactccattagagtaagttacctctacctttgctcggtgattcttaatctgcttaatttcaccggtttctaatccgccatagccgtaataaagagctacaatatcaccctcccgaaggagggttccgcgataatcatgcattgaatttgaatttacggagttcatcaaaaccgccgatatgtgtgccatcaggagcaaaaatctgaggcatagttaatccaacctgcgattcgcgacctagacgacgaagcaaatcactgataactacttcatcaaatacacctttttctggcattacattgatgaatgcatactcttgtttcttaacatcgagcagacgctttgcattatcgcaaaacacacacttatgaatgttgctgtcgtaaccaaaaaccgtgaacatcttcttctatttccttaaatacttgagcttgaacttggttccaatctggatggcatactgctttaacgtaatttgtcataccaagacgcttcattacttcgccatcaattgcagcttgggcaaaatttcttccacgagtcatagctcctttgagtttagaactatcaactatttgaccagtctcattataataaaccgaatacatgagtagcattactcgttcggcttcttccatatatcgtttacgagccattttcagccttagtagttataactaatgttttaccatctaacgcatcgagaatatctttgatgcaattatctggcattggttgaacgctagctaattgcttggcaatatcatcaggaattcccatgcgaggaatatttaatttgctaaaatcaattttatccattagcagttaccgggaagtgttctgccaatttagcggcgatggcagcgttaatttgatcagcgaaattcttattcattgcattaacaatgatttcttgaattcggcggttagcgctttcaatagacagcttaatacgaccttctgcttgctcaatagcatcatcaatagtctggtgaaccatatcatcaatagcatttttagcgcatgattgggcagcgttacgcatcatctgcgacatttcttctttggcagacatatcattccaaccacgagtatggaacatctgctgaagctgtttcttaacttcagctcgtacatctggaatagttactgttgcaatattaacttcagattgtactgcttgttttagtttattctgggaatcttttaacaccatttctttaacgatgttattgattactgactgctgcagttgagcacgggcttctgtaccttctgggaataactggcgtactgcataagtatctaatttaatgtcaatcattttacctttttcactccaggaatattagagatagtttcaaatacttcgtcaaagttatctttatcaacggtgactacaatagtgcgagcggtctgtttctttttccaacgtttaaagaaagtggcaagactcaaatcatgggaagtgaagaaatcatcggttttgtaaacatatccgctttcaatttttactaccgcatcaggcgaagggtcttcatattcttctacttcaacatcatcaaagagtattaaagtgtcatcatgataatagccttcccagaaggcttcatcgttataaaattctttccaaagcgcgccagtggttttcatttaatcaccttcttccaagcttcgtgagcagcacacgctaatacttcgtcatcagtcaaattgaacttgccttcattacgacgagcaatcatttcattgaattcagtatcagttctaagcatcatgttaagaactgtaaaatccattgtcgctcgaagatattctttaagctgcatagggtcgatgccactttcgtatgcgtcaagaatcatatctgcaatgatgttatcaaagtttttgtcttttatgaggttattagcatactcgacaaaaaacttagtattagcaccagtaatagttttagtaatcattttaattttctctcaaatttatgcttacaagtccggcatttcattttcagaatatcggttgtccaatcaacaagctgtacttgaatactaccacatttttcacaaggcacaacttgtttagctgcagcttctcgacggtctaccatttcaagacaggcatcccaatcaattttaaattcaggtacaggtggatactcaaactcaatttcaaggtcgttatcatcaacgaccatgtcttcttttaattgatttttcacagtaagctccgggcatactcgagagattcataccgctctttgtactcattaagcgatttgactaaatccgccatcatcaattcatgcttacttaattcagcttcttttgtatcaataaaccgcttaactgattccatttcagctgtaatactgtttttggcaatttcaacatgatttactggtgttaacggaagaggcttaacaacattgagatacatatgcgctacatcttcatcaataacctgtgtgctcaatgttttaggaaaaatcttaaatgggtccaaatgtacttcaagaacagatgagttttcaccctgctgtttacagcatgattttttaactacatccatatggtctaaagcagtacgaacttgcgctaaaagcgcccgggccggatactttccgctggacaaatggctgttaatatgaattcgtacagttacattgtcaagttcttcggcacgaataaatgaaacacccttaggatttctagaactagtagaagatacctggtatttcacacggtcatcgcctttaagtaagcaaattgaacgattaagaatacgacgcaggtttgcattaaattcagagcagaagatttgggcagcgctgcggtcgtgtctttcttcagttttaaacgcccctgccgcaaagctataacgctgaccataaattttagcattgccgatagcaaactttttgagctgcttctctgctgacattgcacctaaccagcgagaacgacgaatgttttctacaacaaaactgacatagtttgcttcgtgtgctgccatgctatttagcacacgacgagctacgttaccagcaattgctacgttataagcagctggatttaaatcatgtaaagctgccaaaacctttacgtgcttctcacgctttgacaagccctttccattatgcttatcaaattcaccggctacaaacatctttaattcattcttattcattatcttttcctctattttggactgggctcaaagagtatctcaaaatctccctgaacccattatacaacaattattcctcaagcattataactttgcttgggcgcttatagaaagcatgagttttatcatctttcgctaattcaaatgtagcagtaaactgtactttgcctctgtattcaaacggaatactttttggaagggagccgtaaaccgtagctccattctcaagtacaaccatcatcttacattgtacgccgtaatagtcttcataaacttttactgacgttacggtaccggagacagtcactcgtccttctggtgcatcccctttattcttattcagctcattgaatatattatcaaagacctcttttgaatgttcctggatagcctctaagatgctcttatgggctctaacttctgccataacaacatccgttccgtcttgcaatttccactctttatatggaacgcgtacttcaagaggataaccatactcacgaagttctttatactcttcttgagttaagcggagtttccaccaaccgtggtcacctgtatactcaggcttatccagtgaatcaaattctgtaacatacggcaagtaactgcctgcgtgataagcttcaacttcacctaattcattttcccaaagataaccatcaaagggagcatgaggacgatcatctttgccccaagtaggagctacaactttatcaaagtattcacgaccgaaacgggtcttcgcccatccagcattcaactcctcggcgcgtttttcaactttcgctcggtgtgcttggcgggctacacgattttcttcaacaagtgcagagataatctcggttaaagttttcattttattctccagtttggttgacgagaccatcttatcaacagcctcgccgaaagtaaactactttgtgaaaaattttctccaaagcagaactgcatctctacgagatacttctactgctcctagagcaactgcttgcttgcgacgaacatcgcgcaaatcatagtgtggaactcgcttatcctggaaccaagaacgtttcattccgatggcttctgccatagcgtgtaactcatcaaggttgtcgctaaacatatgacagttctttacttgatgacctctcattttccaaccatgattcatcaagacatctacgtatactgtcatttctgattctcgatgtaggtttcaatgatgaactgtgctaaacacagaagattatcttctgaaggagaatctactaaattctcaaccatttcagaaatagttccaaaagcttcttcagtattgaacatttcttgaagttcgttccaagtaggtgctttcatttcaatctcctcattagttaacgaagctatcttatcatggcttttctaagatgtaaacaacaaaagggcccgaaggcccttaaaaagatcggaaatcactgttaaaccatggcgactggtgctgtcgctgcttaagcaatttcacttgatgtttcctattgtcttctataagcatcttagaggcttttagctcttcagccaataataactgtttacggtccatcaggatgaggttctgggtcttctgagcaagtgtctgaatacctttgagaccttccacagattcctccatccctcgtttatacttggttcgggcagcatttaactgcccttcgtaatacgcatgtatagacactatagtactaaacacattttacctcaataacatctaagataatatcttcaacgtcttgctcagggaatgccacgccattggtctgcccatgctgaaatactgcttggtacgctgacggcgcagaaattcgggttgaacgttctttattgtcatagcatttgccatcaataaagcgtttaaatttaacttcataggtttttaacattattacaccttagcataattgacgatttgttcacgatcagcgggccaatttaaatcagaacgtttcttgtttgaccacgcaatattttcttcagcccaatgaagtttagccgatacgctcttttgtacgtctctgatggcttcttcaagataaatgcctaaatctctcgggttagttccttgagttttaaatgcattgagcaaaatatttcttacaacttctttaaattgattttcaacttccgggtgaataaattcacgatatccgctgcacggatatccaaaagcatctaccatacgagcagtactaaattctttgttcataatccgagcgcctcgcgttcatcaggatttaatttagccaaagcggcttctttaattttttccaaccgtttacgcttagcttcaggtgtttcttcctgaacactaatagcagcgcttttaggaaaagtccatgattcgccattttcatcggtgaatgtaattagttccgttggcttacgattaactgtaccatctgagccccaccaagactgccccttaactgcttcttcggcaacgcaatatgaaccataataaccaaacaactcactacggcgatcgtctggagagacatacgctgcataggcttcactttctgtcattacccatttcattttagcacctcataacgaataagttcaatacggtttttaagctcttggtatgatttacgccaaggcttataataggcatttaaatcttggtgttgtttatgcatttcgtctaaatgctttactgcatcctgcacatttgcaaggaaagtatcaaatactttattagcgtattctttcctgagctcaatgaacggaggagcacgaaatacgtttaccattacacgtagttcatgataagaagaatggacttcagctaatacatttttcttatcgccaaagttaaacttataaagtttttcacagattgcttcacaggctttctctgctttacccttgggtttacctgcaaagatatgaccaggcggatatactttaatatcgtttaaccaacattcaatatctttaatagctgctaaactcattgtacccacgctccattttcatcaatgtaattaatccactcgttaatagtccaggaagaggtatcacctttaggagtatcaacgatatacattccgcctttaaacaaaacacgttttacatcattagaaattaaagtagccattatattttcctcagttagggaggatttctcctcccattaaaattatttcagcattgttacttcagcaatttcacgccagtttttacggtcagtcgcgacgaaatcaccaatataaagagcagtacggagagatacgttacgcagacgatttacgttatctttcataaattccaaaacttcaataacttcagaatttcttaacccacggttctgtaacatagaagtagtcattattacatcttgaacacgaaccataatctcttcattagtgtgaacaccaaggtcaagataaactgaacgtgataccaaggcttgaagatgcggagcaagtttagaaccgcgctctaattcacggtcaatatcaacgttagtgataaagaccacagtaccttcaaactcaaactcattaggaattcctttatcttccaagaaagaagatgcagtgctccagcatactttacgtttctcccctgaatccaaagcagctttcagaaggttcaaaatatccatatcagagaatacatccacatcatcaatcagaagaactgaatttgcttcacgtgattcccaaagacggcagtataaaccaattcctgagattttgccgttcactgatttgtaatcaatagcgttagtatcatgagcatgttgtaatgctttatccaaagagtaagtcttaccgatacctgctgctccggagataatcagagaacgaatattcccgtggattaagccgttagtcattaatcccatgacgttaaagcgtttcttgatacgctctttcatttcatcaacggattcaacaacttcaattttagcagctactccgtcaattgtgatatcatctttgaatacccaaacaccgcgctttttgccattcagttcaacaaagactttaccatcaccctggcgagaatcttcagcacttaagctatccgggaaccactcaccgagtaactcataagtacctgaaatctctttgccgaagtaaatccctttcttgatggtgatagttgacattttattctccgttactctgttttgttttgatggagctatagtatcaccagctcgcgagcttgtaaactacttttttcattcttttgaaacaaaaagaggagcccgaaggctcctcagttatgcgtgcttgttgatagcattttctgctatacgttttggaagtttacctgcccagcggaagaacatgataatcgctccggcaataaacgcagggaaccaaaagatgagataaaaccaatactctcctgctttctcgatggttccatttttgattagatgcttacagacagaccaacccacgacaaagtaaattattgcaacaacgattggcactactacgctccacagtaaaatcatatttcagcccaataaagtgagaaccggagctcttctccggcccatgacataaatcggtggatttgttttcgagttggtcgagcagagaatttagcattttctctacgaccagtctctctgcaaactgcttccaaataccaccgtctacctttatgaggtcttccgtaattcaagaagaccttcattgtatcatttgtagtaagaattgtggttttcaagataaaccttctcgacgaaatcgtcccagaacttcatgtctactttcttaggcattccgttcttttcagcagtatgagctagaatttctacttcatctactacagactcgagaagctcctgtacttctttgaacggtaactcacctgctttgaccatcttgaccattttagcatgggtcagagggaattgaaggtcaccagtcatatagatttcctgaagctgcagacctgcacgaagagcatgactcagtgctttccagtcaacgccttcgttagcttctgccttacgagcacgttcaccatattcagcatcaagtttctcaagagaatacttcatctctttgatagtgatagtcgtctggaatttacgacccagaacgttataaaacttctgctcgcctgatttgtggtcaacgaaggtggtccatttgaggaattcacctagaggaagtttctctgcgatatcctgtactttccaacgctcattgatacccttctgctgaggacgatcgtcatatttccattcaggaacatctctgataacatccaggactttatgtaaatctgctaaacgagaacccttaacgccatacttacctgcttgcttacggacatatccaagataagccttcatgtcagtggtatagaaacgagctcggttgtcttgaatgaatttccatacttcaggaaggtcagatgcaactaccaattccggtggagtatgcagcatatccaacgcgacagtttcaccgtcagcagcgagcttgaagaaatactttaagctgaacaactcatggtcaatatcgtctttggtatttttggttgcgctgttgttagtattacgattggtgtggttcatcgcctgacacattagaatatcacgcggatgaggtacaaagatttctttaaaatccacatctgactcgggagttgaagtaccatacagatgtgaaccaaaataagattttacgattgttttcataagtaaatatgattccctttagcgaatttaactaatgcattagaacgcttggctgcttcttctgctcgagttttatctgtagttctttttgatgtacggtaaacattaccaattttttgactggtgtaataatacaccacttcgtgggtatggtactcttgtccatcaggatgctgttcacgacaggtttcttcacgcagtgtggtttcatacataggaactaatgcccaatcaattcctgtgctaatgattgccacctgaatgtcaagtctgttccagcgaaatgcattgatatatcctaggacccgtgattccgggtccatcattgcgaatttaatgttttcggctgaagctaacggcatctgtttcacaatgctcatactaagttttttcttagtagttacgatttcaatttccatgacccgccctcataatgtatgtctaaatcaatgttatctttgccgctgtacttgccagtcaaaggaataaatttaaccgtaaccttttcgccgtcatcaaaagtaaattcggcaatagggtatgtagaaattataccacgttcggttttagcacgaaatacggcccgaaggccgttcacaatataaacttgatcattcttcactaggttcacctactgtaacatcaagcatagatttaacgagcgagatgtcatttgtactaaacacgtgagcttttcctttatcgttctggcaaaacatgcttccatctgctgcaattgctagtacttcatagcagttattagttgtagagaatttatcacccactacaagaggaacattaactttacacttctcataaactgtgtatttaaggctgctgagattaattaccgacttggaaccaccgggtaaaagtttacagatataaaatccatcatctgaagactcttttaggtaatcatcgatatacattccacggtaaccatctttaggatatactacagtagttgtttctcggctaccataatcgtaatatactacgattttgctgtctttacttttaaagaaaatcgataccgtatgcgctgagctgcatttgaagatagaaataaattcaacttcaagctcaaatcgattgctttggttatcaaacccaatttctactttatcaccaacctttaagggtttttcaataaggctttcttcaaatttcgtgcgaataaaacgtttcatttatcaccttctacataatcaatcattgggcagactttccgcttacgggcttttaaatactggacaaataccgatggttcggcttctgcaggaagaccagcttttactcgagcaagttttttggtatactgtttctgattgcggtagtgtttaaatttttctaaaccaaaaataaatccaaacgctatagctgcaaataaaagcacaaatgctgctataactactgcgccaactggtactgctataacatttaaccaaagcgcagataaactaatacctatccaagcgagaattcctgtatccgccacaatcggccaaccgaacatccatgcaacagaaccgatgaatgtaataatcgccgaagaaaacacaacatgaagaactgtcgtccagaagtatccacatagagtttttggcattttccacatgctgccagatttaaaccacaggttcattttgaaatgccaagagtttttattaatattcattatcagtccttcatagttggaatcatagttacaagatatttgaccagttcaatagcgtcgcttttatcaatagctacacaatctccgtcacgttcaatttcgatgatagtattatgttcatacgtgtggaataccgtaagatacaaatcaataacatgcgggctttcatcttcaattactgcatcgcctttacgggattttccgtcccatactaatttactcgccatcttttgcctctatcaagaattgaattaatgaatcaatttgtttagtatcaagatgaattatatcattgccttgttttagcacgatacgactcaactttttagtgaaatatgaattcacaacctttacacgcacatcactgtacggattatctaaattggtactatcaagaatactttccataattacctcaattgtgaatcttttgaaccacgacgattataagcagaagtcattacaatgtcccactttccttgacattctacacaccgttgacagcctttaaccaacagacgacgagctactgggatttcctcatcacaatcaacacagaactcttcggattcccgctgttcttggagttgtttctgaagacgggcccattcaatcccgtctgctattgtagcttcgcgagttgcaaatccgtcatctgatgggccccatccattcatttcaaactctccagaatcatttgcaccaaattatatgtaaacatcggatgctggtattgtaccacaatgtagatgataagtaaaacgtttctcattcttcgccatcatcaaagtcgtagtaatcataatcacaactgtcaagataagaatccataaattcttgttgacggcggaaatcttcagaaggggtcagtctgtctgcatatgcttgatcatctggatcgctgaacttgtcttcctgaagttctttaatgaactgttcagcttcttcacgcgtccaaaacccacgattaagattatgaaccgaacgcttttcacctggcttgaatacgcccatatcatgagcagaacgctcagttgaataactttcagtttgaccagcatagttttcatattcacaaatcacccggaagaaaggagattttcgcgaatatacaccgcgaagaccgagttcaacatcatacgtgcctgaagcaacaatgtaacgcgttatttcgccgcttttagtttctgtgcgattaacaccacacacgtgataaaagatttttccaggttgaagctcggtggttaacttaatcataatgtttttctcgtttggttgttgatatgtctatagtatcatgtaatgaagggaagtaaacaactttttgaaaagaaaatgcctcccgaaggaggcggagggtattactgcaatgataacaaatacttagtcttgtagcatagacctgtaatgtcatccagaacactttggagggcggcaggaactgacttgtagataccatcggccttagccagaatgaggtctagcatttcaatggtgtcctttggcagctctttctgcgatggtaaagccggtgtataactcttacctgagaatcctaaccactgctcaccaaaagcatctatcaaatctggaatctcgttaaagaaaacttcatacgctttatgtctggcatacgatttggtatcaaaatgcgctgaatgaaaatacgcctgagacgccataagtaaaccgatgaattcatcttgtggagtaagtttaccgtcctttacaaaatcattgaatttcattatcgagttgtatcctcatgcggttagcatattcttcacctgctgaacgtcctaaagaatcgcaatctttagaacaagactcactcttccatttactttgtataaaagaatagaactgttcagactcttgcttactaggctccttaaatttagcataaacttgtagagctccctcaacatacgagttataatccgaaatgtcgttgtgtgatgcagctgggagtgaaatcccgcagcccaacaccagggctaagcaaatgtgattaaaggccatacggcctcctattatttttgtccagtattacgtttgtgctgaagtacagccttaacttctttgaggtatttgtccagcttacgtttacgggtataatctgcttttgaactgtgctgacgaatttcttcctgaaggtgcgaaataccatgcccaatctcacgacgaagttcgtccagttgttctacagtaagattacgaagttgcttttcacttaaatgctgcatatacacctcatcagttagtaatagtatttatataagtatgtgttacttaatcccaaagccattcgcagatgccttgctcaatggttctagcaccagcttcgtcccagttatattcttcgtcatacttcaatgcgcgtttaatttcggctttatgaaatagacgtgggatcggcatagcataacgggtccaacgtagagttttccagaatccatcgcgctttgatttagcaatcagtttcttggcctctagcggtctttcccgattttcagaaatacgcagttcaacatatttctgttgggtttctttatctttctgagttttaacgtattcgttatagcttttaatataagcaaattcgttattattctgatcgttccatttggaagattttactacatgccagcctttacggcgaattgttctagacattattacctcgttaagttaaagtacctcaacgatagtaaaatcctgatttaaaaaatttaatattcatgaatagatgaccttacatttacatttaggacattcaggttctttatttttaagacgcttggtagctgtctttggagcagtgttgtaatcatatacatgaagacaacggtagcacatcacatattttttcatattaaaccatcaacgaaagcaatattacgtacagcaagaatccaactacgaatcctagtactataccacccgctatagcaaataagctactcatgtttaatataacacccattcatattagcaataaagtctttaccctgtgccaatactttacattcggaatcaagacgattttgaagttcttctcgtctatcgctttgaatagatgctgctacacccatccaaatgaatagcatacttaaaactagcatcaggagagtattatacgttcttggcttcatcataagcacctaccagttcgcaccagtgtttacgacaaagagaaacgtatttgtcttcaccaccaagttctactacttcaccatcggtaatagcatttccgttttcgtcaatacgagctaccattgtagccttacgtccacagtggcaaacgcccttgagctcaacaagtttatcggctacagaaagaagagctttagaaccttcgaataactcgccgcgaaaatcagtgcgaagcccatatgccattactggaacatcatacaagtcaacgattttacatagctgaagaacatgttcagcagtcaagaattgtgcttcatctacaaatacacaatgaatatcacgttgtgtttgtgcccacttgaaaaactcaaggatatcaatagattcgtctactgtattagcttcatgacgaagaccaatacgagaagtaacttccgttgccgaatcccgagtatcaatagcaggtttcagaatgagagttcccatgccgcgttctttatagttatgggctgctgtaagaaggttagctgatttgcctgcattcatactcgcgtagttgaaataaagctgtgccattaaagtgtctccataaaatcagaaatagcattcttagaacgaatgagttcatcgtattcttctggtagaccatttccgtaaatggcactaatagctactacttgctcggcacctgcataatcgtcaatcaactgccacagtttatttttttgctctttagtaatcatctatttacctctaacaagacgtatttagcttttagcctcttcatattctaccactgtaatgtcaatatcaggggttgctaaattaataagtttctcaattagttcccaatcaccgccagcaataccagcaccaatctttggaatgtatagaggacgattataaacaatacgaccagaatttagttcatggaatgcattaaaaattgcgccgtaatcaacatttggacctggagcatactgagtatacaaattatagcaatatgcagtgccattcttgtgaatggctcgagtatgagttccaagcttggctaaattattgtcataataacggtcttcatcgatgtcaatatcgagaattggaggatatgctttagcaagttgtcctgctacaccagcacccattgtagtaaagcaattacatccatgagcaatatcgcattcatgcttcatgaataattctacaatattacccttaatatatccagtaatcatttattcacctatggaattttatatgttgcatattcattaagattattgtatactcttaaaaatatagcattgttacaattaaggatagggttcagcactccttgttctttaggatgcattactccgtcaatagaaacgccatcgctctgcattccacatccgcgagcattatattcgacaagtggaactattacctggtcatctttatcttggtaattataaaatgacattagcaattttctactgctaggcacaaatgctatttcaatattgttcttgaatggaccgttgctttctattttagtcccctgcgccgctagtacaggttcaggatagcctgggagcttttcccaggcattaactgaaaatgcgcagcataataaaatagctgcttttttcattttgatgatagtcctgacatataacgagccattaattggtcacgatacattaaacatatattttcgttaggagcattgacacataaatctttcatgctcttagccttacgatttattagtgttgtccactgggccgggctacgtgaatcttttactccatcgctgaatgctgaatctaattcaagcgctaatatatcaacacattcagagttcgtattgcaaaatgttttagcgatacgaagtgaatctgtcattgaattttcagcattagcagagaatgccagtaccaatccaagaagcgcggcgtactttaccattattccacctttatatgtagcattttatgtttctttaagaaattagctttctctaggacatctgacgcataagagtttccccttttgacattccatcctgcattataactagcaagagcttttcgcatattgccgttatgtatatttaaccaatatgaaagctcaatatatgcccattccgcggaattctgtctagatttaagcatttttcttatttcagaatcactaaggtttttgccttctaatttagctctggctttaaccgtaggcaagtaattttgaaataccccataagaatgatgcccctttcctgcttttaaattggctcctgccgaagattctttccatgatatagcagccattatatatcctaagccgttattatcatatcggttatgcggagatttttcctttccggatttttgatattgctcaccaaaattatatgcgtaatgtaagttgtcaagttgaacattactgaaagttggctcagacccaaaggccgttgaacataaggccattagaccgataagcgcttttttcatgtttacctcaattaatgtgtataacttttgtgctgattttacctttcaaacgtttatcattaacgaatgccatacgacactttatactaggtccttttcctggtcttggaatatccatggtaaaccctagccacagatttccatccgtaatttctaaccgcattggcttatactcgatgttttcatcaatgtcttttgggtcaattggaagccaaggcattgctaagaattcattaatttctttaagatgattaggaattttggaaagaacagagaatacatactcttcatcaatttcacgttgaatagcacggtccaacaaatgatcagagtacttagtgaagaaaggctctttaccctcggctttcgcccgggcacgaacagataaattcaaagagcgaaaagcttcctcaaacttacgacgcagtttagttctgcgaatgaatacttctgggttagttgacatagttcattctcctttgtttgtagggccatagtatcatggcccgtaaggaaagtaaactactttttaatatttttcttctggacagaacactgcccggcaagcccacatagaagcttccttcagtttctgttttgctgtacgaatctgggcaatacgttcgtatgcttcatcgagtacctgcttgggttcattggctgactcttggtagttgattaatgcctcttcttcaagagcagtaaagataagaccaagacgggtttcagcgtctttgatagcattcactttaccaattttttcattggtatgtggcttgtatcctttaatatcttcgattgacattatagtgcctctgtgaaagtacgagcgataacgtcgcgttgctgttccggagtcagagagttgaagcgtaccgcgtagccggaaacacgaatggtcagctgcggatatttttccggatgctcaaccgcgtccagcagggtttcgcgacgcagcacgttaacgttcaggtgctgaccgccttcaacttttaccgttggctggtattcaatttctacttcacgcgccttgtagccataaaaagtttcagcatccgtaatagtatcttctttaagaacttttgaaacgattactcgtgcgtcatcaccatcttcgatgtaaatggtgcctttaagttcaccttcaagaatttgatatgctttcatatttcctcttaattagattctttattccaaccacgcatgtacgcggtaattacgtccatagtattccactcagtagaatggaacttggatgcagcctgcaagtacgagattttaccttctggcattaattttacccgtgctaaacgttcagaaatagcagcgtctttccatgtagcaaaacccgttggtccttttaattcttctttaagacgaataacttctgcttctaattcagattctcgccataagcgttctctggcatcattagcataaagtatttcttcatcagtttctttatcgtactctacaatttcaataggctcatcaactccatatccacgagtgcctatatacgttgtagcttcttcccactgttttgtggcttcattccaagttccattctgatgagcttcataaaaatcttgctcaccagaattactgaaccaatcacagaagctttcaactaaatgtggaggacactttataacaatttcagccattgcattgttttctcttgaatgcgttggtcatatgtgattaagcttgaactaatcacgcctttgagcttgccagatataaactcaattctaaaattaggatagcgattcatccacttcgtgttaggagcattagaaatgaattctgcacctttaaacggaccagacagaaacttgtagcgcttgtactcaagcaggtttccagccgtaaccattgttattaattgcttcatatcggaaaatcctgtattttccattactgtaatcatatcaacaatttctgtctgtgtcatcattgcattcctatcacgaaaaataaaggtaaggtatcattaggcatagaccatctgatagcttcctggtacatatcatagaacttcatcatatcgggaactttcattggttcttcaatgataattaatgctcttccaaactttcttcctctaaacttataagaggaatcattggatagaaattccctgattgtcatcggaacaattgatttagctatctcgttagccggtaatttattaattaaatgcgatgaattatattctcgtagaataccttccatcagttcagatgattgtgtgtatcgagtagataagattataaccgaaccatcttcaagcaaccaatcggtagcgaattggcataaggctgcggtctttccggtttgtcttccaccgtctagacgaagggtaccgtactctcgcataaggcaagacggttcataaaaactgtagttgggattattcaatcgtctgtctgcagcgtctctgaaagcatgcatcagggtcaaataaatgggagttaagtgtttcattttagattccagttaaaggggccattccttggcacatgtttaatccatcgacacactatgtaaaccccttaccgcacttgggctcgaccttattacaggtaggaaaagctacttcactcagaggactcgacgttcatgaggagaggtcgtgttcggctttattaggaaattgcttacttaattgatttagcgtaacgaatagcgccgcgatcgtttacgaatgcaattttaccattacgcatgtacatggtaacagtacgttggtaaccgttagaagttttgccagactgataacctactaatgcaaagttatcttcaccaggtttgttctgcttagacttaatacgctcatgaccaaatgccattaaggagcgtgcatcgccagatgctactgctttgcgagaagactcatcttcaatagaagaggtgaaatcatcgaatgaatcaaacttagcatggctcttattatataacttgccgtctactacgtagttatatccaacaacgtccatttcaatttctgtaccatcttctagcgtggctgtcatcttctgaccttttttaaatttcagaagattacttccaacagattcagtcattacgccaactgttgctaaacgggattcatttaaaaattcttgataagttttcatttattttccttgataagcggcccaagttccggtccgcatagtttcaattacacgacgagcacgattaggtgtctgacgataccaacgtgaatttgccagttctttggcagcagcatcccattttttagcagctaagagcttcatggaagcagggaatccagcgacaccacctacacccatttggaataccatgttaattagagctgctctacgaacatcatctaatatattatataccgggcttaatgtagcattagccacaatgcccttaattgctttttcaacatcctttgcaaaaattacttctgcctcagcctgggtaatttggccaccagtagaacgacctacaagcttgtccaggttagaaatagccaaagattttgacgggtctttagtcagtaagtggccaataccaatagtccaatacccttcggtatctttataaattttgctatcgtatccttcatcaatacgcagcatgccaaaaatatccataaggacctcctattaattataggagtatttatttggccctgcacttggctatgaataattcaaggctacacttctcgtatggtgtccatttacctttccaccacacataatctcttctatcgtcctcgggcaattcactaaatcccggatatagctgttctgctatataatatgctgattttgtatactcgccgtcaccgaagacataccgtgacttcattagtgtacgtgacaacttatctcgaggatgaaatatgctaatccatcttccgtcacgaacaaatcgtagttcatgcttataaatgtgtggaatgcctaattcaacagcttcttccatagtaacctcactgggctgtgctatacatctgtgtcatgattttatacaaacttggtcccatcacatatttccattgagaaggtttaattaaagcaaatgcgtcgatttccgggaaagaaattccattttcatctttatggtaagctgtgcaacagcaattcttaaacacttctgggctcacagggagcatatatccaaacaaatggatatccttattgctggcataatcatgtcgtccgaggtcatataagaggtcctggtcaaacccagtaaaccctgtttcttcctggcattcgcgaatagcagcttcttttggtgtttcaccaggctcaacatgtcctttcggaatatcccatctagagcctctgccctggacatatgtatttgtcatacgacccatgaaaagccgtttgtcatcggtaaagaataagattcctgcactgagctctttcattggcattcattccaactttcttcaagaatatcttccatggcagtatagaccatagactctagtacaccatcacaattatatgaaccctctaccgagaaatcacagataggtccattaataccaagcagttcttctttaagtgaaatctcgataccgctcagtgattcattatcgctgtaacacagaaggcgagtatcaccattttcaaattttacatgcactgcaacagccattatttcatctccttaatccaggataaagtttcattacgagaatcatctttagatttttctttctttactttgggcttatcaaatacgccccgctgtcgctgggaaacgaattgcaaccaacgagcaagcattgcaaaccaggttccaacccctgacatccaacctagatagtacagcgtatcaccaaatactggtgaaaagaagtagaacccccagaatatcccaacaccaacaaatgttgagaaggaaaacaggataagcagaaataggaagaaatacaagaaatcatcatctttaatcattccacgataacaagttttaatcattttctgcagctcctaatccaggtgttgaaatcttctttttctttccacttcttgtatttcatacggtaagctaaaaatgtgcagcaattaatcaacgcgataattagcatccacatgaggctgaatgcgaaaacacctaaaaataaaagcataatcataaactctgagacgttcaatccaaagaatgtccctccaacaattacaaaagcacaatataaaatccatgtcacgattccaaaagctggcgccagcccatcttggttccaaaacccgtcaggtttacattcattcattttcttctcacctctttaataaactcaaacgactttttgcggttccattcaagagttaaattcttgcactgttctttccattcagctttacgcttataattattgcgagaccatttaacccatcgggaacattcaattaatcccatgatgagcaaactagttccccaccatgcaagcagaattccgaataacactgccggtgtaatatcagttaaatgcatgatatcaatcgcggcaaaggtacacattgcgccgacagttgcaccaataccaggaacaagggcataatcaatctgatcaaatttatagacataattataaacgggaggttcacttggcagatataagttactcatttctgcaccctctcacggcagtatttgataaattcatcaatgattaattgtttgcctaccatgttgttagagtcaaacatacccatgacttttggtggtaattcattaacacagtaatttaaataattgctataatcatcctgagatgtcacgtatttaaccagattaataccgagacgataactagttttattatagataatctcgataactactgtatatgttgtggagctagaagtaaaatatccatcggcattagtacgagctgatgttagatttgatggagaatcgttgaaagaataaattccgtaccgaagtgcaaagatatctacaagcttaactccgtcggaaatagacgaaatattagaaattaagtttttcagcttggaatagtctttaagaacgatagcccgcggtaaaactgtggtgttatacccgttatagcgagttttccaattttcaggccgagtatcagaataagcaaatttctcaagaatatcagtgatttcttttgggaatcctgctgcaattaattctttaatttgaggtgttgccattggaatatctccagcgcattcatataacattttattatccaagttaggggcccgaaggccccgataaaattacttcagactttccagatattcctggacatcagcagtggtggtttcaataccaggctgagtaccgctgaaggtttcaactttcatcatgatgtcttgtacatctactttagcgagttccgcgatttcaatcacgtcatcagcagaggtaatacccagagcagaagcattacgggtctcacggatgtattcgagtttcactgccaaatcaagacgttggtcatcaagcttaactacggtttcttcaatttgggctcgcatttctttatattcggcagctttatcacgtaaagccttagcagtacgacgatacagaagacctagtttagcatgggtttctacattcataccttctgccatcaagcgacgaatttcacgctctttggaagcacctgcctggtctttttcgtcagcaagtttcagcagacgcttttcttcatttaccgatttaacatgcgtggtacgcagtttagtgatttcatcaataatacgatttgccgcagtggtatactggtcttcaacagaagtgttctgtgcaacaaaggtaccgaatttagaacggatgaattcaacaagttttttcagaatagacattttatttcctttcaatagttatggtggttttattcgtacggattaatccaatcataaacatatggtttaatgattagaccctgttcatttttgctgcgctcgaatatctcgatgtaatcagtaacgtatgactctaacccgagaataagaacagtttctttgccttcttctactgttgccttaattaggcgctcgatagctattttagcttcaagacgtatatcagcaagagtttttggaactatatttgctgtatccattactatttcctcagtaggtggggagttcattataactccccaaaattattagcagttaattaccgcttcaattcgtttggttaaagcactagcagtttttgcgaatttaatttgaacagtttcggtagcagcttcttcatggtaaactcgaacgtagtactcttcaacagcaggccaatctttgcgaacatgcttaatcaaatctttcagttcacgagtttctgctacgttgaacactgcgtgttcatgttcacctttaatccaaatcgcgcgataacgatcaggagtaccgtaattgttataaccacgttcaatttggataaagttgaatttagacattttattctccgttactctgctttgttttgatggagctatagtaaccgagttgatagaggaagtaaacaactttgtgcaaaaattttagggcatctggaggaactttctggaagttagaatggatttatacagccggggatacaaaaatgccctagatgaattctagggctgtaggattacattttattatacattgtacgataattctgtctgacgactgagttcaacaaggtgatgattcagtttagctaaaagcgttttcacttcaccgatatgctgagtttcacgtgcagaaggtttagcaccttgggattcacgatacttccacagattatcgaaatagaattgaactgccttataaagaggaccattatctcttactagcggaagagctttatcgatagctttaaacagttcacctgaaccaatgatgtctccatggtctccactaattttaaggccaggaatatttttaggtttcgctttaaccggagccggttttgcggccggtgcttgtgccggagaagctccacgtgcaggtgtagtaacctttccgcctaaactttcaaaggcagctgctaccttagcatagtctttaggatcgctaatcccaataccataaatcttttccacagaagccgcaaatttgctaaaatcatggcgttcaccacgtggaaccaataccagagcgtcacgccatttcgatttagtcatgcggccaggagctgcttcaaaaagctcttcttcggttaaaaaatctttaaatttcattgcaaaaaaatccttagtgtcgattaaattactatttatactaaaaagccccgtccgaagacagggctctaataatcgacagcatcacccactggcagatgacctgcgaaattcatttctttggactcggaggcatcagtctcatccaaagaagtatagcgtcaggaggttatgcttgcgacagtgaacaaccgactagcggcaatggacgaaccattctcttctatctgacgactcaacgagggtatacgcaagtttcccttcgaattacattacatcgtattcttcaactagatactgataataggaatcgtttgcttcaagttcttccgcatatgatgttgcttcggatttagtgtgaaaaatcttaagaggcaaagaatattcttcatagccatattcacagttccagttattttttactacagcatatactttcatattttcctcattaatttttggtatgggtaggaatcgaacctacaagccattcagcaccagggcctcacgctctacctatttgagctatcacataccagaatttggtgccgattgcaggagtcgaacccgcggcatcttcattacaagtgaagcgctctaccaactgagctaaatcggcatatttggtgaagaattacctacgtcactaggttggctgttctgtccacttaaggcttgcagcaggaacaccatggcttttcaccattgatcctctcacgactgagacattcttcataatttggtgcaccgagagggattcgaaccctcaatcctcgcggcgggagattttaagtctcctgtgtataccagttccaccatcgatgcgaaatggtcgaggcagaaggattcgaaccttcgacctgcggattagaagtccgctgctctatccagctgagctatgccccgagattgttcaggcaggacttgaacctgcacgactgattccgtcagcgatttaccaccgtcgccagcatatgatgcaatatgcgagctcaaaaggtgtccgtcaccatgtctaccgatttcaacactgaacaagataattatattactgattatttatagcatttcttaaacgataaagttgattacagaattcgcgttcagtcaaaatcgtttcagaaattttatttttacccatactgtgagtgagcgtagcattccgggtagcagccaaagcttttctgaatccttcatttttactaagtgcatcgtatgctcctgttagtaaattctgatacgcttctgaggcacggtgaataggaacacctttccaataaagtgtttgagttggccaccaccgtttctttttacctttgaacttagccgatttaccaactaatgtacatacatgtgcttgcatttcaggcgaagaaaatttgagggactgcaagaatccctccattgaggcacattctacgccatcatagataaatttatgaggagcaaaattactcaaagcacatgatggatatgaactacctgaaccaatatccattacttttccttcacgtatttcaaccaatcaacttttaatgggctttctttctgcttatacgtaattccaatatggaatgcaaccggagcatcaggaatacgaatttcttctttaatgtcaaagatttctactttctcaaatactcgcatgaaatcatagtcatattcaattggattacctagccaagcctgaatagcatacataacttcatttgaacaagaataatgattatctaaataagcatcaaactcttcgtctgagcaatcatatgcaggaacatcaacaccaaagaatttcttggaaaattcaggagttacatacttctgttcagtatgaagcttttcaagaattgcttcatggttgtaatcattatttccaaggtattcaccgcggcgaccattagaagagaaccattcaagaacgtgaattacttgattaatctcttctttttctaagccataaaccatttgggtagaataccgatcggcatcattttcccaagtggtaattgccattgctaagcctttaggaataacttgtccaaatttaatatgcatttcaatttcctcagttgataatttggtgaccctggcaaagactcgaacatgcaaccaatcccttatgaggggaacgctctaccaattgagctacagggcctttatagaaatcttatgacttttataaaagccctccgaagagggcgccttgtcgggctatccacctgctaggcagaattactcacacataaaatcagctacttcccagaagtcattttcaactgctactttaactaccggagaaatttcagacgttttaatagaaacaattacatcacctgcgacagtttctaccagaccaacgattttctcgctgcgagcaacaaatttactcaccggatggaatttgccggtagcagcgaacatagcttcttggtcaacaatcagtgcgatacgtttcattctttttccttgtttgttttgatgtagtaataataacaggttattcttgtagcattaaatctcgaaaatcgttccgttttcccacattgttgcgaacataggagaaaccttaacgaatgatttgcttcgcattgcaacgtagtcgttatctactttagccaatcctgaagcaatatcagtaatacgaccgcagcgcatagaaccacgaccacctttattatatgtacgttctccgtagaaaacgatatcgccaacttgtacgtctcgacctttagaatctttcatcatatttcgcctgataaattcgtttaaaatcagtaattagctcttctacatttgaagcattagtaaacggaataacttgacgcagtttacttactttacagccagaatgataagcaataacttcttgaatatcacgctcactgaagtactcatatttgattaatgcttcgtatctgcatttaatccagacccacatacctttgcgttcatcaaaagtatatgcaaaatcagcatgaagcattaaatcacgttcagatttacataatcctaaagcaaaattagttggacgattccattgtaatttcaccgtaatagcatttactttattcgcaacaccaataaaaatattcattctatttccttcgcttgtttttggccttcttgtcgtgcacgagaacgtcctgctttatgcagtgattcgtaatatgctcggcgtctatcaatgttttctgtacgatatgctttcccgaaatgggatgttttgaagccgtaatatttcataatataattctcaatggcaagcgattggacggtatgcccggcctcgaaccgagtcacattgactttgcagaatccatgtgtttaatatatcacccatactcgatagcatatctgaacgagactgcaatcccgctactcagcttacgccatcttgtattgtgtcataccgttaatttggtctccatagaatgactcgaacattcgacctctccatcccaaatggagcgctctaccagactgagctatacggagtaatttggagcatccaaagggaatcgaacccttatcaagtgagtggaagtcacctataatagccgttatacgatggatgcaaatttggcaggccctgaaggaatcgaaccctcatcactgggtttggagcccagcataatagccgttatactaagaacctgttatttggtgggagtaactggactcgaaccagtcaccgctcgattatcggtcgagagctctaccaaatgagctatactcccatggaaagctaatcatctgattgttgatgtaccactgctatgggcagcgtttaactttcataaatttggcggagagtaaaggagttgaaccctcaccgtttccgatggcccggatttcaagtccggtttgctaccactagcgctactctccattaattggtgaaggaagtgtcatatagacacaattcgcttagcgacagccacagcgttttgcggaccgtgtatttttccaccattccttcattgttggggtgaccgatgggagttgaacccatgactacgagaatcacaatctcgagttctaccaactgaactacggccacatcaatattcactccatccatcatgaggacttcatacgaaattaagagaagaatgatcagttcaacccctgtagacgcgttgaatgaatattaatttggctggactatctggattcgaaccagagataccggagtcaaaggccggtgacttaaccgcttgtctatagtccaattatttatttactaattttcttcctttataccatccttctggtataggggaatcttttgaaatctttttagcttctattccattattaatccacattgtgccaaattgtgaattttttgaaccggattgagctagtttcagtttatcagaaatttttcgtttagtttcagaagagtgtgttttacctaaaaacggatttccatttttagctatattagctttaactgcgtctgcaatgcgggaacgtgcatctggtgtaattccagatttaatcttatccgaaaaattcagtttaaatttagaatcatttctaattttattactggttgaatttcctccaagtattcctcttgctttcatttttgacggagtccaatatgttgagttaacatagtcaaatccaccttcgccaccaagttttaaattatatacgtttcctaataaaaattctggtgtaactatttcagattcctttaaatacatctcctcagatgattcacaataatgaataacttccttggtaaagttctcaattccgtattttagaattgcctttttaattaatacacctgaacccatgtagccatcattgatgtcatcagttttatgggctccaacataatatttaccatttacgttattggttattttataaatcaaatagtacataaattattctccataccaactatgtgataattatatcacatggtacggataaagtaaacaaaagaggcggaggcaggactcgaacctgcgcgtgtcgggatatgagcccaacattctaccaactgaagttaccccgcatttatccgggttcttgaagtactaacaagtagcttgatgtagaacacgctaaagatataatcttacgaatatagagcttattccgtgggaacaaacagcttcgtcctcggcattatcttacaggactcaaactcatcttcaagaactgccacgttcttatttggcggacctaacggggatcgaacccgtgctctctcccgtgacaggggagtattttaaccaactaaactataggtccataattcgctttcagagatactctggcacgatgccgaagcaaaggggaacagaactctcatcaccttggtaccagatgaatcttgtttagcactctgttctaagatgtatccctgaaagcgaactttcaacgccgtaagaaattataagcacgtagttatcgttgagggaactcgtacacagggaattctatgccgacgatttatcagaacgtcttctgacttcttcatttggcgggccgtgcaggtatcgaacctgcctagtcatttctgacacggattaacagtccgtcgcttaccctctcagccaacgacccgaattggtgggacaccgaagatttgaacttcggacacccggattaaaagtccggtgctctaaccaactgagctagtatccctaaatttggtggggagtgatggagtcgaaccacccgagccttttgagcaacagatttacagtctgtcccgctacccctacggtctaacgccccaatggatatttttatttatactgccctgaaattaatcagagcagttgatagattaataataacaaagaaaacctaaagcatattacacaatcggtgagctctttgatttaaccaggaataccctatgcggtgaatccatatgagagagcaatacccggtgctcaggaattggacttgtatggaacggaaccacacgataacctttaggcgtaaatcctagcaaaataccaacgcttgctgcagaaagtgacccgccgcaatagtatgataccaaatcaccaggctggatttcattgtcaagagaatcagttttgacatgcttaggcgtaactaaatcattaggaattggaacgccttgtgcatcatagtattcatgggcaagaagcttataattctcttgatagaaagtattaaacgcagctctgatattcatcacaatttcctcacaattaatctttgtatgcttcagttgaacctttagcaacggtctcaaatcgggaattcagtatctcaaaatagtcttgatacgttccctggagggcttcatagcattcttctaccgtagagtagacacctctgatttggtcagagccaggagcaggataataattagaccaagttaaaagtgcgtacattacttacgtttccagctgtagtgagccaaaataagaagcactgcaatagcaagtagtgatgaatgcagtgctgccagtagtgcacctagtcctacacccaaagtaacataatcatacttagttacttcttcacggtttaaatcatagtttttgatgaaccactgcttaatctttttcatgtgctattttatccattatgaaagaaatgatacccattagaaatgcaacacttaacactgatactgtttcaggaagagacataaaggctgcacctataatgccaaaacctaatgctcccatgcagattgttgatgcaacatttctaattaattcacaacgtttcattttattctcctcaagttgatagggttatagtatcactactacaacccgttgtaaacaactttattcagcgccagcggcttttaaaagctttttaagattagcagaacctcgggctgaaaaagttaccttaccatctttttcaccgatgctgccagtcaatttagaaagtttatcactaggaacttttttaaaatcggctaatgtcccgtcaacggtttttgtaacaatcggcagttcatcatcctgtcttttagcttctgtaataaattcttggtacgttttcatgttgcttccgttttgttagtttgtttttgatggagctatagtatcaccactaggaccggttgtaaacaactttgtgaaataaatttctatttcaaatcttctgaccagttcagttttagtggctcttggtactctctatcaagcactacaggtacttgaacttcaccctcgaagtgagctggaccgacattgtagctgagagtaatgtgcggtgagtaatctgggaaatcgtgagttgctcccagagctcttgcatattggtgacggaattttaagtattctgaatctagtttaagaactagtgtacgtccgtcttgcgtgtcccatacttcaagtttacctgatgtagcaacttcaaaacttcctgaagcgcaaacgtatggaacatgaactcttgaatagcatatcgtcgtatgaatcttatgacgaggtacaggattagggaccttcaactcacgctgaaggtcctcaatagcatcaagagttttctcagagaatttagcagctacatatagaccagtgctaaaatcactgaagttcattaggcatcagcttcttcagtagtttcttctgcgaactgtgcttcgatttttgcaaccaggtcatcaagtttaacctgaccgtcttcactgatttcaacgccggacacagcaatcagtttctgtagtacttcttcatactgtgcacgcagagcggacagaccttggatggtttcagacaggtcaaatacacgaactttcaaagtatcgacttgggcttgcagttgttcagtagtcatttttgaattcctaatatagtgttgatttttgaataaagttcttctagagaaccgtcgttagttattacgatatcgccttcgcgaatcggaagtccacgctctgtgacgtgagtatcttttttagaaccttcttgctcaggacgaactacatgaataactgtagcacccatcgccctggctacatcaagttcatggtcttggcgggtatctgggacaatgaaataatcataatcaccaaaagtatcagccataaccaaagtgaatcgtttcacccaatacatgcgatcgagcttatcacagacaatgtcagtcccaagggtctgcatgagacgacgaattgaccatggctcaacaggtttatttattacaacttgacggatgacttccatcgtatcgccgtcaagaattttacgcttgctatcataaaccaccccaggtaaaggcaaatcatgatggacatattcaatagcattcgccataatacgaatcacgtctttagtagacagatttaaatcctgctcacgatcgtaatcaataccttcaatcattgaccgagtaatgcgaggaaactgacgtgatgtatcgcgataccactcagtaagcattgcatcagccaacgcatctttaattggacctgctaactgatgctttgttgcgttatagttatccataatgtagtcagcagttgtatctttgccactacgttttttaccaatcaaaaataaaagcttcaaattattacctcatagaaggatgcattcccataactttctgttgatactgggattcgcgagtatcattgacagaaggtctaccagtaattattataccatctttttcaacttcaatgtatttgtactgcaaagttgctacacataccattgctgggtcggattcttcggttaaagaatactcaatttcagataaatcactcacccaacctccgatgtagcggacagttaatactatatcatgtttatcgttatcaagaacatgcattaaaactgcaccaggaaatccttcaccgccgttattccatccagacttgtctcggtcaatgtagttttgacagcttaacatccatttgtacatttgtacccatgaatcaagattttcatctactaaaaatctaacaggaacagcgtcaaactcaaaagtagacccaggcaatttagcacgatgcatgccttgaggcgaacctacagtatcagtagcaggaatatgaattccaggaactacagctgtttgaagattagctttaaacgcttgggtgaggcccccatcagggacctctaatataaagttagttgtgttagtttgattaaacagtccagtagacattatgatttccatacagaagtagcagagtagcgtttgcctttcgacatgaactgctgcagtggtaacatgactacattcgcccaatcagccggttttatctcaattaaagcaccctttatattaccaggaatatatgctttaatcattttgtcagcgccagcaaatcctttaacttggctccagtttatctttaatctggtcttattagatatcactggcgtattagcatactgtttaagaagttcttctaaaaactgctgacgagcctttggcggaatgtagtgaaggtttaacccatacatcaatgtggttgtaccttgctttccaagaccaagataaactatcaaaggaaatttatcccagaatggaagagtgtctttgtgcttagcgtcatacatgtaagcatatagctttccaggttgaggcttggttacagaatgaccacgtatatttttctttatagtttctgcaaaccatttagcagatttattgtttactgctgcgccttcattacgaattttatctttgatagagcttcgaaatgaatttaccatcacaagagcacgctcttgtttggtcattttgttagcaggttttttctcaatttctgctactttaattgccgttttaattcttgatgcatgacgagccattgctttactgaacgtagcaggatttattcctttgctttcagcgaatgatttagacgtcatgccttttttacgagcagcagagtattcaactcctaatgctacccattgattttcactacgggatttagctttaggcgattctgcagcttcagtgataaattcaaatatagccatcagcctttccatcctaattttttaagtgaatcttcggtaattaacctaaattctatacccattttactggcagtagcttgagctgctttccacttatcaacgtttacagaccaagtgtaaatttcatcaatgtaccgtttcttcgctgatgtcgtcaactttgtgggtttgaccggaggtctagtttctttctttggcttaacttcaaaaaagaactgttgaccattagaaaacttagcccagaaatccatgaaataccggcgtttctttccatctgcattactaaagtatggaattaccacgcactctgaattccattggactacgtctgggtgattatctaaccaccgcatcatgaaattgctcccaagtagatcgatatgtgatcttacgagggtcccccttatatttacttatgttttttggtaaaaattttccgctataagccattaggcttctccttacatttatcaaaatgccagcacttcattccacgaggttttcctgatttaccacagtgaggacatgttactataggctgcaattctgaaacagctctaagctttgctcgtgtttcttctgatctcttctttccggtgttagctaaatttaatttagtttggtgctctttagttctatttttggctgcagtagacatatttttcttcatggtatcactttttgaaatacctgtcatagaaatactgcgcttttcatttgattctagcgtctgagactttccagtaagagctgcagacagtttagctgaccactcctttgaccttggacttcgcttctttcctgttaatacggcagagttagcaatagaaacccttttgcgaatccattcatatgatttgttatttcttcctgctaatttagaagacattatatgaactgcatatgataacttatgattatttggataaatcttagctaaaagctgatgcgccacataatgctcagctgctgttaagtccacaaggttatctttatcatcacttccacccatgcatcgtggcacaatgtgatgccgttctttgtacccttctaaattgcgggatttgcctcttgcaattagttggtcataaattttacggtaattcatgctattctcctaagtagttagtagggtaataatatcataaaccactcgtcatgtacactacaactttataaatactgttattaatatttataagaggataaactatgctcttctcattttttagtccgatagattattctgcaaagaccgtaaaaggtgctaaggcaaaagctatcccaaccgctgacatatttcgtaattatcgcaaatatttcgacactgtagcagaaaactatcttttacaaacatattacataagtggagctcctagaccagaagaattagcatatattctttatggaaatagtcagttgtactggattcttttaatgtgtaataacgtatatgacccgtttagagattggattaaaacccaggatgcatgctatcaatttgcacaacaaaaatatgcagatgtaggtggagaccaaatactctatcacgtggatgcaaacggcaatcgttattataacctcgagcaatatcctgaaaattcaggcatttggtatgataaaggggactttaatcatcagtaccctcaatatactggggctttagctggtgttgacatttatgaagactctattatagaaaatgaaaaactgcgccaaataaacattatcaatcctagtgatattgaagcatttctttctgatattatacgagaaatggaaaaggctcctgacagtgaatatgaatcaggtcgatataaatcccagaccacaattggagaagttgtatgattgaaatgaatgattcgttgaaatggtttaccggtgttgttgaagacagacaagacccgttgaaacaaggaagagtgcgagtacgtgtttatgggcttcacccatttgaaaaggtgcaaggagctataacaggtcttcctactgaagaccttccctggatgtcagtgattcagcctaccaactcagctgggatttctggagttggctcatctataaccggaatggtagaaggaacatcagtgtttgggttatggcttgatgaattcaaaacagcaggactagtaataggaacatattctgcgcatagaaaaacgaagccaaactacacggaaggcttttctgatcctacaggccaatatcctagacaggtcgggtcagataccaacccactagttcaaggcgatgaaactgggtatagtgctataccaaatatcattcaggacagaaatttagacattggcattaatcctgatgatgctgacttaagtgatattcctgaagacccaaatcctgcaattacaataacagatatgcttaatagggatgaaggtcttagattgaaggtctattgggacacagaaggatatcctactataggtattgggcatcttatcatggcgcaaaaagtacgtgatatgtctgtcattaataaaactttatctaatcaggttggtcgtactgttacgggaaatcccggtatcattacaatggacgaagcagtcgcgttatttaagcaagaccgcgataaaatgctttctgatattaaaacgaattcacgtgtaggacctgtatatgctaaagtcaacaaatcaaggcaaatggctttagaaaatatgagttttcaaatgggtgtaggtggtttagcaaaatttggtaaaatgcttgatgccatgctcattggtgattggaaaaccgcttatacagaagcaagaaactctgtttggtttaatcagacaaaaggtcgtgcttctcgtgtttccatgattattctaacgggtaatatggaatcatatggagttcctgctccaaagccagaaggaaaaaacctgtctgctgcttacgtagaaccaaagtctggaggtaatcctgaagacccatggactccggaagattcaagaattcttttcaaagaacctgagtcttcatataatggtcagtatccatatgttcacacaatggaaacagaatcaggtcatatccaagagtttgatgatacacctggctatgaacgctatcgtattgttcacccaacaggttcatacgaagaagtagctcccgatggacgccgtaccagaaaaactgtagccgatttatatgacatgactcagggtgatggaaatattttaatctctggggataagaaggttaacgttggagggaacgagacctattataacatgtataatcgtcgacagcaaattgatggcgataacacgctttatgtacgtggaaatgaaactaaaactattgaaggcgatggtactatttttgtcaagggtaacattaagatagtcgttgaaggaaatgctgatatccaagtcaacggtgatgccactactaaagtagatggcaaccacgacgtaaccgtcggtggtaacttaacttggcaagtagcaggtactgtgaattggaatgttggcggggcttggactgagacaatggcttctatgagctcaatcgcccaaggtcaatacactgttgatggttcacgaattgatgtaggttaatcatggctgatatacttcctattaataccacgttacgcgaagtaatagaaggtgaatacgttgagcagtactttactgctcaattatctaccaacgaaacattaaaatcaataaatattatcgactatcaaccagtatctgatatctctgtgtctgaaacctattataaaggtaattataactcagtttttacttttggaaacgatgtgcttaaataccgtgaaggcgatgagctgaagtccgcttcagcgtgggaggatttacctaatcccaaaactgctgatttatacctgtggaaagcccccagaacactagagaagacatttacctatacagttgagataatatatacagtgacagaagaatcgtctggaggttcatccggaggttctagtgctccaatcataacagaacataaaaagcaaaagatttactctcaaacagttaaaggcaactggagtagatggggcgaccagcttcgtgcttatgtatatgcggggaactaaatggctggactatcatttaataaatgcttaactgccgggcatagtgcgtatcctccgacagaagtaaatgctacacaaagtaaagtattcactggtggaatagcggtattagttgatggcgactcaattaccccacacaccaagacggttgaccctcatgatacgcatggaggagttgttcaacctcgcacatccaaggtatttgtaacaggcaaaaaagctgttcaaatggccgatccaatttcttgcggcgacactgtcgcgcaatcaagctcaaaggtattcatacactaatggctattaaagaacctttaaattatcagttaacgcgtactgcaaacgctatcccagacgcatttactggagcaacattcgacgaaattaaaaatcagcttattaactggcttagtggtcaaaaagagttccaagattttgattttgcgggttcgcgcttaaatgtgctattagatttattagcatataacacgctttacatacagcaatttagtaatactgctttatacgaaagctttattggaacagctaacttgagaagttccgttgttcaagcagctcagcaaaacgggtatttgccaagttccaaatcagcggctactgcatctattatgcttgaggtaactcatccaaatccagagccagcaataaaaatacctcgtggaaccaagtttttagcatatgcacgagattcatcagtagacccatacaactttgttgttaccgaaaatgttattgctttaagagatacttcagcaccagaaggagttaataggtatcttcctattgtcaatttggcacaaggacgtattattcgtactcaattgtcatatgacccgaagaaacctattgttattcgtgatcagtcgattgaccgtaagcaggttaagctgtgggttgatggcgctgaatggactaactggacagacaggtcaatggttcatgcttcatccatttcaacaatttattatatgcgtgaaactgtcgacggaaataccgaattcttctttggtgaaggcgtggcagaagcctctgtagcaggaggagttcttgaaagtaatttcattggtggattaaaacctactaagggcgcgcaggtagttattgaatatattcgtactgatggtgaatctgcgaatggcgcaactgatttcagctatgctgatactctgcaatatatcgtagtaaacaaaatcattgaaaactggtcagattctcctgattatgttggagctgatggcggtggtgaacctgaagacatcgagcgtattcgtgagctcgcccagattaagcgcgaatctcagatgcgatgcgtgtctaaaactgactatgaatcattcgttagttcacgctttggttctatcgtacaagcagtacaatgctttactgatcaggacaaacccggatatgcatttatcgcaattaaaccaaaatctgggttgcagttaactgctgttcaacgagaagacattcaggattatctaaaacctttctgtcttgctccaattactccttcggtaatgagcccagattacttattcattcgtcataatattaaagcttcttatgcgctgaataagttacaagaatctgagcagtggttacagtcaaaaattatagactcaattaatagatattacgttgatgaagttgaaatgtttaacaaaaatttcagtaaatctaaattattgacctatattgatgatactgaccattcaatcatcggttcttctgttgatattcagatggttcgtgaaattgtcaactatttcactcttcctagcgcaggtattaaatactataatactattactccgcggacgttacgttctggtgatttggtctttactgtcactccaactgcagattcatatccagttaatatcgttggaactgacccagataaaaatggtaaaggaaatatggtcattggaccatttaaaccaggtgatattaaagagaatactcatattcagccatatactgaagacgattttgatagaactactaatggagaaagaactcgttggtacaaaatcggtgaagtagattattatggtgataatatttactggagccttggagctattggagccgatcctcttcagtttgaagaccagagtattgagctttattctactcctacccaggatatcgtcttcgcccgcgatggaacacttatcgtatttgagaatgaccttcgtcctcaatacacaactattaaattggagcctattactcaatgacaattgcaccgttcgtcaccagcttacgaattcataagctatctgcgaatcaggtcaatattcgttgggatgacgttggtgcaaacttctactattttgtagaactggccgaaactcgaaacagagcgggggaagttatccccgctgataacttgagttggtcttcactgggttataccgcggataatgattggttcgaacaaaatcgtattgaaccgcttacttattataaaatgcgtgttcaaactacgtcagcagggtttgagccgtctgaatgggttgaaacagaagagttccaaacttttgaagaaaacgcatacacatttgagcatatgcaagaattcagtttagtgaaagaattcattaaacagaagttttctttaaacaacatgtcgtatgttaacttcaacacatctgccatgatggcatctttgatgactgagtcttttcagtttagtcctgaatattctcatttatcagctattgaaaacttcgttgtaggtgaatctggatatcatgaaattcagggacctattgaagcagtgtgtgttgataaaaatagaactatgctgggagaaatagacggaattttgtatctgtttgaaagattccaacatatggttaaagtatcaaatgataaaggacagaattggcaatacgttcagttatttaatgaccgtgtcggaaatccggtttctagagtggtaatttatcaatctaaaactacttcttatgttttaggatatgataaaatcttttacggaaggaaatcatctgacgtacgttggtcatcgaatgaagttaagtttagcgataacgaagttacatttgctaaattgggagaccagttaaagcttggctttgaagtagagttattcggaacgtatgcatcattgcctgctgacgttaccaaatatgctgaagcgtttacctgcaatgacgactatttgtatgttgttgcaaaagacactgtccgtaaagttaaattaaaagatgctccaatagatactgaccctttaagcccgacatttggtgaaaaggtatttgaaaaggaagtatctcatataacaggcaatcctaaatctgtatgctttaaaatggattccgttgggggcaaaatctttgcccttattaccggggaagttaaaaccttaggattagacccaacagacccaaggaacgttgtggattctgcaactaaaggcgtctatgtttaccaggaaggcacaaatacttggaagcgtgtatttggtaataccgatgaagaaaaacgtcgtatagagcatttatggacttctatgtcaactgacggaaaggaaatattcttttcatcagccaattttaagacaacagagtacgctcaggatattgagcttgagacgaaatatccagaactaatttctaccgcagttaaaaatgttaacccaattcagtatcactctgataagcattatcacatgatgagtttcagagcagatgaattttcaagatgggaaacatttgttcctggaccgatgaggttttatgctgaaccttggtttgtctggatggctcgtgaaggcaacagatgctggataagtacagctgaccatgcagttgtcatttataatgatattctttatcaaaaaagagtagatacagcagcacagggaactaccgagcgcattctttcggaagtgtgggataaaggcgacgcaacgttttattgccctccggtttcatttaacggatttttgcagtatgcttctggtatcatgtttcacgagccagatggaaagctgataggttattatgcattcgattatcgtgttcgtgaccaggtaacgcttaactggaaaccaactgatgtaatgtttaaggcgtttctgcagaaccaaacccgtgaagaagattggactcctgaacatactccaggcttgcgtgacccggatttacgtccgtatcttactaaaatgatgccggatagttacttgctacaagatagtaattttgaacacttttgtaagtactatctccaattcctttcagatggaaatggaacacattacaacagtctcgttaatcttgttaagaacaaatatcctcgcgaagaaaatgcatgggaatatctgtggtcagaagtttataaacgcaacatttatctgagtaaagacgctcgtgacgctgtcgtccgtttctttgaagcacgcaagaatgatttctatgctactaaaggaattgaagactcatataagttcctgtttaaacttctttataacgaagacgtcgaaatcgatattgagtcaaagaacactaccgaatatgacattattgttgaaagtacaaatatttctgacgatttagttggtcgtacgatttatactgcttccggtcgtagtaatgtgacttatatcgagagagaataccgggatggtcgtctgttatggcgtattactattcataacttatcaggacggttcattgaaggccaggaaattaaatcagagcgtacggactttgagggtattatagttcaaggtgttcgtggaaaggatatgctgagtaataacattgattatataaaccgcagccgttcttactatgttatgaaaattaagtctcagcttcctacttctcggttccgcgacgatgtattaaggtttgttcatccggtaggtttcggtttcattggtataacattgctgacaatgtttatcaatagtggcttaaatatgaagcatgttgagactatcataaataaactcaagaactataaatgggatgcaggactgccatcagtttatcctgatagagttgctattatcgcttcagatgatacaatagaaagagacccaataaccaatgagcctaggtattcttcacgtgctcaagctggtgaacctttcccgttacctgctaactataatcaagaaaataacaatagtgttatcgctggacaaaaccctggacaacgacgtaagccgttaagtcctacgtttgaccaatcagcagtaacgtttgctaattatcgcgatttagttaaccaacgtcttaaagacgatgcaggtaatcctcgcgatcctgaaaatccgacacaggtaaaaattgatgagtaattcaacaagagcaagttcaacgcgtagcacgatttatcgtgctatcattacatctaagtttagaactgaaaagatgtacacattttataaatcaattggtccgggaacggaccaaaacacgttgtatgtttcatttggtaaaagcactccgtggtcagataacgaatctgaacctgggtttgcacctccatacccggccgataatgaagacggtgtggttgatatttggacaaatatgatgggtgcagtcaaaattgaatcatctatgcttgactgtgttgttccaagaagagactggggagatacaagatatcctaatccacgcacatttttaatcggcgatatcgttgttgctaactctgcgccatataacagaactgatgctggatttggatggatggtatatagatgtattgatgttccaaagaatggaatgtgttcaattggtaatcttacaagcaaagaagaatgtattaagcttgggggtaaatggacgccatcaactatttccggttcagcgcctcgtgggcgtggtgatgcaaatggtactgtcgatttgggcgatggatatctttgggaatatctatatgaaattccagccgacgtatcaattaacagatgtacaaatgaatatatcgtagttccttggccagaagagattgaagaatctccagctcgttggggatttcaaaacaacttaacttggcaacaaaacgactttaacctaatctatcgtatgaagtgtaatacgattagatttaaagcataccttgatgcaatttattttccggagtttagtcttccgggaaatactgggtttaggcagttgtcaattataactaatccgcttgaagttaagccaatgccaaattctcctaacgttaaggctgaaaaaggttggtatagcgcttctggtcttgaaagacagtcaggtgaaatgatttacatggaaaatcgacaacctattatacgttcaatggaccaaacagaagagttaaatttaattttcgagttttaattatggggagcctttggctccccatttttatataaataagactatactttgatatgaggttaacctatgtatacagataagggtaaaaaaataattgacgtcggtgagattggtaatgcttctaccggcgacattctgtatgatggcggtgtgaaaattaatgataacttcgacgccatttataacgccttcgctgatcaacgattatttgcagccggtggtggagctttaaaccaaaaaatccacgcaacaagttattatcaaaagataaaatttggtgatgctaactcggccggtacagttccgatgggttcatgcatagatgctgattgctcagaaggggcagttcaaattcgtctttcaaaaggtaaagcgggagaagctgtattcgttgtaaatagtaatggctcagcatcaaaagctagatccataaaaataacaacaaacggcgaaggtgtagcagatgcatttaaagacggatcgcgagaattgattatcaacacaccaagatgtagaattgaattgtggtgtgttgaagtcaaagctaacggtgctgcagtttgggattattcaatttcaagtatgtttggcagcacatattcaccgttagaagctacatataatttaacaagttctcctattaatattcggcttggatataacgatgattactctactgttaaattgttattaagcttcagcgcaaatccaggtggtcaaaccatcaaaaggcaatcatctgaagtcatgcttatgattgacccgactattacttcatcagcgccaaacggaagagtatttgacactgaatatgcagtgttaagaagcggtgaatcatctgaaaatgaaaagatgtattctatttcatactctattaacgcgcagaaagatttaatatgcacagcttcaacatcttatggaaacgcacgtttggcagttaaagttattgctacacagaccgtaggggtatctcaataatgaaacaaaatttgatagtaggccaatctgtagatgatgggtctggtgattacctccgtaaaggtggtcttaaaattaataacaactttgatgatttatattcagagttaggtgatggttcagttccatttgcagcaggtgcatggaaaacttttaaagctagccctactggaactactttaaatgctaagtttggtcaggcctttgctattaatacccaggcagcaagagttaacgttcagcttccaaagggtacagccaatgactataacaaagttattaaacttcgtgatgtttggtcaacctggcgattaagcccaatcacagttattcctgctcaaggcgatacattaaagggttcagcttctcctaaaattttcaatactaacttccaagatttggaattggtttattgcgcccctggccgctgggaatatattgaaaataaaactgtagataagctaactaatggtaacttaagtactgtagcgaaaaaatcaattattgctactgcgggtcagactgactttcttaacatttttgatggcgtagaatataacgaagactcgcttaatgtatatcgtcgtggtaatattttatattacggtgaaaccagcgttatggataaagccaatgctgattacggttctcctggaacggtagcgggtcaattggtagaattaaacggtaaagacattcgtttaaaagttccatgcgttgaaggggaagtaataacatttgaaaccttcttagatggaattggtgtatatcgttcttcatacaacaagttagctatccagatacgagattcagcccagactacatccaagacgattcctgggtcaatgatagtagataaccttgctactctccgcagaatcactctggatgacatgggtgtacttccaggcgtaggggtaaatcctaactcgcttgaaatttcattgaacggaaaggaattactcgaagctggaactgcaggtcttcctttattttattgtgaaggtgcggaaggtggatacgcagaagactgtataaacaatggtggtcaatgggtaaattctaaccaagattatagactggaatttgactcaactggtactaacgtcgaagctattatttttggtgaggcgtttgaagataaagaccttcttaccgtccgttggttcaataataacatcggtactactatggatatcaatgatatcatggcagaaaccgaccaagtgtatatgaatgctgagcaattagtaactctaaaaaatcgcattgaatacacaaattatgatgaacctaatcagaaaaatatgcgtcctgtcgctgatgatgttatgattaaagtcaataatattgcagcattttttgacgtaatttatccgattggcacgatttatgaaaacgctcacaaccacgcaaaccctgctgactatatgggatttggggtgtggaagctttattcacaaggccgtgttactgctggttggaataatgattcatctgatccttatttttcgcgtaacaacaataacttaaacgaaaatggtcagccatcattaacagcaggtggaacggttggagatttgacgtttacattaggaaaagaacacattcctgagttaatgtcaagagacaaagttctaatttcagaccctgaacatggcagcgtagttattggcggatgtcaattagacccagacgcacaaggtccaggttattctaaataccgtgaagacactgttgcggtaaacaacggtgtagttccaaatgacatcactaaaattcagccaacaatcaccgtttatcgttggattagggtaggttaaaatgacgattgaaactaaaactcgtgaaggggctaaagttaattcaagattaactgccttttcagaatatcgcgtagacccgcagaatattgcggtaggaaataaggctcctatagggagcctaacctttgaacaaatggatttaggtgtttggtatccaaacactgaagctgctattaatgatttaatgtcattacagtcagcagaaattggaactattatttgtaatgacaccggaatatctccacaaccagcacagcaaattacacgcgctactttttcaggcgtagtttcgttagaacctaaagaagacggttctgttggcgacccagtaataattcacattcttggattgccaattagaattgcgaatggtgatgactttgcagcagtagctaccaggtggtatgataaggtaaaagaattagaagcagttggaaaagtggttcaacaagttactcaatcacctgcaactcctcagtatgttgatattattcatctggattatcagaaccataattttgaaacatataaaaaatatggtttaactgttgagtttactgttacttcacctgctaaagcgggttatggacaatgggacgctattggtaacgaaactaaaaccttcggtgcaaacacatttacattccactattttagaaggatgggataatggcccagaataactataatcactacagtgatttggccaaatatacgatatttgacccagcaaatacacaatggccagttgctacaaaagacgtccaatcagcgctagcgttgattggaagctgggcaagaactgacattggattacctgcagcatctccaaccgtagcaggtataattcgtacagctacgcaggccgaagttgaagctggaactgtaggtaatgctgcggttaccccagctacattaaaatccacaattacccggcctgaagcaactaccgcaattcttggcttaacccgatacgcaactaatactgaagccgcagcattaaccgcaggaaatagaactattacagctgctgctcttggccatgtgtttaaaaccgtaaaagcccaagaaaacgtagatggaactgttaggttaacgactgccgctcaagctcaagcaggaactgatgaaaccaccgcagtaactcctaagcgtgttgtagaaatgattggaaagttcagcgttaatcctcctacttatacttctgcaacagaaagcaacttgggattagttcgtgtcgcaacccaagcccaggtagcagcaggtgctgttcacgatggatacgcagtaactccaaaaaccttcatggcatcaaaagcgtctgacagcgtatttggtatagtaaaatttgctaaagactcagatgtggcttcagctacttctaacaatttggctgttactccaaaaagtctacaagcgttaaaatcaaccaaggataaatatggattaacccgattatcaggttctccaacatcagatgcttcacttgctgcagctgcgactgatgctgtctttaaaactcgcaaaataaatggaaaaacccttgataacgatataacaattaccaataacgatatcaattgttatacacgccctgagtcggatggaagatatatgccagctggaacgcgtgtcggtaatattacttgggtagaaggtggaacttatattcctgctggaaactggtttgggtgtaattctccatatgaagccacttctagattggcgctgactctcacaataaaattccaacgtaataacgacggctatgacaatagaatttggagatttagaataactgtcaacggggaaaatagaggagaacatacactcaatatagagaataccaagggcggtagaaatggtcattcgtggagatttgaaggatatgctacaggctcatatattataaatgatgttcctcctaacgccagagttcaaattgagccatttgaaaatatccgtggcgataattattcagcgtcattaacgttttgcaccaaccgatagggaattatatgacaaaattagtagactcgcttccgtttgtagacggaattccagacgattttcaacagagaattaactggataaaaaatacagagcctcttaatggggcttcaacccgctatggaaatgatggagaactgaatagagcttctgtgcagattcagaaaaatgtggttcaggtacataacgatttgaacaacgttggaactgctgtagaaaatattcaagtagatgtagaccaaatcaaaaaatcgttagaaattacaggttcttctgacgccattgagcaggtttatatcaataaaaagaatattgaaaagcatgatggacaaattcttaaattagaagaagacaccgaaaaacttcgaactgaccttgattttctcgaagaggatgtaggtgtttatgattctagtaaagatgattattacagaacagttcgtgataatatagtttgggttaaacgtgaaattggtgcgtatcctgggcaagatgttaacggacagcctaagcaagacgctccgggttctggtatgaaataccgaatcatcaacaatgcgtcagctatagtaaaacatgacgagcgtattcaggcgctagaggatgcatacaatgattcagacgtaggttctctgactattgaagtaaacgacctgcgtaaagaagttggtcctaaatccggagctacgtcagcttcaatttatgcaaggcttgtgaataacgctgatgctatttccgcagctaataatgaaatctttgctattaaccaagccattgattttaccaatccagtaaaaattggagctcgtactactagattagaaaacgattatcgtatagttgacgcaacacttaactctgcacaaaccgggttagttcctcgtgtcaataatattgatgctcgtttggggtcttctgataagcctgatactattgaaggaaaaattagttctctttcaactgaccaagggtacatttctgatgttgtaggacgtgatacttcatcagggcttcagggtcaagtagcatggataaatcagcaagttggtattgttcctggcggacagccgattcctccggggtcaattttagcgagaatgaccaatgttgaagggatgcaaaactctcagcagtctgctatccaggacattcaagtagaacttggcaataacagcgaagggttaaaaggttctgtatttacgttacagactcaaatgaatggtgacttttcgtcagaaaatccagttcaacgggatggtgtatacgctactgtagtagaattgcaagataaattcgtgactgcagttactgacgtagaacagactggagcatacctccgtaaacggggcgaatggtttaagaagccttcatcaataggtgaattcagtaaagaagatttcactgttgatttaagttctgatgcattggtaaatcctaactcattggtcgctgcttcatttaatgctggcattcgtattgttgatgatattattgttgatgacgatggcgtattttgtgtagaaactgatacagttatcgaagcttctgattcagataaagctgtccaaattgttattctcgtcaataacattgaggtgtttacttatagcctaggtgttaaagcagtaaccggcgagcaactgttgaaaaccaagaaacttattaagttttcgtctggcgatgcaatcaaaattgtgtatagagctgcttcagaagaatcaaaagttcctgttagtattaaatcattggatattactattcatccagcagtataatgaaagggaccttcgggtccctttttcgtataaatagaatataaagaggagcttatatgtcatacaacacatacaacccaaaaacgcttaaagacgctatacttcgacgtctaggagcgccggtaattaatgtcgaagtaactgaagaccaaatttatgattgtattcaacgagcattagagttgtatggtgaataccactttaacggattgaataaaggctatcaagttttttatattggaaaagatgaagctgacaacgcaagatttttaaatggtgtgtttgatttgcgtggtcgtaatgtatttgctgtcactcaaatcgttagaacaaatgtaggttcattaacttcaatggatggtaatgctacctatccgtggtttactgactttttaatgggaatggccggaattaatggcggaatggggtcaagctgtaataagagttatggaccaaacgctttcggtgctgacctgggctattttactcaattaatgacttattggtcaatgatgcaggatttgcttgccccacttccagactattggtataactctgataatgaaatgcttaaagtaatgggcaacttcatgaagggggacatcattgtttgcgaatgctggactaaatcatttatgaataccgacatgatggtaggtaatactgcaggttacggcttcgctggtgaacaaacttccgaccattggggcttaggagataggtatcagaatcctaaccttcgcaataacggccaatatgcaggtgaaggtaatacaaatagagaaggtgcttataataatcgttgggtaaaagattatgctacagcactgactaaaaagttgtggggtgaaattctgtttaaacaccaagggctacaattagccggcggcgttacagttgatggccaaacacttaaagtagaggcccaagaagaaatcgagaggctccgagaggaacttgatttacttgacccgggttgtcctattctgttggggtaaaagatgactacatttaattctagtttattcgctcgccttgaggattaccgaggatacaataaaactaatgagacagaaattctcaatccttatgtgaatttttataatcacagaaatagccaaacgttagcagatgttttatcagctgaggctattcaaatgagaggaattgagttttatttccttcctcgcgaatataacaatccggatttgcttttcggagaagacccatcaagtaaattcaccaaggcttggaaatttgctgcttacttagactcttttgacggttattctggtgataacacgttcttcagtaaatttggtatgatggttaatgatgaagtcaatttgactattaatcctaatttgttcaagcatcaaaccaataattcagaaccaaaggcaggtgacctgatttatttcccgatggataattcgctgtttgaaattaattgggttcaaccatatgatccattttatcagttaggtcaaaatgttcaacgtaagattactgcgcagaaatacatttattccggtgagcagcttcaaccagaattgcagcgcaatgaaggaattatcattcctgagttctctgaacttgatttagaaccaatcaaaaacattgattctcttgctgatatttctgacgtacaatacgcagaaagcgatgcaattaataaagaagcctctgaatatgttcatccgtattatgttaataacggaagaggacttgagtctcctcctaaagcagattcgtttgatgacggattttttgaataaataaaataaagatgggacctttgggtcccttaggagaaatcatgtttggacattggtataattcgtccttacgccgatacattgtattgcttggagatttattttctcatgtacaaattgctcgttggcgtgaagacactggactaaaatatattaaagtacctatcacttatgcttcaaaggaaaagttcctttctcaactcggaaaatggactgctatccagtctaccgagaataaagcaaagatagaaactgttttgccaagaatgaatttgcacttggttgatatgcaatacaacgcgatgtataaaacatcacagttgaatagaaccaaatcatataaaaccccttcaaaaattacatctcagtataatcctactccgattaagatgatttttgaattgggaatttatacacgcaatcaagatgatatgtatcaaatcatcgagcaaatcgttccttattttcagccgcattttaacacgactataactgaactttacgacaaagacacaagctttaatcgtgatgttagaattgtattacagtcattttctccggatgaagctgttgatggagataatatcactcgtcgtagattagaatggtcgctgatgtttgaagtcaatggatggttatatcctcctgttgccgaggttgacggcgaaattagaaccatttatttagatttcttcgctaacagcaaagagctaactccagaaggaaactttgaatcagtagatagcgaagtcactccacgagatgttcaacacgaaaattgggatggttctagtaaacaaacttattctcacgatattcctattccggtaaatccggaggctcctggaccgagaggtgaaaaatgagtgaattacaattagatatggctaaattattagacatcgaaggaattcctggaatagaaggacaagaaattccagtttatgaaaaacttgaattagttgaagttaaatctaatccaaatgaccgtaaacctgacctcgaagatgactattcggtcgttcgcaagaacatgcacttccagcaacaaatgttaatggacgcagctaaaatatttttggaaactgctaagaatgctgactctcctagacatatggaagtatttgcaactcttatgggtcagatgactacaaccaacaaagaaattcttaagcttcataaagaaatgaaagacattacttctgagcaggttagtactggaaaaggagctaatcctcaacaaggaatgaatattcaaaacgcaacagtctttgtagggtctaccgctgatatgatggatgaattcggtgatgcctatgaagcacaagaagctcgagagaaaatagtaaatggaacagactcaaccgtttaacgttctgagtgatgcccatcctttaaatgacgggaaactgacggttattcgtcacccgtctgaaatggaaacgaaaatcgaaaacggagttcgtttctttaaatcgcaatgggatgataagtggtatcctgagaaatttgaagactatcttaagttgcatgggatagttaaaattcgtttgcaaggtgaagacccagctcatttccaaacgtttaaggacaaaaataataagcgcacccgctatatgggattgccaaaccttaaacgagcaaatattaaaatgcagttgactcgtgaaatagttgcagaatggaagaaatgccgagacgatattgtgtacttcgcagagacctactgtgcaattacgcatattgactacggtactatcaaagtccagctccgtgattaccagagggacatgctagaaatcatggcggctaaacgtatgacttgttgtaaccttagtcgtcagcttggtaaaactactgtagtagcaatctttcttgcgcacttcgtgtgttttaataaggataaagcagtaggtattcttgcgcataaaggctcaatgtctgcggaagttctcgaccgtactaagcaagcaattgaattacttcctgactttcttcagcctggtattgttgaatggaacaaaggctcaatcgaattagataatggctcatctattggggcatacgcttcgagtcctgatgctgttcgtggtaactcatttgcaatgatttacattgacgaatgtgcgtttattccaaacttcatagatgcatggcttgctatccaacctgttatttcatcaggtcgtcgttctaaaattattatcacgactacaccaagtggattaaaccacttctatgatatttggactgcagctgttgaaggtaaatccggctttacgccttatactgcaatttggaactcggttaaagaacgtctatataacgacgaagatatgtttgatgatgggtggcaatggtcacttcaaactatcagtgcttcttctcttgaacagtttaaacaagagcactgtgcggaatttcatggcacatccggtactctcatttccggtatgaaacttgccaatatggattggattgaagttactcctgactcgcacgggttttataaatttaaagaagcggaagcagaccacaaatatattgcaactcttgactctgctgaaggacgcggtcaggattaccatgcactaaatattattgacgtgactacatctgaatgggaacaagttggagtattacattctaatacaatttctcacttaatcctcccggatatagttattaaatatctaatggagtacaacgaagctccgatctatatagaacttaactctacaggtgtttctgtagcgaagagtctttatatggatttagaatatgagaatgtcatttgcgattcaatagttgatttaggaatgaaacagacgaaaaggtcaaaagccgtcggatgttctgcactaaaagaccttatcgaaaaagataaactcattattcaccatcgtgctactgttcaagaatttcgtactttctctgagaaaggagtatcctgggcggcagaagatggatatcatgacgatttaattatgtcactcgtaattttcgcatggttaacaacacagcaaaaatttgctgatttcgtggataaagatgaaatgcgtttagcatctgaagtttttaaacgcgaattagaagatatgaacgacgattacgctcctgtagtgttcgttgacgccgtgaatagcgcagaatatgcgcctcaagaacatggtctttcatttgtataaataataaaaagcaaacaacattgaggatatatcatgcctttagtctctcctggaattgagctcaaagaaacgagcgtacagagcacggtagtacttaacgctacaggtcgtgccgcaattgtcgggaagttccaatggggtcctgcatatcaagttactcaaatcactaacgaagttgaactggttgatatgtttggtggtcctaataaccaaactgctgattactttatgtcagcaatgaactttctgcaatatggtaatgatctacgtacagtccgtgtagttaatcgtgaagctgccaaaaacgcatctccactggttgataatattgagtgggaaatcacaactgctggtagtaactatgaagttggtgataaaattacggttaaatatgcagaccaaactgtagatgacactggttcagttactgaagtagatagtgacggaaaaattatgtcggtgttcattccgacggcaaaaattattgcatatgcaaaaagcattaatcagtatccggatttaggtgattcatggacaactactattacttcacagagttctggtgtttccgctgttattactctgggcaaaattatttctgattcaacagttctgttaactgaacctgaaactgcccatgaagaaatgacaaaaactgaattccagactgcgcttgcgcaatataaaatgcctggaattgtagctgcgtatcctggcgagctcggaaaccaactggaaattgaaattgtatcaaaagccgcttttgataaaggcgaacagctgacgatttatccgagtggtggacagcgtgcatcaaccgcaaaagccgtatttggatatggtcctcagaccgatacacagtacgctatcattgttcgtagagatggtgcggtagttgaatcaacggtgttatcaacaagccgtcaagataaagacatctacggaaacaacatctttatggacgattatttctccaaaggttcttcacgttatatatttgctaccgcgcaaggatggcctgaaggattttccggtgttattcgtctgggtggtggggtttcagctaatgaatcagttactgctggcgatttaattcaaggctgggatttatttggtgaccgtgaagcattgcgtgtaaaccttctgattgctggtgcttgtgccggtgaaaccgatgaaatcgcaagtacagtacaaaaacatgtttcgtctattgcagatgagcgtcaagactgtttagcactcatttcgcctccaaggtcaacgattgtaaatattcctctgactcgtgctgttgataatttaatcgactggcgccaaggcgatggaacttatgattctgctaacatgaacattaataccacgtacgcggcaattgatggtaactataaatatcagtatgataaatataacgacgtaaaccgttgggttccactggctgccgatattgcaggtctgtgtgctcgcactgatgatattgctcagccttggatgtcaccggctggttatcgtcgtggtcagattctgaactgcattaaacttgcgattgaacctcgtcaagcacatcgtgaccgtatgtatcaagcaggtattaacccggtaacgggtcaaggtacaggtgaaggtttcattctgtttggtgataagactgcaaccactgttccaactccgtttgaccgaattaacgttcgtcgcttgtttaacatgctgaagaacaacatcggtgattcttctaagtggcagctgtttgaattaaacgataactttacccgtagttctttccgtatggaaaccagccaatacctcgcaggtattaaagctctgggtggtgtatatgacttccgagttgtatgtgataccacgaacaacactccagcagttatcgaccgcaacgagtttgtagcgagcttctacatcaaaccagccagatcgataaattatattacgcttaactttgttgctacagcgactggagcggatttcgatgagttgatcggaccacaataaattgtacattttcgctaaatcctgatacaattgcacatatgaaatattatgtgcaattaaggaaaaccaagtgattatctctaaatttgttaaagtaaaaataattcctaaaaattttaaatacttttcggaacttggatacaagctgcctcctctgggttcgcctaggcatggattcaaatattattcaattgatatcagtgttgaccatcttgagcccgggtcaaacatatatgttgattgtgtttgtgataaatgcggtgaacaatattcacagcgttattgcagagacactgacgtgtgctatgattgccgtagcggaaaatttaagataggaaatactattggaacagctaataagggtaaagtgttgtcttcgatgacaggagaaaaccatcctcgctggaatccaaacaagacagaatataatgaatatgctagtaaagttagaagagaaacttctaagcataaaccaatttattctacatgggaaaattttgataagattggactatgtggaatacctggagcgtatcaattagaccataaggtttctgttgcatatgggttttacaacaaagttcctcctgaaattataggaagcattgataatttagagataatcacttgggaagaaaatcggtcaaaatcaaagaaatctagtattgatttatgggatctattgaaatgaaccccaggacattctggggtcatctaacctttagatgataaattatattaccgcacactttaatagcctctacgatgatgtagtcaatcaagaggctatataaatatctataggaaacaacgatggaattaacagacatcacccgtgcgtttgaatctggtgactttgcacgtcctaacctgtttgaggtagaaattccttatctgggtcgtaacttcagtttcaaatgtaaagcagcaccgatgccggcaggtatcgtagaaaaagttccagtcgggtacatgaaccgtaagattaacgttgccggtgaccgtacttatgacgactggactgttaccatctataacgatgataaacatgaagtacgtaaggcaattattgcttggcaggctcaggcccacgctcaaggcaatgatatctctggtatgactccagccgattacaaaaaggttgctacggtacgccagtttagtcgtgatggcaaaactatcacaaatgaacacaccattaccggtctgtggccaactaacgttggtgaagtacagatggactgggattcgaataatgaggtagaaacgttcgaaactacatttgctattgactggtgggaataatgttatggggcttcggccccgtatcgaagttctgtgagttatttgcttaaatatctgacaaaacttcgatataaatatacttatagataatttcggagactccaatggcctttcatattttggacttattcgctccgtgggaaaaacgcgacgaagctgaatataagcaacaaatcaacaatgacctagagtcaatcactgctccaaaatttgatgatggagctcgtgaagttgaatcaaacgaaaacgaaatccagtataattcattcaaccaaatgatgtttggttccaatgaacctggaatgaaaacaaccgctgatttaatcaacacttatcgtagtttaatgaataactacgaagttgacaatgctgttgaagaaatagtttctgacgcggttgtatacgaagacggtcatccagtagtttctcttgatttagattctaccgacttcagtcaagcaattaaagaccgcattcttgaagaatttaatacagttttaacatgccttaatttcgagcgaaaaggagccgaccatttccgccgttggtatgttgactcaagaatattcttccacaaaatcgtcaacaccaagaaaatgaaagacggaattcaggaactgagacgtcttgacccgcgcaacttacaattcatccgtgaaatcgttaccgctgatgacgctggcactaaaatcgttaaggggtacaaagagtatttcatttacgatactggcaaagaaagttattacgcagatggtagattatattccgccggaacgaaaattaaaattccacgcgatgctatagtatatgcacattctgggctagttgattgctcaggtcaaaacatcattggttatttacaccgagccgttaaacctgccaaccagttaaagctattagaagatgcgttggtaatttatcgtattactcgtgctcctgaccgtcgtgtgttttacatcgacactggtaatatgccttctcgtaaagcggcagcacacatgcagcatattatgaacacgatgaaaaaccgtgttgtatatgatgcgtcaactggtaagattaaaaaccaacagcataatatgtcaatgacagaagactattggttgcagcgtagagatggtaaagcagttactgaagtagatactcttcctggtatgtcaggtatgagtgatatggatgacgtccgttactttagaacagcgttatacatggcattgcgagttcctctttcgcgcatgccagatgcaaataatcaaggtggtgtgcagtttgatgctggcacagcaattactcgcgatgagcttgattttgctaaatttattcgtagattacagcataaattcgaagagattatgcttgatccacttcgcactaatctaattcttaaaaaagttttgtctaaagatgagtgggaagacgaaataaataatattaagattgtgttccataaagattcatatttcaccgagttgaaagatgctgaagttatggagcgtagaatcaatatgctcacaatggctgaaccgtttatcggcaagtatatttctcataagacagcaatgaaagatttccttcagatgtctgacgaagaaattgaacaagaagccaagcaaattgaattagagtctaaagaggctcgcttccaagaccaagaaaatgaagaggatttctaatggaaaattatatttccgcaattgaatccagagacctcgtagcagccaaaaaagcttttggtgcaattatggctgaacggacatctggtttaattgaagagcgcaaaaaatttatcgcagcgtctgtcatgattgagggtgaagagcccgttgacgatgaagatgaagacgacgaagatgaagataagtctgagaaagacgacgacgaagaggacgagtaatgcttatactgcctgaaaatcatgaattagttatcgacgctgtcgaagcttttcttcctgaagcacaggcacgttttgataagttgtccgcagcgctttctaaagatgatataaataaaattgtagagaacatggttacttctgagcctgatttagcaattgctttaggttcaattaacgaatctctacaattaaatgaatttatcgttaagcacgttgattctaaaggtactattacacgtactaaggatcgtaaaacacgtgagcgtaacgcgttccaaacaaccggactttctaaagctaaacgccgccaaatcgcgcgtaaagcagtaaaatcaaaacgtgctaatccatctgctcaaattcgtggattacgtaaacgtaagaaagcacttaaacgccgtcaggctctggggctaagttaatggaaaacctcaatgaacaacttttaattgagcattggggtcaaccgggcgatgtaattgatggtaaacccatgctggaatctattatcgttgaaggcgaaaatgaatctggcttaaaacctggtctgtatatcgaaggtgtttttatgcaggcagaagtagtaaaccgtaataaacgtctttatccaaaacgcattcttgagactgcggtaagccgttatattaaggaacaggttgctactcgtcaggctctaggagaattaaaccatccacctcgtgcaaatgttgacccgatgcaagccgcaatcattatcgaagatatgtggtggaaaggcaacgatgtttatgggcgtgcaagaatcatcgaaggagaccacggtccaggtgataaattagccgctaacatccgtgctggttggattcctggtgtatcaagccgcgggctcggttctttaaaagactcaggaaaaggatataacatcgtacaagaaggctttcgcctgactgttggtgtagacgcagtttggggtcctagtgctccggatgcatgggtacaaccgaaacaaatttcggaaaatacctcggcacaagttgccaatagtgctgatgatgcttttatggctctcgcagagaagttaaaagcgttataaataattatgtaacttaacacaggacatcaaaaatgcttaaagaacttttaatgaccgaagctaaaactatcgatgcttccgtcgctcttgacagtattttcgaatcagttcagctttctccggaagctaaagctaacttcagcactgtattcgaagcaacagtcaaaaaacacgccgtagctctggcagaatctcatattgaaaagattgctgagaaagcagaagaaaaagttgaagaagaaaaagaaaaagctaaagaagaagctcgcgaagagctgaaagaagctgcttctaaatactttgaccatatcgctgcagaatggatggcagaaaaccagctggcggttgaccgcggtattaaagctgacctgtttgaatccatgtttgtcggtatgaaagagctgtttgttgagcacaacgttgtaattcctgaagaatcagtagacgtagtagctgagatggaagaagaacttgctgagcaaaaagcagaaactgctcgtttatttgaagaagtttctaagcgcgatgagtatatcaattatgcccaacgtgagtatgctatccaagaagcaacccgtgaactgactgatacccaaaaagagaaagtagtttctctgacagagggtatggattattctgactcgttttcaactaagctgaaagctattgttgaaatggtgcagggttctgtagagcagtctgtaacggaatctgccgatataaatactatcgacaaagaagcagacggtttaaacttcacaactgaagcagtcgaagaaactcctgcgactaaaaccccatccgttatggatgcttatgtagcccaagcggctcgtctttcttaatttaaaaggttatacaacacatgaaaaagaataaacttatcgaaaaatggcagccgctgcttgagaacgaagctctgccggaaattgttggcgctagcaaaaaagctctgatcgctaagatttttgaaaaccaggaagctgatattaatcaggctccggaataccgcgatgaaaaaatcgctgaagcatttggttctttcctgtctgaagcagaaattggcggtgaccacggttatgatgcacagaacatcgcagctggtcagacctctggtgctgtaacccagattggcccggcagttatgggtatggttcgtcgtgctatccctaacctgattgctttcgatatctgtggtgtacagccgatgtctaacccaaccggtcaggtattcgctctccgcgctgtttacggcaaagacccgctggctgctggtgctaaagaagctttccatccgatgtacgctccggatgcaatgttctctggtcagggtgcaaccgagaagttcgaagcagttaaagccggtgatgctctgactgttggtgatatcgttgttcacgatttcgcacagaccggtcgtgctcatctgcaggttgttgaagatttcactgtagacgctggcgctactgatgctgctaaactggacgctgcagtaactgccgctctggaagctggtaaagttgtagaaatcgccgaaggtatggctacttctgttgctgaactgcaagaagcatttaacggttctaaagataacccgtggaatgaaatgggcttccgtatcgataaacaaactatcgaagcgaaatctcgtcagctgaaagcacagtattccatcgaactggctcaggacctccgtgctgttcacggtatggacgctgatgctgaattgagttcaatcctggctaccgaaattatgctggaaatcaaccgtgaagttgttgactggattaactactccgctcaggttggtaaatctggtatgacccagaccgttggttctaaagctggtgtattcgacttccaagacccgattgatatccgcggtgctcgttgggcaggtgaaagctttaaagctctgctgttccagattgacaaagaatccgctgaaatcgctcgtcagaccggtcgcggtgaaggtaacttcattatcgcttcccgtaacgtagttaacgtactggcagctgttgataccaacgtatctccggcagctcagggtctgggtcgtggttataataccgacaccactaaagcagtatttgctggtgttctgggtggtcgctaccgtgtatacatcgaccagtatgctcgtcaggattacttcaccatcggttataaaggtgctaacgaaatggatgctggtatctactatgctccgtatgttgcactgaccccgctgcgtggttccgatccgaagaacttccaaccggtcatggggttcaaaacccgttacggtatcggtattaacccgttcgccgattctgctgctcaacagccgaaaggtcgtattacctctggtatgccttctatcgtcaactctgttggtaagaatgcttacttccgtcgtgtatgggttaaaggtatctaataccaataagggagccttcgggctccctttagttgttttaatggatataaataaacttataaatccacagaggaaagcgcaatggctaaaatcaacgaacttctgcgcgagtcaactacaacgagtagcaacttaattggtcgccctaatctcgttgcattaacgcgcgcaaccactaaattaatctataccgatcttgttgctacacagcgtactaaacagcctgtagcagcactgtatggtattaaatatcttaaccctaatggtgacctgacgtttaatacgggtgcaacttatgcaggtcaaatcggggcgccagaacgtgagtcaattgaagaactcactatggcaaataaagactcattcaataaagacgatatgttcaaataccagaatgtggtctttaaagtacttaaagatagcccgtttaccgatacagcagaaaccgatgaatttggaattgtatctgaagcagtagcagctaataatattcgtatgatgtcagatgctgcagtcactgaaaaattcgaaggacctgattcagacccaatcaccgaagccagttttaaaattgataaatggcagacccaggttaaatcgcgtaagcttaaaacggatttaactgtagaattagctcaagacttagaagctaacgggttcgatgctccagagcttattgatgatttacttgctactgaaatggcagaagacattaataaagacatcctgcaatcattgattacggtttcttctcggtttaaagtagctggtgtatccgataaaggtgtattagatttaactaagcaggattctgccccggaacaaggtcgtactctgtatcgtttcatttgtgaaatgaattcagcagttcaacgtaatacttcttattctggcacctacgcagtagcatctactcgttgtgcagcggtactggcagcttctggttggttaatgcagaagaacgatgggactattccagaaaacgcatatggcattctgaataacggccttccactgtattgtgatactaacagtccgattgattacgttattgttggtgttaaggcagaatttggtgggaaggaaactgtaggttcattattctatgcgccgtataccgaaggtcttgatttagacgaccctgagcatgttggtgcatttaaagttattgttgacccagctagcttgcagccttctgtagctttactggttcgttacgcgctgtcggttaacccatatactgtaggattggacgaggacgaagctcgtgtgattaatgctgcggatatggataagatggcaggaagaagtcagatgtctgttatgctcggtgttaagttacctaagctgattgcggactaatttatgggagccttcgggctccctttttgctataaactaaatatgtcaaacttcggagagtattcctcctcgagggatttaaacactttcttatcgtatagattaacacattctatcccgtgcctgcgagctatatcaacagctactctcgtccctccagatacactcccgcatcttttctcaggcgcccaatataataccttatctacaggctcagtgcattctaggcccaatacctgcatagaattccgtgcgaataaagtctgcactatcttcgagcattcatcccagtacgacgtaacttctctcgccttaatgatgcttttgattttggcttcgtttgataattcagaccatacaacaacacctgtaccaggaacatggccacaaaagccagaataaggaataatcctacaagaatttgacctatcgtatttcgccaaccacgcttcatctgaacctggagctccacctgaatatgaaaaatgcccctcttccgagaggcgttgacctattgtagtcattagactcagaactctgcgtggcgcttctcgtgaaccaataagcgccaatctcattattctacaacctcatgccatttactacgaatagtattttgaatcaaagtagtgatttctttcttaaccgcagaaggattatcagcgaataacatatcatgaccttcacgtgctgcttcgttaatgatatctttcatagtcagacccataacacgaccgaaatctttagcagttacagtaccaatatgagacagaacgttacttacgcggttccaggttacatattcggaaaagatttccagaacacgcttatcattctcggtgagttcaaccttcgctttaataggcttatcggatttagccttctcgctgaacttagagttcttacacttaatagcaacacgagtaccattattgaagaacttaggatgaaccggcttaagaacatagccttcagctacgccagtttcagaagaagcctgtgggccgaacacatgtttatttgcatgttcaaggtcagtcgtgtcaacaagctcattatagtaattgacaatagatttaaagtcattcacatactgagatagctcggcaaatgaacctcgaccaagaagtggagctaatttaagaccaagaccagtagcaaacgattctactacataatcgtcccaataaactttttcgttaccggaatccgacaggatatcaaatacgtagaaatctttctcaccataatctacgcctttctgaataccaccgccagcaaattcgccgaagatttgaacagatactaaatccatggcgttcagcatgttctgcatcttaacgaaagaatccttatacttcttcatgataatatcatgaccgaagaagctttcaccttctaaaataggaccagtacgcttagcaggaacgatttcggtaggagtaataatcacactaaagttagtgccatgaatcttctcacgagccacccactcaacagtatgcatatcaaaaccagcaccgcgaatcttctcgatgaacttaccgttgtaatgattctcgagactagaatattttgcaaacattataatttccttagaatgtgattttcataaagtcagtatcaccattacgctgggcactggtataatttgtaacaaatccttcatcatgcaaataattaagaacacttgtaatatgtttcttaactaaactgctaggatacataattaactcacgttgacccgctaaagcggttttctcaatctgagttaatacttcttcttttgctgcactcaattcttctgtagcaatattgatggctgtattagccattctatctgcaaggttcataatttttctctcaataaataatataaaaccaggagtctatcttggtcaaaatggtatcagaggatttcccctgagcccattataccacatcgatttttaaagcaattaatagccgctcggcacgaagcgatacatgatatatccgcttttagttagcatgatttcaaattgacttttgcttccaacctcaagtactaatggaatatctttatccatcagcatccaatcaatttttccataccgttcattaatcaaatccgttattttacgtgcaccacttttatagtagtaagaactctgaacagccatcattttactaacaaatttagatgcaaacaaccagacatttaccccattagcagctggcgtaaatttcttagaaagcatttcttcaaatcgttctactacaattgggtctactttaggcattttcataataacctcatgtgtttaacaagtttcttatgacgagattttataccaacgtttgttaagcgtttccgataaacgactttttctttttgcttaaaccgttcgtgtgctttctcaactgagacccacaatttagcagcttccgctggagtgatatctaacgcccttgcaatttcttgaaaatcctttccgctttcatgcatcaagtgagcttgtaatgctttcataataacctcatctatgtgacgaggacataataaaccaatccgtgaatagcaaaaagggagcccgaaggctcccgaatattacggatagataatacctgcttccagcgcagtacgatgaacaatgtatccatttctagattcttgtacatcgacttctggataatcatctagcattttagctagagtataccgatgcaggtaataatcgctgtcagggtcgtcgagtttccaatctttgccctcaacagtcattcgttggatttcatccattacccaccatccacaccagatataggctgttccacggaacggtagaggatgaatatacggaagttctccgtctggctccggggctacccttttagtaatggttacatcgccagttttagtgactgtaatcggggtgtaatcttctgcggaaacctcaacagaaacctcaatcacttgagaccctatatcagacgtgtcaatcactaacgtgcttgttgagccttctacaggagaaccgtctttggtccaagaataaaccccagttgcaccttctggagcaccgataacgttggctttaaaagatgcttcagacccttgttcggtcgtaatagactcaggagtcaaagtaacagaaacaccgctcatggtctttttagtaaaagcgacagcaatacctttagttgcagttccattattatagtctggggcagaaaccgttacttcacaattcagtgtgtagctagtttccgttgactcggttaaggtaattgttttacccgtttggccagaaataacagaagaaccacgtttccaaacataagcaatgcttgctcctgaaggggcaccagtaacatcagctgtgactacttgggattgaccaatttctttagaaacagaagtcgggctcaaagttaaagtaattgcaggcatagttttgttattaacggtaagagttgtttctgcttcagccgtttcaggatcgccttcagccggagtaacagtagcaactactttaacggtcttactacctgcaggtcctgcagcaacataattcatagctgcggtaacagaagattgttttacaccatttactgtccatacaaacgtttctgtgccttcagctgcggctccagaagttgttgcagtaaaattggttgttgctccaatgactgccgaagcagccaaaggagcaatagatacgctataagccatagctgttccttattttaaagttacaaatgaagaattacgtgtttcacgaatcataacagacccgtttcttttgatgtaatagattaaactaaacagtgtctggtgtgctgatgggtgttcaaacgacgttggccgagatttccaatctgggttatctttaatccattggtaaatccaccatggaagagtaatatatcctgggttcttacctagcaattgcatatttggactaaagttttcaggaagctcaatgatttcgtctgttttaataattttaactactttgtccattgctttgaagaattcttcagggtccgtagtactaattggaatgtttgtaagttttccttcatcatctatatgaataacgctgtctccaataggagcttcagcataaaatcctttatcattgatagaaggtgtttttacttcaaatccagggtcatttaccttaggggtttctttatagaaacctgggtcaatatcatgaattttaataccaacattaactggagcgtcaaacagtagttttgcttcatcagacgcttcatcattgaaaagtgattttccttcaatttcatcatctgcttggattaaatcagcaattgatagaccatcgttgtcttctggcataggctcatcggccaatttagccagttctttttccaaatcagcaaccatattgtcaaatgagcgggtcttcttcagtttaataccgaaggttttggcatattcgtcgagcttgtctttagcttcttttttatcgagtgcctgaatttctttaatatagtctttatctagcattgggtgtgcctcatgtaatgtataaatatgattgtatttataaactgaggatagtacagtgcacgacatccaagtcaaatttaaagattttagtcatgttcatattgagtgtgatgactcgattttctatgaactcagagactattttagcttcgaagccgatggatacagattcaacccgaaatatcgctatggacattgggatggacgaattcgtctgctagattataatcgtctcttaccgtttggtcttgttggccaaattagaaaattcgctgaccaattcggatataaggtttatttcgatccagctatattcgagcaagaaactctttcgcgggaggattttgataattggttgtcaactaaagaaatttattcaggattaactaagattgaacctcactggtatcagaaagatgctgtatatgaaggtctagttaatcgacgtagaattcttaatcttccaacatctgctggtaagtctcttatccaggcattacttgctcgatattatgtagaaaattacgaaggcaaggttcttatcatcgttcctactactgcgttagttgaccagatgattgatgatttttgtgactatcgtttatttcctcgtaatgctatgctgggtattcgaggtggtactgctcgtgattcgaatgcattagtttatgtatctacctggcagaccgctgttaagcagcctaaagaatggttttctcaattcggcatgatgatgaatgatgaatgccatcttgcaacgggtaagtcaatttcaacaatcattgcaggtcttacaaattgcatgtttaagtacggactgtctggttctcttaaagacggcaaagctaatatcatgcaatatgttggtatgtttggtgaaatcttccgtccagtatcaacttctaagttaatggaagacggacaagtaactgagcttaaaattaatacaatcttcttaagatatccagatgcagccgcaaatgctttaaaaggaaaaacgtatcaagaagaaattaaattcatcaccaatgttaagaaaagaaatcgttggattgctaatcttgctactaaacttgcagcgcgtgacgaaaatgcctttgtgatgtttaaacatgtagctcatggtaaagagctattcgagatgattaaagctgctggtcatgagcatgtctattatgtgtcaggcgaagttaataccgaaacacgtaatgctttaaaggctatggcagaaaacggaaagggaattattatcgtcgcaagttacggtgtattttctaccggtatttctgttaaaaacctgcatcatgtaattttagcccatccagttaaatcgaagattatcgtactccaaactattggtcgtgttcttcgtaagcataaagataaatctttggctacagtgtgggatatcattgatgacctgggtgtaaagccgaagtcagccaatgctaaaaagaaatacacacatttaaactattgcttaaaacatgcattagagcgtattcaacgatatgctgatgaaaaatttaactacgtaatgaaaacggtaaatctatgattaaatttgaagatatttacgaagccacaattcgtgaggctactatcgataacttcatgagtaaaattaatgcttgccagaccttagatggtctggaagaactcgagaagtattacgataagcgctctaaagaaactactcttgctgattctgatgatatcattgtgcgtgatgctttggcggggcgtagacaagctcttgaagctgattctgaagatgaagacgacgaagacttctgatataaaaaagccccaaccgaaaggaaggggcaaagccaattggctacatcaacactagactaaattaaaagctgcgtttcttgcaattgctcttctgtgtcttcagtgacaggcaattcaatcgcataattatagcaagctccgggatgaaccgggcctttgtctgtttggacaaccaatgcttcatcgattggtcctttacagacgacacataccgtattcgacatgattgtctccttagtttacaagtttatttattacgcgccagcttcaaactgacgaaggtcaataatatgcttaatgctaaaacctcgtgacttaatagcatccatagcatcactacagaactccaaaagaattccccaatattgcaatttagtatctacacccaagatttctttatcagcgcttaaaacagttttcatttctgatttttcatacacatccatgcatacttcaccaccaacctcgccacggccagtgtaataatccaatcgtgctttaagattttgctttttgagggcatctaatcttaacatctcttttcgacaagtcgagtgcttacgcacccatttaccatacagaacagggttattagccgcttcatactgtagtttagtctggtcgataatcaaatcattatccaattcatcctgtaattcttctaatctcattctatctccactctactgtttctttggaaggactagtaccattatactctactgctagagttagcattactacgcatctgtatgcgtatacgttctagcgtatcagggtcgtctactatagaaaactgcacggtgacaattatagcattatcgtcatataacggaagcacatcaactgatagacggttaatcctaggctcataattacgcacggcagagactatattacgctttatcgtatcaccagttaatggagtcatgttttcaaataattcgtttgtgatatcacaaccaaacgctgggtcaaatggccgagacccctttcttgtggttattattccaagaaggctatttttaaccgatcgtgctcctaccgtttttgacacatcggtatcccaagcaagtcgcatctctgggtcaaggtcagaatataatttatcaatattgctcatgacataatcttaaagaattctttaagccccttaattacatgaatgtgagaaattccgcattcacaagtaatgggaactgccaattgaacctgtggcttcaatagcatatttttgatgttaactacatcttcggttgtaatagcagaatataaatcatcgatttctgcatcatttaaatcattaaagtaaatctgctcatttccaaccacgatataatctatgcattttgatatcatcattggaatgtctgaatcgtcaaaaagattcggatacttgaactttattttaaatccctttaagtcataccagaggtcttctggaggatcgatttgcgcatgtgtataatttaatggcacaggaattttacgcccacaggtgcaattccaggtcacctcatgattaacctcgcctatactatgcgcccaaagtataactataagtaattccgattcctgtttgtttaattcagtggcattagtgcattctctgagcaatgctttaacgcattcatcgattgtaccgtttttcttcgctgcaattaaattagcgtattcttctagtgtaaaagctcggcactggatattcttgccatttattcttgtttcaaatttgtatgtgatgttcatatccactcctcttattcaaatatttataaatagtataaagaggattaccttatggccaatatagttagatgcgaattaccagatggtgtccaacgttttaagccatttacagtagaagattatagagaccttttattggttagaaacgacatgaacaccaagtctgaagaagaacaaaaacagcttatagcagaattaatggatgattattttcatgaccatcctgctgagtatcgtccttatatatttcttaaggtatttctttcaagtattggtaaaaccaaaatacctgtcagaatgaagtgcccaaaatgcggaaaatataagcagtatctttttaatcttaatcagcctccgttgacaaatccgaaagtagaggttgctggattaacgctcaagttcaaaaaacccatagaaataattgacgatacaggtaaaatgattttagataacattatatctgtgaaggattcatctggggaatacgcgtggaatgaattgagcgatagcaataaattgaccgttatcgatgctatagatgttgaaaccttggaaaagattttatcgcagatgaagccgtttaattttgagctaaaaacgtcatgctgtgataccacgacagtattaaaatatgataacattgttgatatctttaagctattgctacatcctgacgagattttcacattttaccaaattaaccatagattggtttctcaaggtaaatatgacttgaattctataatgaagatgctgcctattgagcgtggcataaccttatcgcttattgaaaaggaccttaaatcatgacaacacaaagattaggatatcctaatataagcataaaattatattctggatatgatgcgtggctagctaatagattcgttgaattagcagctacatttattacattaacaatgagagattcattacgcgggactaacgaaggcctacttcagttttatgactcgaaaaatatgcacacgcgtatgaacggtgatgaactagttcaaatatctgttgcaaacagtaacacatcgagaacacaaacccgaatttatgggattaaacactttacagttggtgttgatgataaaggcgatagcattatcacccttcagcttggaacactgcatgacataatgaatctcaagttcagcagagcgttttttagttctgcgtatgaaactataaaagaaatgataggtgcaatgtatgttgaccaaccattgattgctcctcctatcaacggaattaacgcttacgtcccacgggttccctggactagtaccctcaaagattacttacgatatgttagaaatgtaggcatttctacagacaacgatcaatttatttttgcgtgggaagatatcaccggaattaacatgatggattatgaatcaatgatatcccaggacccaaatgtattcatgttcggggctcctcaaacaataggtcagtttgctgcaggattaaaatatccattagcatgggattttgaatggcttgttaaatcaaatagatataatagaaatcccatgaaaaacgcaacattttatgcacactcgtttgtggacaaagatgttacccgaattattaatggagaaggccaaaacagcgtattcattaataggtcaggaggatattctgacatgatttttaggaatggctatgaagaagcactacgcatttctacgatggctcaatatgacgggtatgctcaaactaagtgttacggtaattttgaactaactccaggaatgaaaatcaactttgttgatttaaaggaccagttcagaactgacttttatatagatgaagttatccatgaaatatcaaataacacatctataactaacttatatatgttcacaaatggctctgcccttgaacctgtagatttgattaaggtgaaaaatgaacttaaacgtgattcttcctattaagaaaatagtaataaatgaaaagacgatatcaattccaaaactggggttaaagcaccataatctgatgaaagatgttaagggtccagatgaaaacatgaatcttcttttggattcaatttgtccaggattaacagcagccgaatctgatattgttgtattacacttattagcatttaacaacagaataaaagaaactgttgttaaagatgattttacctacgatttgaataaggtttacatttgccagcgattaactcaaaggttagatggtaaagaattcaaattcagagctcctcctcgttattccaaactaggttcagtagattcaattttgagcgaatttcttgaatcagtagatggaaaaccaatggatataaactttatgaagcttccagcttttgtgacaaagtgggctgatgacttagtaaacactatagccattgatggacctgaaggaccaatcaaaggcatgcttaacgtaatggaaatatttgaatgactaagaaatcagaaatgaattcaatgcgtagaagagttattgctgactcggctccacagaaaaaggctgagtctcaagctgatgctcagattaatacgctagaagatattggtcgtcgcttagacgaccaacaagcgtctactgatttgatttcggatgtaatagaaactaaatcaaacgaaattatcaaatcagtagaagatgtttcagctggtgttgaattaactgctgaagcttcagaacgcacaacagatgctgtctcgaaactaaatgatacagcatcgttaattaatgataagctcacgaaacttgccgatttgttatctaaaaagcatgatgttcagcaagatgtccaaaagactggtactggaacatcgttagaaacaataacggaacaagtacctgatgctccggttcagcagccgctagaggaattactcgaaaggcttattcctccacaggatgatagacgtcctgacgcggatttctttcctaacacagaagagcaagaggaaagaaaagaacctaacaaagaaactgaagataagaataaaaagtttcttgacctaaaatttggagaattaattaaaagcgttaaatctggttttggaaaaactatttcattaacagataaaattagcagtatgctgtttagttatactgttagcgctttggcccaaatggcgaaaactgccgccatggttttgggtgtgataatgcttatagatttaattaaagttcattttaattattggactaaattattcgaaaagaactttgttgaatttaacaagcaggctaaagaatggggtccgctattaactgcaataagcgagatgtcgaatgaaatagtaaaatcattcgtcaaaggagattggggcggattagcaaaagccattggctcgggtttggttgatgtaattgataagctcggagaaaccattatgctcggaatgagtaagcttcttgctggaatgttacgcgcattaggatttaacgattcggcagataacattgaaggcgctgctttagacagatttcaaactgttactggagcagaactcgatgaagaagatgctaaaatgagagcaaaatatgttgaccgtcaagaaagagaatatgacgaacagcctgaatggaaaagaaagctttctgctaagttccaaaaattcaccgggcagattgatgacgatgaatataacaaactgctgagcggagagaaaaagcagtcagcgtatgcagacttgccagaagacgaacgcctcaaaatcatcacagctcgtaataatgctgaagcagaactcaagcgtacaaaagcatatgttgaaaaaactgacgcatctgattccactcgattagactctgctaaggatgcagtacaaagcacaaccaccagatataaagaattggagaaattatctccagaagttgcaaaagacttaaaggttgaattagaccaattgcaaaaactccttgattctaaaatatcagaacctgctccaactgccgaagctatacctgcagcagaacaacctgaggttaaacagtctgcttctattaaagccgctgcggatagtcgtgaagctgctcgtacacgtgaatctaatacacagtcgcaacctattcaggttaataccgctgtaaataagaatagcacatacgtttatagaacgcctccacagacttcaacagctgctcctggaatgcaaggcgctatgaaaacctcttaaggaaaaacaatgatttttgaagaactggccgatggccttgaaaacatcaaaaaatcaggaactcgaatttcccaaggtaaatctaaactgacgaatgcgccaaccactaaggtggcgcagttcccagctgaacgttcagctgggaatgattccgcccaagatatgagagtacatgacttatatcgcaatgggttattattcacagcatatgattttaaaggaagaactactcctgatttgcgttcatttagacgagatgtaatgttatcgtctgtattcgattcaccaatgtcagcattggctaattcatcaagttctaccactagtactgcaccagtagctaatattctattaccgcggtctaagtcagacgttgattcagttagccataaatttaatgatgttggggattctcttgttacacgtggcggcggtactgctactggtgtattaagcaacgtggcttctactgcggtgtttgggtcgatagagtctttaacgcagggattaatggccgataatggtgaacaaatttataacactgcccgtagtatgtatgccggacctgataatagaacgaaagtgtttacttgggatttaactcctaggtctgcagatgaccttatacaaattattcgcatctatgaaatttttaactactattcttacggtgtgactggaaattcatcatacgcaaaagaagttaaagctgctattgatgaatggtataaaggaactcttaaatccgcagctccagatggggctaaagtagaaaacacggtgtttgagcaaataacatcgtttttaagcaatgttattgtagtttctaacccaacgatttggactgttcgtaattttggatattctacatcaatggatggtagagaggatatatttggtccatgccaaattcagagtatccgctttgataaaacgccgaacggacatttcaatggtttagcaattgctcctaaccttccaagcacatttacgcttgaaattactatgcgtgaaatacttactcttaatagaggtaacgtttatatcggaggtattgaataatgtttactctcgaagaatttaagagtcaagcggctgatatcgatttccagagaactaatatgttctctgttgtattcgctactgtaccctctagtaaaacccaggctcttctaaacgactttggtggagagctgtataataatatgggtttagatggaaattggcttggattgaccccaggtgaattcaatcagggtataacaactatagtgacacaaggaactcggcaagttgttcgtaaatcaggtgtgaatacatttatgattggcgcaatgactcaacgtgtggtgcagtcattattaggagaatttacggtaggtacttatctgctcgatttctttaatatggcatttccaacagcaggattgatggtttattctgctaaaataccagagaacagattatcatatgaaatggataagttccataacgctcctaatataaaaatcacaggaagagatatggaaccgctggttctttcatttaggatggacccagaagcaagcaactaccgggcaatgcaagattgggtaaatgctgttgaagacccagtgactggtctgcgaggattgccacaagacgtagaatgtgatatccaagttaaccttcatgctagaaatggattaccacatactgtatgcttgttctcaggggctatgcctgtagcgtgtggagctcccgaatttacatatgatggagaaaacacgatagcagtgtttgatgtcacgtttgcttaccgtagcatgcaaacgggttcggttggaaaacaagctgctatggattggttggaagataaggctattcagaaaattgagacgattaatccaaatcagggcttgagtgcgtctgcttcaagattgtctcgtttaggcggggctggtggtggaatttctaatatcactactacaacaagtagaataatttaggggccgtaaggcccctttgttttatgcaatgcagccaataaaccctggctcagtgcgaagaagtttcatttcgtttgtggtccaaactactttaacaggaatgataccttctgcctttccattaagaacggcttctacaaacgatggctctgttggcttacggaagatatcttgaataagaaccgtcggagtaccttcgttaaacccttcaagcatgataagaacttcttcattgaacttctctgcatctttaacatcagcagaccattcaataccgttaaagcgaaatacgtgtttcatatcaatttcctcattggtttgtgtaagtctatagtatcacgtccttgtgataagtaaacaactttatgcaagtttttctgggataccatccaggttgatagcaccagccagtagctccatggtacgcgtgtagctaaccttatctgtagaacggtctggcgaaaagtaaatctcatttaaaaagcctttgaacttgctttcttcaagaggttccactttgccctgttccatcaagatgtcaccatcatagagatgaaccgattcatcgatttgctctggcggaactaccgtcatttctaccatgaatgtcttgttattcgctacaccaactccatttctaaaaggagttccccatactttgttgactttcattgccaacccgcgaggaagaataacttcagcctcatcgctaaagcttgacaagacacccgggataactaccttaactttatcggccccatggataacgaatccaaacttaaactcatcgccataggcaacttcctcgcctctatcaactctttccaagttgtctgttccaataacagaagatactgcatctatagttgtttctttgttttctaaatcagaactaggtgcgtctggcattaatgaatcaccagcatttgaataagcaccaaagataattggacttaacgaagtagaaacatagttctggaaataaaacattttagactcaatgttatctttaaagtcttcatattttcctcgctgaccacgatacaaaagagtgcctggttcaagacgcaaacctttttcaaaggcagaatcgagcggacgaattttcttgtcaataattggatcgcctaagctttccatgccaataagatagttattaacaaatgaataaccagaaccacagtaatggtgtattgcatctctttcttcttcgcttaaacgagaatgcatttcacggttatattcaattgctttggatatagaatcgccaacaattgacacataagcggatatcatataattgacaagattttggtattgacgtaaagctccgaaatcgtcagctggaggcatatcaaatccacgagtagctacttcaacgattttacgcattgtttccatagatgcaggatttttagcttgagcaataacgtcagcaacgtctgaaattcgttgttcagcgattttcattttgtctgaccccgaaggaatgaaaaccttccagtcgtcatgcattctcgacatttggcctacaaataatctctcaactgcatcgccaaaattacttccatatccgccacgaacacgatagtgcttgatatcatcaacataaaaaggaattgatttttctaatccggctttgatatctttttggaggtctaccgtatcgccttctgcgctaagaaccggtgtgttagtagttaattcgtaccaacgttcgcgtttattttctggccaatcttcatcaacatatgaaacaaatttgccgtactgtgctcggattaaatcttttcgagacactttcattttactcattacagcgagttcagatttcttgtcttctttttcgccaatggaattagccaatgcttcggctttggtaacgttttcgccggtttctttagacacataaacttcgcctactttggaatctactttggtgtaaagttcttctgaaatttcaggaattccttcaatctcttcaagtttcttacctttacgaaccataatagaataagcatacttacctttgtagtaagccatatctttcattagattgaaacgaccgccggtgcgagtagtaatcaaccgagcaagaatgcgttgaatggctttatcctgtccttgcattttcttcggattaaagcggaacattaccgcatcagctttaatttgcttaactactttgttgacggtctcaaaaatggtattgatagcaccaatcgggtcttggcctaaaccacctttaagcgccccgatgttacctttttccgacacagagaaaacatagacctggatgaatttatcacccatcttgatgttcttaactgcatcaccttgacctgacccttgtactaaccgaatcattaaattgttattacccggcaccttaatcaaaaagacctgtggtaccttaagttttggcttaacgttctcgacgggatagattttactattctcttcatcgaaaacttcatttaaaagttccatgacatatcctcgtttgtttattctatttatacgaaaaaaggcccgaaggccttaattaattattgttactgtacgccaaacttgtagtccatttacagactcatactcttcaatgttttctttgaagtttcttaatgtgttaatgttattaaactcaataacttctgtgtgaacagaaataccaccacgtccgtcaagagatttagcaatcacttcgtataaagctttcattttattcctgttgcctcagtaaagttaacaccaaacgcggcttcgaatgtattagccacttctttatcatatctacgctgtttaatgataggtaagaataatcctactgtaccatcatcacgaccttcagcagttacccaaccattacattcaagttcccagatagttcctggaagagaatctctgtttttccatagatgagtacgatcaagttcatgtaattcttcgggcttatctttaagacctgacccagcgttaacacgaatacgaccacattctgatacgaacattaagccgcccattttaccaggttgttttctatgctcgtacgaaccgacacatttcaaatctacagtgataacctctttaaatttaacgaggttcttagaacgcttatcttcccaataagcaccgatattcttaaggataataccttcgagaccttggtctacgtatgtcttatagatagcccgagcttcatggatgttatgtacgacatggttttcaattagaataaccttgtcatagcctttgctcatcatttccaatgcacggaagcgtacatcataagcaaatccaggaactttaccttcggaatatactacatcaagcggaacataatcccaaacttggaatctcataccttccgcttcttcggcagatattgttcctttaatagccttattagccaatccgtttgattccgtgcgagccgtctgttggaattccttagctttacttaactcaggaagctcaggctctttaaacatatcaaacaggtcgttttcttcttctttcacttcgacatgatataccaactcgccgtcaatcatcacaccgttaggatggcgttctcgggcttctttggtcatctcgataagttgacgcttaagtttatctagacccaggtattcattaccggaacgagtaagaagagtcacatcatctaaatcatctccgcggatttcagcgaagcatcgggctccatcagctttaagttgtgcgaatgcagggaacttaatatatgacagcgctttctcagagtaggctgatgctaacatctgtggcatctcaggaattaatttcttccataccttattagcaatagaacctgaagcgccgcaacgcatatctttaagaagaacccgtaccagtacactagcatcaccctcattcatcttagagagcaaatctactagcccctggattgccatattaccagtaagtactcgtgctgccagaatgtcttggaggtaatctagaccatctgaaaacgtctttgaaggaacatttggatatttaacgggagtatattctggaactttcttaataaaaaatttaaatcgcccggaatacgccagcagataagctcgctttaaatcaacgttatctttattgtcaatgagaatttgggttttggctttagaacccttagcatcttcaattgctttgatgatatcaaaaatcattattcacctaattcttttgaaagttcgcttacgctacgatgataagttaatccatcgatataaacaaacccgttattgatgcattcattccaaatcgggcacgactttgcttcacgccaaattggattccaacgataaaactgattaacatggccataatcacatgataaccagcgtttaccaaccttagtatgaactacaaacatatttcctcctagggtatggcaattataccatacccagagtgttagcaattaatttggtgattatcacatgtaatacgaccattattccaccagtcgtttccaggaggaacatgcggaccaggactaaacggaatgataggttgtttccaccaatctcctggaacttgtcgtggaggccaattaaaaggatgttgctctttacgaatttggtctttgatagcttcttcccacaatccagaaagagacttctgcggtttcttaacgaatttcagagattccaggcaagttacaatttgatgccaatcttcaaccataattccaggagcagtcactgaaccttctcgctcaccacgaggcatataaaacacacgggtttcagtgtcttcaaagactttgctagctgcagcaatgtgtttaggcaaatcatctacatagcaaacgatgcgatcgccgtattttactttagccttttccagtaaagcatctttagattcatcataatcgcagaccatgatttctgtaaatgcatcagggaacaaagcattcagattgaaacgacgattaaggttagcatctactgagttgccaagagccgtgatagcgacaaaatcgtatttttctttgagcttattaactgtagctaaagcatcagcatacggagcaagataacgaataaaatcactgttgttgtacttcagaagcagcttaacagctagttcttcttcacaatcaaacagctcagcgggtttaatgaatttttcagtagtcatcatatcaaggatatgctctacaggaaggttatatttctgggcaaagtaaggcagaccactttgccatttaacgatgattccatcaacatcggtcgcaattacaggttttgacattcggggaaattcctcaatgcttgtttaaatttggcgacgctatttgcggcaccggtgaaattgaaccagattaaccctggagtgtccgagggttctatatcaattaattctatattataatactcaacagtctttagcatttccctggtgatacgtcgggcaaccatatgaccgaagtgaggattaatagacatcgtcgttagcagcccttaattgagtaattggataaagctcggattctgcatggattgaacgattgccatcaacccaattaacttcataccaaggttcaaccaagtaggctttaattgctggagccgtatcacatacaactccaggaattccatttgctaatcttactgtactgaagatatgatatttcatgcatcaagtctcactgcccattcgggcaattcaaagaaatccggagcatcaatttcatactcaacggtgtgttgtttaacatcagctgacatgatatcaaccattgggtggtttttcaaactgcaagaaaaaataccagctttaggtttaggcacggatacaatcatgttgatttcctcaaaatttagttatgaatttttctttcggcattttggcatttgagccatcactgtcagaatacccaattggcatagttgcattaatgaattcaattttagcatttataacattaatgctcagagaatctacaccatcaaccatacgaaattcaggagggcaatacttatcaatgtatgctttcacgccatttttattagcaggtgtaccatcgcgagtatcgctgataatggtttcaacttttttctttcgtgaatcatagaaagctgatacaatcatttcaatttcctcttaaaacgggcgaatattaacgtgaaccacagggacagcaaaaggttgcatgattacaacttttgtgtctttagttgcattcaggcgttgtacttttgcaagattaacagcttcttcctttgttaatccgccattgtaggtatcatttcctttatttgatgtccaaacaccccaatcattgcttccatcatcgtcggtcttcggttcaggttctttgtagatggtttcttcaaaataatgctgaaactcttgattagtaagaatacaccacatatgggaaaagcgaacttcatctacactaacgcgtttgcattctccatctggcttaatgatttcaaattcaactaatccggtattttccgcatatttaaaggttctggtaattttaatcggattattaccgatttgctcaaaaacacccttgataagagcgcctggagacaagattggagtctttttaagcttatagaatttacctttttccattatcatttcctcaatagtggggccgaagccccgagttagttaaaacttgatttcgtttgaaacgatatcccagattgcttcacgttgttcttcggttgttttacgaccgaggatgtggcgcagataaattttaacaagcagctgacgatttgtgttccaagacggatgtgaagataaatcacgtttacgaacttcatcatggaatccaactttgatttcagaaccgttgaactgaatatccagagtaggaccattttcaaagctgaagaatacgtagttatcttcccagtacatatcgatttgagctactgtgccattgttgtgttcccacagcaaagtagtagaaacgtcccaagcattgttctgtacgtatttgcggttgaagttagtgaagttcatttttattctccgtagtttgtttatctgtttgggtggtacaggtctatagtaacccagaccacccaagaagtaaacaacttttattcaaaaacttcagacatttttaacctctacagttttaacagtttttacttctgcaaatccggtgcttttaaacagttcatacttggtagtttcggggacgatatcggttagttcaaggatgatttcttttgcttcttttaaagtgaagacgctacgcccatctttaaccactggagtaggtttaacgaacgttgatgggatttcaaaaactgcatagcggtcatcagagctttgattttcaaacgctcctatttgcacaacacgtccttcttctaactcgtgagaagaaaataaacatgacagagaccggtcatattcatctcctatggtttttgccgaaatgattttaccggtttcggttttaatcttaacgacccgtcccagcgaatcaagttctaacggcgtccagccttgaactccgacaacggtggcaatgagatagttaattgtgttcttagcgtctttccatctacggtaagtttctggggaaatgcaatatactcggtttttgctgtaattcattttgatatcctcaaagatggggccgaagccccagtcaagattactgtttagtccaattatccatgtttaatttaccgacctttttcatttgctcaattaaagcatcggcacgattacgaccattttcataccaggttacatcttctgagtaaccgtcttcttcatctgtgtaagtttcagaacgaatacgaccaacaactggagtgttcagaacatatacagaacctgtgaaccaattggttagcgtgatatgccagcagaaatcatctgatggaccgtccggtgtcatgcatggaacgatatcaccttgaactttagacaaaatccacattttctcgtggacagtctgagctttataaccgtcatggtctttagtcttgatagttgcattcaggttgatggtattcattttattctccgttgtatctgtttgggtggtacaggtctatagtaaccttgttgagcctagaagtaaacaacttttttcattctgcggaaaataaaaaagggactcccgaaggagtccctgaacttatgctttcggcttaccaaaacgagaagcatcatcgcgaagaaccgcacgagcccgacgcatgattttctcaaccgtctgattgatacgcttgttcgacccacgcttgtagccagcgcgtttagaggtaccaacaacttcttttactgcagtttttgctttagcttgtttagccattttatcatcttccattttggagaaatacatgggagcacgttcttccgaggttcaacttctttcgacagttctttcggttgtagctcccgcaagccctcaaagggtacgtttaaactcttatctgttgcacaccgttagcttaaaggttccgggtccgatttctcggggataagatatacaccgatggatgtataggccttgaggcgtactcccgattggccatcgcctcggggtagcatgcacttgccgtttattttctagctgcactttggtagcaaatcaccgatggtttcggatgttttacgtggggataaccaacaacgtccacatcatacgttacccatgcgtacacatggtgggcgtacaaattacttcagcgttaccacaaagtggcgaacagctttgcgagcagcagaaccaagatgcttagcatacttcagttcatccatcgcttctaaagtatcacgaaattcagcttgagctgggttcagatgtttaaaacctttcagaacttccagtgcttctgcatagatatcgattgaagcaccgtagttttcgtgaccggaattccatgcattacgttggagttccagagctttagtaagttgtttgttcattgaatcgttcctcaaatgaggttaaaatttggtggacggtaaccgaggtttagctcgggcatccaccgcgtagaattgctcgggtaactaattgtccgacgcccaattcatattattatttatatacgcatgcaagggacttataatgacaagtcacaaacttctgccgaatttctttaggtttcttcacacctgctgctactaacggatgaggtacatttctgatattaccaacaggcagtggagtcaaatcaccgacttcaacaaatcctttcggtacatcatcaccgatagaatagatttcacacatatccggcagttgtccttgttcttcttttccaagaataataccggaaggagaaacaatttcatcaccttgctgtgcaggttcagatacgagaattacatactcgcctagagctttaattggaagttccatgtgttacctttattgtttgaccatgtagttatattaacatggtcagtttaaagcaaattacttaccgatcatctgcagcagatgctcaactttcataccatttaccgagataagtttatcaaaggcaaatgagcgccaaccttctttctcggtatcatatactggaagtgaagtagtgctttctgctcgagcagatttagtagtgctttctaccaaatcagatggaataatgtctttatcacgagtacagcgcagagtacgaatagtgccatcagctttttcaaacacaatctgggattcgcccatgctcagcacagccttcagagtttcacgaatatggatgttttgttcagtagtcagtttcattttgatgtctctttaatagttttgataattacagatttgcgcttggataattcttttaataatcgaactgcttgatcttcaaatttaaatgttgctagtggtttccatttaaaccaataccggcgttctactgagtatgatataacaacatcaccacttaggttaagtttattaatttcaacaattctaagtttcattattcaattccacagaattctttaatgttataccaattcaacttatccaaattacgttttggaacattgaacacctcgattccagcagaacgaagaatatcgtcccagccgggttcgttcttgtcgtatgtttcgcagtatactaattttttaataccagactgagcgatggcttttgcacaatctggacatggagacagtgtgacatacattgttgctccatcaatactactgccgttccgggcagcaaaaagaatagcattaagctcagcatggatttcattgactttagaccatgcagagtgggctgctcgatgttctttgagcaatccgacttttttgacttgaaatccgtcttgacgcaatcccgtagatttgtaaggaatttcaccaatccaaccttgttctgctgcatggtcacaacagttcacgccgccagaaggtgaaccgttatagccagtagaaataattcgtccgttcttttcaattactgcgccgactttccacgagcagcattttgactcttgagatacgagatacgcaatttgtagtaccgtcgacgctttcatttaaatcaccagataagttgtgttatttgttttaaccaattttaactcgtcggtaggagaagcaaaactctctactcgagaagtacgaatgcctgtaccatctggaaacggatgatttcctcgttcaagaacatcggaaaagacataaccataaagaggttggccttccttaacatcaacgttactgtacaaaatagcatcatattcttcgcgcggaattgaccaaacgccttggtcagaaccaataacagcattaattagacgaataccattttggctaatttctgccctaattccacgagcatgttcaattaaaagagcttctacagcctcacgtaaagtcattagatatgtcctaaaatgttagtcatttcaacttggcctgttccggttaaagccaattgagtgtgttgattgctctttccattattaactgtaatgatataagcatcaacatagttaaaggatgactctcgtcggagagtcactttacttccaggaacccggtttgctacttcctgtgcgaagattttaaccttcgaaataaattcatcatgtgaaaatttagcgtcagacaacataagtcataacctgttgggtttcaaaattagcaataattccaacgataaaccaatcgtgttcaccttcgccacaagaaattttaacttcagatgaaccgcctgagcggtcaatagaaaatttaataacttcgccgtttggaataagtgcattcatggcagataaaaactctgcatgcattttggctacttcagatggagtaaactcatctgttaaatgattagcaacaacttgcgtaaatgatacttttactacttcggaatactttggaaacattatactttcctctaaaaatcaccgtgggctacttgccagcattcaacaccgatacgacgccacatttcaaccacctgcgccctgtcatctactgcaagttttacattataacgatcagcaattcggtcccagaagatttcttcttttaccacatcgtctttgcgtgaatcgccttgcttacgttggaagtgttcgcctgtttcgccaacatggtccaacaaccatttcttcgtaatgcgttgataaacagtagggtcttctttagtaccagactctctgccggaaacagtaagaattttatatcctttgttacgaagcattttaagaaattcaattaccatttcctttggatggtctttaccacatttggccaagtcataaggagaacgatgattgttatctgctaacgtgccgtcaagatcaaagataactgcttttggcaatgattcgtctggaatgtacaaatcatatggatgcatcttagaatagaagctacgaagcacttcaataggaactgcattcgcgccacgatagaggttacgattaagcaattcagtccaaggaacgtcaaagcgtttaatttcccacttgacaccatcaatttcgtatgccaactcttgccacttcttgatagtcgttggattaaggttagtatcagcaatgatgacacctttagtggtttccatctcgagtagagtcttcgccatagaaaactgacatacagatactgacttctcacgaagcttagaatatttgtaatcattacgtttatcaaggccaaagatgccttcacgcaaatcatcacgagacaaaacataccaacctggattagctgctacgtattcgttagcccaggttgttttaccagagcctggagccccttgtgtcaaaaccaattttttcattatacatccttaagagtgtcaataaaatcatgaagagccttagacttttcaccccaattagcacgatatttttctttaattgctcgcaatggcttattcattgacagtatatcatttttgtcataattttcagctgcgcgtccaaacacgatgcacgccaattcattttcagcaattaatcctttaagtgtttcatactgctctcggttcattataataccatcacttaacgcaacgaggttctttaaggtcagaacgataataacatatcattccattagcatctttagtatatcgtaaaatgtcattcatccagatacgatattcttgcgactcttcaaacggcataccaacccaggctttaccgtcaattacttttacttcccaatgtccttcccatttttgaattgggtctggccactcaggatgtaaaaccgggacatctggtgcactagaagagcatccagcaagtaagctgataatacccatggctaatagacttcgtttcatctggtagcctcctggatatcttctgcaaacttattgaagcttgcattaatctgtttttcaactaatccaggtttggctgcaactacgtttccacgcttagaatctttattcatcttagcgttagaagtatcacgagctgctcggttttcctgatagcctttatatgttgtctgcagattttttatagaaacaccaatgttttctatttcttttgcttgtcgatcagattcatcttggacgactttgaggtcagctttaagattttctacccgccacgaaagatatttcaatccaccggcggataacgctaacacaccaatcatcaaccaagttgtgtttattttgagcatagtttaaggataacctctacgatatcatcacgggataatcccgaaatgaggatgtgacgatcagaactttccgaaggagaacacttgaagcaagcttctacatattctgccatctcagaataattcagctcgcgatgcataatgccaagacgatgcttgccataaatcgggtcaacgattacatagcatttgcatccgttagcatgaacgtttggctgggtgatgttcttgaacacctctgcaccatacttcgcgagatgattatctaggaaatcaatcatttcatctacagcttcaggaagggcttcggcacgctgctcgttcacacgattagtgtactctttttgcttcttacgagcagcttccttgcgcgccatgtgcgtccgtaggtcagtgacgaagcccaccttcttggtaccattccacacaaaaatcccatcagaatgagtaccatatttgttaacaaccatatctaaagtaatcgcttgcatatccatttcaatatcctcatcagtttgtgtaagtctatagtatcacactctgatgaggatgtaaacaactattcttcagaaatttcaatttctttttcgtactcttttggaacatatcctgcccagtacttcaagaacaccctttcgaggtctttaagcagtttatccacatctacagttccttcgtacatgttcatgataacaccaaaaagatggcgctgattaaccgttgctttctgagcagcaatagcataatctttacgagcacgacctctgtattcatcgtagaacgactgacatagctcaagtgactttcctaggtaatctagataagcttgctcaaacgcagaaattttcttaattgcgtattcatctccagcaaaaagagaacgcaaatcgtcggaatttgcagatacgacagacgcaaacagtctttcatttgacgttattgagtctttagtgtgatgaagagcagaataccattcggttttaaccttaaatctctgcccagtgtttagaactgcaatgtacccttctacgccttcaagttcacgaacaccttcaacccaagttttggggtcagaaattccgtaagcattaattaaataaggacgaatcttagcattagcgtacaaatcatcatatttaatatactcgccagttgcgttattacggacgtttaacacaaacagctgtggctcctgatatgctaaaacaacacgattattaggtgaaacaaattccatgtttaccgtataaccatctagcgctagctcaagaataacctgatgaagcgaagaatattcttcactgttaagcaaagctgaagcttgtcttgcctggtcactgtaaagagaggtttttgatttaaggtatagatacccatcatcaacataagatgatactagagagccatcagccttatccataatgtattctacatcgctaatatcaattcccatcgttagtgggttttcattcaaattgaagaatttttccatcggacgcgaagcaattcgaattggggtatcgccatccatctcaaacatgataccgcggcactcaagagcatcgggttttaaccactcactgtaacttgcgtagtggtatgaaaacactctgaacttaccatccataggaccggtaaaatctttataaaagaattttgcaacttctgagctttcacacagattcattaaatttttatatagctctaacatttctttaccttatgtttgcaattatcgtagtgccatctgatagcaatggcctttgaagttattataccacaatgcgggcatgggctgtacaaaggctttttctttcctttttggctttctgaccgcttgagtttagtttcttcagattgtgttttaccggttaaagattttgatatcttttcgcgtgtttctttggcatgagtctttccttgagtgggacttactctgcctttcagtgctttagataaattctttctatgttcttccgttcgtttctttccggagaataagttagatgtataattagaatgctttattctagagctttcataaaatctggaatgaactttaaaattctttccagaagaattacacatcatccaaagagcataattcattttagaattattatgtatctttgataatagcaaatgggcaatgaaatgttcacgtccagtcaataaaactaaattagaaacatcgtcatttcctcctaatgattttggaatgatatgatgagcttcagtataatagtttaattttcctttatcattgcctcgtaatttaccctttgctattaggttatcatatactttaacatagttcatttagctttgttagtatgttgggtgttccatggaggattgaactttttaattagaagaggttcttccaagtccatagtggatattgacatctcgccaagttcattattaatcaaaagattaaaacactgacgagcatagaactctacttttttgccagccattagtgcttcaaaaatcttggcagatttagccgaatcagaggtttggtctttccgattaatagcagttctataataatttatacgtttacgaagatttttagtcttaccaatgtaaactagttcatcatcaactgcgatggcataaactacgtttaacttgtttgctatcagaattggtttgatggtaaaatctggttctaactcaagttgaacatattttataaaagaaaactcgttagcaatatcattcataataaagaggggccgaagcccctttccttataagtactttttaaatccaattagaacatcatcagtgacatcattgtcaatctgagctaccagataagaacttatctcaacttcctgcggagcagattggactgcatcagagttaagatattcgcgaatccaaggaataggatgacgagttggtgcatccgtgattgggcacggcagaccacagctacgcatgcgagatacagtcagatagtcaatgaagtcatgaagaattttaacgttcagacccggaagaccaccgttgcggaaaagatggatagcccaatctttttcttggcggttaacttccatgaagattttaattgcttcttgttcacactctttagcaatctcaacccattcttcgccatcagtgccagtttgaagttgacgcagaatgtactgcgtgcccttcaaatgaagttgttcatcacgagcaatgaacttcatgattttagcattaccttccatgatttccatatttttatggaagttgaaggtacacgcaaaactaacatagaaacgaatagcttctaatgcgttaataacatgtaagcaaagataaagagatttcattaaatcacgtttagcttctttaatttcgatattatcttgattaaagcagcgatttttggcattttcccatgcgcgagtcttcgctataacatcatcatagtaaacaccaattgactcagcgcgtttcatgattgcttcgtcaagaacgatttcatcaaagattttagctgggtctacatataggttacgcatgatatgcgtgtatgaacggctgtgaatagtttcactgaacgtccaagtctggttccaagtatctaggcttgggtcagaaataagcgcagataaaactgctgctggagcccgtccttgaattgaatcaagaagagattggtacttcaagttatcagtgaagatattacgttggtgttctgggagtttttcaaactgaccacggtccatcataacgttaacttcttcaggacgccaaaagaagctcaattgcttctcaatgagttcctcgaatactttatgacgctgaatatcatagcgtgcaattcctagaccagaaccaaagaacattggttcggtcatgatatctacttgcttggtattaaaaactgtactcattctatttcctattctgtggtgttaaccatccgtggtctaattataattcccttttattaaagcttacaggccgcgcagtcagcagagtcttgaatcatatcatcgttaccggaaccatcacgggtgttatgatagtaaagagtcttaccaccaaagtaccagaaataaagcaagtcgtccatcattaccgacatttcaactttgcctttagggaaattcgccgggtcgtaataagtattagcagagatgctttggtctacaaatttctgcataatcagaacctggttcagataaggcttattaccctgtttcgcgagctgccaggcataatcataaagggaagcattgtgttcaacatttggaacgacttggttgaagcttccttcttttgattctttaactgacactggtccacgtggtggttcaataccgttggtagagtttgatacctggctagacgattcgcatggcataagcgcagataacgttgaatttcggataccgtatcgcttgaggtcttctcgcaggagttcccagtcacagacatagtttggagctgcgagttggtcaattctttcgttgtaccagtcaataggcagttcaccacgtccgtatcgagtttctttgtaaagcgtgcacggacctttttcgctagcaagtttaacagaggctttgatgagtgcatattgaatacgttccatcatttcgtgagtaatatcattagcatctgcgtatgaagcaaagttgcttgctaaccaagctgcatagttagtaatgccaacacctagtgctcgacggtctttagcttttaacgctttgtctacaggatagtcttggtaatccaaaaggttatccaaagcccttaccattacttctgcgatttcgttaacttcttcttggtcttgccagttgaagttgtcgagcacgaatgctgcgagtgtacacagcgcgatttcgccatcttcttggccaacatccgaagttggtaacgcaatttcgaggcagaggtttgattgcttaaccgtagccacatcacgaataaaaggaccatattcaccaacgttatctaccatgtacgggtaaattcgagcagtaccagcacgttcagtaaggaacaactcaaacagttcacgggctttaatacgtttctttcttacgtctgggttcttttccagctcttcgtataaagtacggaatgcttgtgcatcacggaagtattctgtatacaaagtaccaagacacacatcgggactaaacagagtgatgtaatcattcttaatcaaacgttcaatcatcaggttattaatctgaacaccataatccagatgacgaatacggttttcatctacacctttgttgttcttaagtacgaggaggttttcaacttccaagtgccagatttgatagtacaatgtcgccgcgccaccacggactccaccttgggagcaggatttaactgctgtctggaagtgtttccagaaaggaataactccagtatgtttgacttcaccgaatccaatttttgaaccctctgcgcgaatcattccagcattaataccaatacctgcacgcttactgatgtatttcgtaattgacgcagcagcttcgttaattgaattaagactatcaccaccttcaataaccacgcatgaactgaactggcgtgtcggagtacgaacaccagacataattggtgttggcaatgaaatctttttagtagaaactgcatcatagaaacgaataacgtttgctaaacggttttcgccatcatcttggtgcaagcacataccgatcaacataaaggcaaactgtggagtttcatacaattcaccagtgtgacggtcttttacgagatacttctcgataagctgcattgttccagcataagtcatagtgaaatcacgctcatgcttaatataagaatcaagcaaagtaatttcttctgcagaccacttacttagaatttctttatcgtacttatttgcgttaacacaacgtgaaatgtggtcaataaatgcaggcggttcaaactgtccataaacacgtttacggatttcaaacattgctgcattggatgctacatattgataatctggctcatcaatagaaatgctattcgctgctaccttaacgatagtcttctggatatctgcagtgctcatgccatcacgcagatgggatttaataatttcatacagctcgtatgggtctactttagttccttcgcacgcccattcgaggactttaatgattttctgcatgtcaaattcttgactaacacctgagctcttaattacttgcataagtcctctaattcaaatgtatctttaaaaagtttattcactacaagagctattatatcaccatggcaaggaagcggtttgcaggtgcatcctaatctcattcctcttaaagtttctaagtgctctcgctttatttctccgttccgaatcttagcaataaaatcgtccttaaacgctgcaatagcatcaggacgattatcgcaatctttaccgacgtaatttccccacattgttccacgttggatatttacatcgaagtcggaatggtatttattaaccacccgacatatcttcatgttatatcaacttcaaaccaacagattaattgtgttttgcctatagaccattcatatgatttaacaatagacagaaccctttgttcggtcccatcaaaaactatcttgtcattaacttcaggcaaatcgctagagaatgcatcacacatctcgcctaatactgttttagactggtgtcctttacgaacaaatcgaatattcatatcgccatctttcctgtaattgttgggtgagatttatacccaactagttcaaaatgatgaggacgtgcaaattgttctaaccaacgaacctgagaactagtctgccaagtttcatacgtatctgggaatgcaatttcaagctcacaaagttctttcggttctcgacgaagaatttctttacattgctcaatatgattcaggtaaatatgagtattaccaccagtgaataccaaatgcccaggtttaagatttgtcattttagcaatgatatgaactagtgctgcatatgacgcaatgttgaaggggaggccaaggaatacatctacagaacgctgataccattggaggtcaagatgcccctgacgaacgttaaattgatacagcaaatgacatggtggcaatgccatcttatccaaatcaaccgggttccatgcagtcacaatctgacgacggtcatatggaagttgcttgatacgatcaatgatcaatttcagttggtcaacacccatgaaatctcgccattgcttaccatacacaggtcccagttcacctccggaataccccatgtcttttgcctggttttcatagttgtcgtcccagacagttttaccttctagtaatgagtcatgctgaataagacgtaattcatgcacattagtagacccacgcatgaaccaaatcagttctgcaatacacgctttccacgcaagacgcttggtagttactgccggaaatccttcttgtaaatcaaaccggtgttgagtaccaaactttgcaatagtaccggtaccagtacggtcatcagtctcgtatccattttcaaaaatatctttaattaattcttggtattcacgcattaaatttttcctgaagaggagtaaagaaaagctggtctccacgcttttcaaatcgtccaataatagacactacatcatcgttaaccgtcacattaccgtgtgacattccgatgaacatcttcttataatcacgctcaatttcaataggtatatttccatttcggttatatactgtagttgaaccgttataagtgctaagaccattataactgaaaactagaagatgaataccatgcttaaatggaaatcttttccacttcttttggactttgtcttctgatagctgagtgatatcatagtttgcgctcatagaccacctctgaaatgttagtcacttcatcaatatgataccagtgattttctttagtaatgaatcctgattctggccaagtaggagctgctacaaattcagcaggtagagtgacatcagaattcactctatgactttttctgatggttgtttggataaccctatctgcatatggatatgccttctggatgattccggcaccacctatgatagaataattaaggtctctattaaaagtgatagtactgttgtaagaagtatgagcggccataatgtcaccacccaagaaaccgataaattctaattcacttacataagcatctgcaaagaagccatttttagcagttgccaacgcacgactcatgtcttggacaacgattgtcttacgaccaggaagaggtttaggaaaactcataaaagtctttgctccgcaaatcaagatagtatctcgagtacgattagcaaagtttttcatgtcctgggaaatatgtttccatggaagaccatcgcctaaaccgaaagcattttcgtttttgccgtctacagtttttgtaggagcaaatgcataaactatttgaatcatttaaacctcagcaaaatttagacatataaaaataatcctaatataatgccgctaataaaagcggcagtaacagaaattaacaaaactactaattcagcctcaatcatttcttggccttagcaagtttaaatgcttttttgaattcttcaacatcttcaacaggaatccagaagcctgagccatacccatcttcatagcatgggcagttatcacagtaatcattccaatagacagtttcaccacccatagtgaatggagcttccatctggcacagtacttcttcaacacgctctaattcttctgggtttttgtcgcaaatgcagaaattccatttaccacgatattcagaaccaagtttgatgctttgacgttgaagtttcatttttattctccagtagattatggagctatactatcacaagcatagctccttgtaaacaattattcttcaaaatcttccataaagtaatcaatgtcgtcccattccagagattcaagatatgcaataaccttttctctagaaccgcggaggtcaatatttggccaaccaccaccaggtccatgacgcataatcaagtcaaaatcaataccatggtcagtgtcataaaaacgtgtaccatctgcatactccaaatctacacaaataccgtctttgttgataataggagttgctacgatatcaatgtttaatttacccatgatgttttcctctactcgttttgtttcgatgtagatatagtatcactcatcaactggcttgtaaacaattttgtgaaatattttttggaggaataaagaaaaagggacccgaaggtccctttatattagaggtcgttcaaaatatcattcagatcgtcatcgccaacactgtcaccagcatcgcccatgatatcgtctgcggaacgagaagaggtcggtttggattcaaaatcagacaggtctttgtcaaaggaatccaggtcatcgccaattttatcggcttgagctgctgcttttgccgcggcaccaccaagagctgctgtacccataatctgtttaaatttggcttcgttaacttcaaacgatttaaactgagatggagcaacaatttcgctgaggtcagccatattttcggtcaggaatttctgagtttcttcatcattgatgtttgcaatctcggactgaccaaggaatttacattcatcatagttctggaaaccaccgactttcttaactttcatgacgaagtttgcaccttcatacacgcaagttacatcaaccggagtttcacccatatcaacatcaacttcaaccatcgcgttgattttgtccataattttctgaccgaaacggaatttgaatactttgccttcgttttctgggttagccgggtctttaataaccaggatgttagaccagaaagaggttttacgtttcagaagcttatattcagctgggttgctgttataagaatcgtttttactcagatgagcacaaaccgggcaagaatcaaaatcaccgtgggtagaagtacaattttcgatgtaccatttaccgccgtgtttgaaaccgtgattgatcagttttacaaacggtagagagttttcatctttaccaggcaggaagcgaattactgcttgaccattaccagcattatcggtcttcagtttccattcgtttttgtcttcgttagagaaagaagaaccacctttcagaccagccagttgttgttgaagttgagcaggatttttacgcttaaacatatgattacctttttaaatttaacagttgttgttgcaacatgggtccttgcaactggacgatagattaattatatactaatttctttacaagatttgattatgctaataaagagtttcttagcttcagcaccgtcaacgtttaaaagttttttataagcttttaatttagtggagtaattactccaaactaaattatccgttgcagtatcatgagtatttattatatctaaaaacgagtcaagcatgatgaatgtctcgaaagatataacgtttgactgaagaagtttgaacacataagatgttccgactttctcattatattcaaaaatatcatgaagcttatctacattaactttcttggcaaaatagtaaatgttctttacatcttccgagaacgttgttttaatctgcttcaatttacctatatattcacgataaaacacgagggcatcagcatcactgatatcgccaatccaagcatcttggttagctacgaggttactcatgaatatcagtgttaactcttttaatgtatatttctcagcgagtttctcaaagaaatatttgtctctacgcttttgataagctttatcagagacccgcataacccagttatacttaacaacgtcatatcgaccggcaaagtgttgtttgagcattaaatataaaagataaacgctcttaccgttaacgtatctgttattatttccaggcatgcggagacgaatcataataaaaaatccagactattcgttttatgtgtttgactaaatgatggtcgaagcatattttcttctaatgcttctgacataattttttctatgattgcaggtggaatatatctattgaagtttccctcaggaatagaattttcttctaaccactgagttgttgcttcaagataccccattccaagttctgttaccatagactcaatagtaaatccgttagcttgcttatctaacagctgattaatggattcagagggggatacctccccctcgtctttaagcgaaaatagagtcataagcttctaccacttcatctttttcagtttcaaaacgatcgcgtgtacctttatggaacagggcaagcagctgattaaataatttgccttctacaccaagctctttcttggcgcggtctttaatgtctttgttaagttcaagatagctttctgctttcaacttattacctgaggcttctttaatcatatctcgcagagcctgtccatgtaccgcttcatcaaatactacttgctctttttctttcttagccattatattcaccttaaaagttgttaatttctttcattaatttagacagaccggatttaacaaagtagctataaattttaccacgacccggtaattgatagttattataacaatctaaaatgttagcaacaatgtcttcgcggatgtaatcaaaatcgattaacacgcggttttccaagaaacgcttatactgttcttcagtaagcaaatctttaatgttttcgccagcatcaagacattcttcaacaaatgtcattttcgttgaaggagtacgctcaccatcaacatgggtgtaccaaaaatctgaacgaactttaatagaagctacgttatctttcttgtcacctttaataattttaaccatacaatctaaagcaggagaaccggttttagattttaccagtttcttctgcattggtgaccattgcttaacattaggatacttatgcaattgagtaaagtcaccatccgaagaaacaatcatgactggatggccttcgagactgaactttttggttaataccgcaatgctgtcatcagcttcagctttatcaatatcaatgacataataaggcatatactgcttaaattcatcaattacagtacgaagaccttcaaagtatccatcccagtcccaattggattcttcacgggctttagcacggttctttttatagtaatatgctacgtcccgacgccaatacccattaactgcgttatcaacgcagatgacaattttagtgtatccatctttcttccacttaaaagcattaaattttaaagtagaaagaataagatgacgaaccataggagttgttagtttgtcaccttctttatacgtatgaagaattgtcgccattgcaatttgtgacaagtcaattaaaatgacgccttcttttacttggtcttcttcggcgaataagcaatttaaatcagacatttgaacctcgttcaattagttagtacagccattataaatacttctataatgaagcataaccccataggagactctatgagcgatttactgaaacaacatttccgtgcaacgaacggcttggacgcaggcggaaataaagttataaatgtggcacttgctgaccgcaacgttaaaaccgacggcgtctccgtcgagtacgttattcaagaaaacactatccaaaaatatgacccgacacgtgggtatctcactgattttgctgtgacttatggacgtcgtatctggattgcaaataaagatattccaaagcctgctggagattttaaccaggcgaattggacttctttacgtgttgacccgaactggatttataccgtccgtaaaggagagtttgaaattcaatctggtcagttcatcaacgttgactctaacgctgcaggtaatgctacattactgcttccgttagcaccagatgaaggcgataccattgtagttcgtgatattggcgggcgtcctggctataacggaatcttaattaaagcacaagatactggtgcgtctatcgtatttggtgaatcgcgtctgcgtgaggtaagacttacacgtccgtattcacaaattatgcttacgtttagtaatggtgcatggcgtgcgagtttaacagattttggcgatactgccaagatggtagttccgaacgggattgttccgacgcaagttcaggcaggtgataacgtagttcgtcgttatacttccaactcagagatttttattactctgccgttgttcgctaattcaaacgatatcatcaattttactgaccttgacggtacatcgccaattaaccatatgactgtgcgtacgtttgacccaactatctcaattgggactcctgggcaaacagaggttcaagtacgtacttcaggcaccggatttttggtatatgactcgattgacaaaatctggcgtatttttgaaaatgatttacgcaccagagtaagaataattacttctgatgttactttaatgcctaatgagcatatttctgtatttggcacagataacaataccgttaaaacaattaacgttactttgcctacagacgtagctgttggggatactgtcacaatcgcaatgaattatatgcgcaaaggacagactgtagtaattaaagcttctggtggtgatactatcgctagcaatttgaatttactgcaatttccaaaacgttcagagtatccacctgatgcagcatgggtgcaatcaagctcaattacctttaacggaactacatcgtatgttcctgttcttgggcttgcatatattgaagataaagcatccggaaaaagctattggattgtaactgaatctgaccctaccgtagaacgagttgatgctaaagacaatacaactagagcccgattaggtgttattgctcttgctacgcaggctcaagctaatgcggagtcaaacccagaaaaagaattagcaattacgccagaaaccttaaatggacgtcgttctactgaaacccaaactggtatagcaagaattgcaacttccagcgaagttaatcagtcaacaactgcttcttacttggataatgtaatcgttactcctaaaaagcttaacgaaagagctgctactgaaactcgtagaggtttagcagagattgcgactaatgctaaaatggatgcaggaacagacgattttacaattgttactcctaagaagctgctttatcgtactacgtcggattcacggttaggtgttattcaattagtaaaaactggtggtgctcctaacacaactgctgatcgttcttctgctggcaccggtatattcgatcattctgattacaaaaatgcagttactccaaaaactcttcgtgagtataaagctactgtaaaccaatcaggaatagtctggttagcaactgatagcgaagttagaaacggaactcctgcttcttcaaatattcctacggttgttacaccagaatctttgcataaaaaagttgctactgatggagcaattggtttaatccaaatagctacacaaactgaagttaatgctggcggcgtgactaataaagcagttacacctaaaacattaaatgaccgtacagcaactaacaatcgtactggtattgctcgcttcgcgacacctggtgcccagggtgaatttgaagctggtacttcaagtacagtaatggtaaaccctaaattactgttcgataaatttgctaataccgatcgtatccaagttaatactagttctggcttaactattactgggaacctctgggaccattataccatcaacatacaggaagcaagtacttctcaaagaggtacaaccactcttgctactgctgctgaggttagaactggaaccgacgctaagaaaatagttactgctgccgcgttacatgctaaaacagcaaccgaaggagctatcggtcttgctcagtatgctacacaggcacaagttgatgcaggcacattaagtgatagaattgttcctcctgcttacttgaaacagactattcaggtaacagagtcatggcaagctacagacagcgttagagggaccgtgaggctatctacaggcgatggaacgtggaaaggtaatgataccaatggctcaactcttccggataacgggtatgcctctaagggcgtcgcagtgtctccgtatgaattgaaccttacactgaaacattacttgcctcgtctcggtaaagcctatgacacaggaatgttaggtggtcaaacaccagacaaatatgctcgtcgcgatatagcgcagactatttctggagcttggacatttagtcaggacacttcatttagcaataatatttctgtcaagaatgttatatatgctaatggtggtgaagttaaaatttctccaactgctgacactggaattgtgcatgttcgttttcaaaatagagacggaagcgagcgtggtataatttatgctgagcctcaaacagcttcagccggaaacttaaaagttcgcgtaaaaaacggaacaggaactactgctgcaagccagacctacacatttggcggtaacggtacgttagaagttcctaacgaagtgtcaactaaaactctgaggtcttctggaaatgcaatagttggcggaactgttatggttaaggacgttcagatgcttgctgtcgagggattgaattcaatattcggtgcccaatcacagtccgcatttattcgttcccgtgacgctgatacacaaatttttgcacaggattcaactggatcgtatccaattttaactaccaaaaactacgcaagattagctgatggccgttatgtcaagaaagctggtgataccatgaccggcaatcttaacataaatagttctgctatcgtcattacgggttctgaatcctggtatgtgccaacgaatgaaactgtaataagacaaggttcttggactgctgaaatcaaagacgctactaaattgaaaggtcttcgtggttatatggttccaatcagaacaccgattgaccctggtaacccaagcactttagtagtgactgggtatgaagaaaaaactgcagctggtggtgttttaactcaggttggtgtaactacaaacaatacttatcagctttggacgccttatcctccgacaaccgaaactgctgataagcgtttcgcgcatactgtgtggatgaggatttataatccaaaccttaataagtttgatgattggatgcgagtatttacatctgctactcctccaactgcagctgatatcggagctccgagctcagtatcaactcaggttaaaacccttgaagttttggaatggattaagcttggtccagttaaaatctggccagaccgtccaaatcaaactctcaaatttgaatgggtaggtgattaatggctgaaccaattttaatggcagccttcggcgaggatttcgtggaaacacgaatcctctctgaggcaaactctgtgaagtattggctaaaagcttatgctacgcattctaatgctgttccgaataagccagaattgaatattaacggtgcctttgatatgacctcctccttacggagggggattaatgttgttcaagttaatggtgacaggtttattaactttaaaacatttgacgttaccactgatgataacaacgctaataacaaagcgtttgtagaatatgcaaatggattaacttcgggattgtatattataatgacacatgaacgatttcaatccagcccgctaatagacaggtggtttaaaaataagtggtctgcttcttggccaggttctgatttttccaaatcatttccaaactctgcttatgtaggagtgctcggagcagcaaaaggacgcatattaattgagtcattttacggaaatgatggaaaggttaaagaagattccagagctaaagtcgatactgtatatgataacgttggcgatgtaggatatacaggctgcccttatcgttccattgaagacactaatgagtactcggattctactggatatgaatataagcgatatccagttcaaaatgaatctataagcaaaatagctgattatggactatctcctggggattctgtatttttagtatgtgatatgtatgcatctaaaagtcttcttgatgctggttctactactagagctagcctgcgatggttcaaaggctcatctttattatcttcaaacgtatcattagaagttccaaaaaatggagctgatagatggttaagatttgaaagatttaccgctgttcctacagacgctgatggatttactattgtggtatcaagatatccaaaaacgtctgtagttggtgactctaaaatcaaaaaccttgtatttgttcaaacctctcatagcgaaaaactgaatagtgttgttcaagaatttggtgtgaatggtataagaatgaataaaggcgttgaaggaggaaccactatgattatggaacttccaaattcaaaagtcgatccgagcggtgttattccagttcaatcgttcagagaaacatcagactaaggaagccttcgggcttccttttttcgtataaatagaaaatatataagaggataaactatggccgatttaaaagcaggttcaacagttggcggaaatcctatttggcacgcgggtacttttcctcttgtgccggcaggaaactccctaacttatagaggtaagaaggtttatactgagatagataaacctcaagcaaatgataacgacttcgtgtccaaatcccgtggtggtacgtatacaggcgaagtaaaaatagcatatggcgactctggcaagttaagcatgggtccgttggcaaatgttggtattagagtcggtggtagtaatggtgaagttcttatcatcggagggaattcaaaaattcaattgcgcggcggcggaacggaagattccagcggcatagttgaaattgctaaaaatggtaacttaactgcacagactggtagaattaccgctaacgtatttacttctaaacaacagccatctggcgtagacgatttaactcgtaaagattatgttgatggacgaataaatactgttagcaacgtagctaacgcagcagtcaagaaagctggtgataccatgaccggtgtacttagggctaacgctggcgtagttatagtaaataaagcaacatccggtgaatatgctcctagattagatcaggttatttcacgcggggtaacaatagattttggcacatactaagaggtagccatggccgatcaaaacttaaaacaaatacaatttaaaagaactagcacagagaataaagcaccaggtgcagatatcgtagcccgtggcgaaatcgcgttgaatacccatgggcgtactctcgctatctacaccaaagatgaagccgataacgttgttcagcttgcaggtaaaggtgttcctttcttagatactgcaggtaatcttaatgttgatggaactactacgttaaaagacaatgtaaccatttctccgaataaagcgatcaattttgaagcttctgatttaagtggagcattagtacgtcatatcaccggtaagtgtgctaataacgatggctggtacattggagctggtggcgcatctgaccagggatttcttgaaatcggtacgtatgataacggaaatgaacctatctattttgttcaaagaactggtggatcggcgcaagctgaagttcgtcgtttagcattattagatgggtttggcgatacctctatacctggggaccttcgtttaactaataaaacggtaaaaatttcaaacggaagcactcttactttggaaatgggtgtaggcgctaatgacgcgtacattaaaaacctgagaggaaccggtgttcttcaattaactaatgacagcaatttaacgttcagaaattcccaggtttattatgccatgaacggaagaggtcctggtaaatccggtactcttctgacgaatgtagaaaacaatcgtcaagcctggcaatatactatttctgctgcaactgctggaactccacgttgggttaaagtagctacaattaaacacccaggagatgcgtcttcacagttagatttaatgattactggtggcattgattctgggcacggaagacattatgttgattttatcacgttatcaggacgaaatttaacatcttggagcactaacaatttagataactgggttgaatggcgtcgagttggttctcctgataaaggaaagattccagagtattacgttgttaaaaatgatgctgctacagattcagaggcttcatttgatttttacgctaaagttcctcgatacggcaatgggctttatgttacagtgctaaacactgctggatacaacggccaagatagcggtaaagtaattatctatgaaaccaaccaagacactggtggatatggaccagctggaagtattcttgtttcaatgaaacagatttttgacagttacgcaaaaccagatttcggcgatactacgggtactcttccagttaaccgtggtggtacaggtgctactagcgcaggagcagctcgtaataacttaggtcttggtactgctgctgttcgcgacgttggtgaatctaacggaaacgtgatggaagttggtgcttatggcttaggcggtaatggcggtaaatcaatcgaaaacattacctctaatgctgatatgttgacccgtttaaaagcatatggtggtactttctggcgtggtgttactaaatctggtgttagtgttcaaaatggtctttatagccatggctccggtatttttatgaatgctggcgataccatgtcagctattaatatcgactacgccagcgctaaagttcgcgtatacgcagctaacgacagaagtcttgctgagggaaatgttagatacaacgaactttatggtacagcaaataagccatctaaggctgatgtcggacttggtaatctgacaaacgatacccaagttaagaaagctggcgacaccatgaccggtgatttagctgcacctaatttacatgcttccggcaccggtactgcatcagtgtatgttaatgcaggaagcggaaatgctcatgtatggtttagaacaaacgccaatgaacgcggtgtaatttgggcaactccaaatacagcggatttaggacaaattaatattcgcgcaaaaactactggaggtgtttctgctggtgattttagcttccgttctgacggtcgatttgatgttcctgtagcagttaaagtcggtggagcagcaatgctgactaaagacgggaatattacctctggttcgatgtttggtggtaaccttaacaactatttgacttccattaaaaacgacatcactgctggcgataataagcaagtaagtaaaactggcgacacaatgaccggtaacttgactattaacgctaacttaaaagtcgaaaaccctaatggaacaatggctgattttggttcagagaattcggataagtatagcagaataactcttgctcgcaaagttggtagcggtgctgccgtagcaatgcttaaagttactcctgaaggacacgtgcaatttggttatcaaactgcagtttctactccagctcctagtaaatatattctagttaaatccagcggtcttgaggtagaaggggatttagtttttaatcagacatatagcggcgctgaagaggcagttgatatttccgataagactatcgaccttaatagtctgattattagacgatcagatttaggtactcgtcagttatataaatgcgtatcttctggcggtggttctaagataacaaacaaacctacatctgatggtaactttgttcttgaagttctgtctttacgcaaggtttctgataccgattggtcatgtaagcagacctttactacaaagaacggcggtgttgaaggcacatatatccgctacggacaaaatggttcatggtctgcatggaaagaagttgtttctggtgttcagccaattaatttaggtggtactggagcaacttctgcagcttctgctcgtaacaacctcggtgttggtgaaggacaaactgtaaaattcggtaatttagttacaaccgatttaaccgcaaacggaaacgctagattagtcggaagactgaaccttggttctacttccgcaaccggtgtattacgggctaatgaatctggcgcagttgttttaggttcttctagtggtcaaaacatccacatcagagcaggaagcccagatacttcttctggtgaaacccgctttgagccaaatggaaacgttttagttggcggagttctgacgtcttcaggaagcttacaagtaaatggcgaagctgcgatgagcagaagcttgatcgtttctcaaaacataaagaatactaacgataacagttttattctgatggggaaagattctgatttaggtttcgttaaaaaatctaactcaggcgctaagctggtatttgcttcaggaaaatcatttgttgttgctaaatcatcagcaactgccatagctaatccagcttcggaaacttacactgatgtgtttaaagttgacgcagatggaaaccaaacagtttatggaaactcagcagtttctagagctttgactgtatcaagtacagcaactattaatggggttattaatgccaacggcggtattattgttcctactaccaagtatgtgcaaattgccgatgctcctacacagaataaccaagctgccaacaagaaatatgttgatgataaggttgcttctgctattagtaacgctggcgatacttatcttccattagccggtggtactgtaactggtaaccttgacgtaactggcaccagattaaaaacatggcagttagaagttgatggcaaaagtactctaagaggcgggttagatgttagtagcagtcttaaagtttctagcggaaacttagtcgccgctgacacaaccaatgctggtggtctttttgctaaaaacggtaatgtttactgtgatgcaggttcagctggtacaaactctaactactggttccgtgattctgctggaaatgtcagaggtgttatttggtcaaatggtcaaaacggtgacatgattatccgtaaccaaagtggccgagagcttgtattcagaaatgatggatatctgcaattagcccacttagcaccaggaaacacagataatgcaaacaccgtaaatggaatacgtttacagcgcggtgatacgattttcgatagctttaacgcatggcagtcgggtgaatatgttcgcgctggatggcatttctataacgccgctggagttgaccagtggttagcacttacagatactggtgtaaaaatctggggtagtgctgctaatctacgcgttgaaggtgttggtaatttctgggacgttgaaattcgttctgaccgtcgtgtgaaatcaaatattgctaagattgataacgctcttgataaagtgtcgaagctatctggtaatgtttatgatttacagcttccaaatggtgatactaaaccatcggctggccttatcgcacaagaagtgcaggaagttcttcctgaagcagttacaactgataacgataaagatgcattacttcgtttaaactataatgcagtaattgcgttattagtcgaatctgttaaagagcttaaagcagaaattgaagaacttaaatctaaataatgttatggggcttcggccccatctttgaggagatatcatggcagtaacaggtcctaatgtaggaagctcagctaaggctgtaacaggagaatcttcaatgattgcagctggagcaaaattaaggctgggaacacccttttggatgtccaacatgataggaagaaacgtttggaatgctagtataactatttcaggtaacaaccctgcgacaggacctaaggttcgtggcgcttggaatgataagaacagtgcttcgtggaacgtattacttgattctcgtgggtccttatcaggtatatgggaaacaggctttaatttggttgtttttgggctagcagagcctagtaaatgggacggttataatgatgccatcgttttagaaggcagtgggaattttaatgtaaattggcgcgttgatattgaagatggaagtcagttccattttaacagctctagagattatagaggaagacgatgctataattgtacagacccaaatgctttttggaattggctttacgccaatgatggacgaactttccaactgtcgtttacagcatattaagcatatgctagagcaataaatagctctgtaaggagagcaatatggcaagcaaacaatcaataccgttttttgatatgtttcttgggttgctcgagctattattcaaagatggagccacgggaagagttctcttttcccgtgttttcgttgtcgtacttttagcactattggcgtttgctggatataagtctgatagtcttattacagcttacgtcgacagtacttatgacaagtatgataaactggttcaaaaggatagagattcccgatttgataatacagcactcgaacaactccagatagtacatatctcaagcggtgcagacttttctgcggtctttacgttcagacctaaaaacttgaactacttcgtagacttaattgcttatgaggggactttacctagcacggtagattctaaaaacttgggaggatatccaatcgacaaaacaactgctgaatatagcacgcatttatcgggtagatatttttggacggataaggaatttgttttcttaccaacaaaaagaaaaccgcctgaaatatcgtatatgtttagctgtccgtatttcaatttagacaatgtttatgctggaactgttgaaatgtactggtacaattccaaacctgcattatctaacgaaagactaacatcgatatgtggtcaggcggttagagctcttggaagagctaagtgattacttattactatgcatagccattgttcgatagatagactcaaatccctcgttgtattcttcaacgagaattctcttctcttcgtcagttaactcagaaaccattttacgaaagttgctctgatttaactgacgcccctgctcattcttgattccaatttcattcaagaacgcaataaattcatctcgcttctccatgatatgttcagcattgaacttggtcagaatagaagcaacagtaacaatttcttggacaatttcaaacttagtcattatttttcctacaacataatggattatgtgattatagtatcatcttgataccgcgttgtaaaccagtttatgccaattcccaacgagaattcaaatcttccttggtagtgatatactcagcaccagaggacatccagagcccgtagcgaccatcttttactctagccgttaaataccattcctttccaattggacgaaccctacgattcatccagtgacatacgtcaattgcctcttgaaaggacaagtcaatcagacttccaagcgcgattttattcattaacgcttcaagatatctttgtgattcaacgacagattctaggttatgactcatgctaaaaccacctctccgcgattacctaaaatgctttcgatatactcaactccacttataatgtcacctctatcctttgctttaatagtaataattccatacgtgtggaaatctgctgatagactaaacggtttagaagtttcctgagtaaacgtaaacattactgcttgctctaaatgttttacttctaagtcattagcccaagagttaagaactttaagcctaacttgtaaggtgtattctactttaattgctgaaagcaattcaacgcgtttatgatatgccttggcttcatcttctctgcgtaaagtttcagtattcatagataatctccaatatcataagcatcaacgcatttctgaaattgttcaataacttcttcaggttcaacattagcgataatagctacagtaaaggtaccattattccaatcgtgtaccatccagtctccatagccagcattctgtaggtcttccattagttcagaatggatatcttctactaatccggaatggtcccctaatttcttatggagagcttctaggtcatcacaaataatggttaaagtagtacatttggaattattcagaatgcgcattttctttgcctttatgcttttgcttacgcttagattcctttgcggaacgctttttatctttgtgtgctccgcctttattaaaatcatgtttagctactagattttgcactttcaatttccttgatgtaatagtcaatatctttaatcatttcttctgtcattactttgtacatttcagcaagaaacggtttagcgccgccattaaatggatgactaaacggacagatgtattctttatccatgagagttttcatgaatttgctatctgccattttaaacccggcttcattggtatatgtaccccaattatcgtccatcatttctaacgaacgctgaagcgatttacgctgaatttttaaaagcgtaatgttattctttaatgtactaatcattagtataaatcctctgagaataattcattggcgggtcctgatttaggacgaactgtattaacttggcctgcatgtgtagcgatgattaatgcttcttcgcgtgtgaagtactcaccccactggtcaacaaatccttgattgtctccatggacatggtcagaaactaatttgtcacggaacatatctagaacgttcgccatatcaacagaataatggcgagtgcctggaactacaattgttccaccagttttcaattcaaaacgatttgctgcacaaacgatacgacgttgaagtaatcgtccatcccaccaatcagctactttaaaacagatttcaggaatactaacttcttctggctcattaattagagtaccgtgacgagaagcatcaacaaatttattcatttgttcggaaaacttgctcatttaaagaatcctttaattttctgccataaacttttcttttcacgaataccaatctgacgaataacaggttcaccctgcattttctctaaccattccattgagttaacagcttccgccattggaacaaatttagcaagggccttttggtagttatctacatccatgatatgtttaccatctgcattgtagatagcatagcattttgtgaatttcttatcaatgtatccgataaagtgcccacggaaccatacatcccaacaatcagttgggatattagcattcaagttaactttttctacacaacgctgaagttcattcaatactttaaacttgttcattacagttccttaatagagcggatgatggtttcaatgttttcagcagtacgagcgatatctaagtaagtattgcctgttgcagctacacggcaagacattccgaggttagtgaagtgtttctgatgctcttcagaaatcttgtaaccgaagatacggaaagtacctttgttgttaacttcaagactacgaataccgaatgtgcgtttttccagaactgcgatatagttactacggtaaacagtaagttctttcagaggtaagatatcttccatctcaccgagaagtttcatcatcaggtctttgtgctcattcatatcttcagtcagaggacgagctttacgagtattgcgtttcttaagaagttcaggcttgttctcttctgcatagataactgccgctttagagatgatgtcctgtgcttcaccagtgatgattaaaccgtcaccagatttctcgatgagacctttcttaatcagaacaccgatgtttgagttaacagaacctgcgttcatggtttcttcaaggatttcacgcagttcagcagaagtgatgaaatcctttttagctacctgaaccaagatagcagcagttttttcgttcagagcatcttcggaagctttgatgatgtaagttactttagacattgtgattctccattctgttttgttcaatttgtttggtatgagactataataacatctgctaaccagcttgtaaacaactttgtgaaaataatttggggcattctaaggagggattttggagggatatagatttatatggaaggacctggagatgacctccaggttccctagattaactgaggagcaataaaactagacctaatactgcaattacagaacctataattaaataaaattctatcatagttcttccaggtctttcagatactcagcctcaggagttgtcttttcccagtacttaacctcttgggcaagacgttttgcttcctgagcgagtttctttgcttcatcatcagtgatgtgatagatgttcattgaaacaagtttttcagaatgttctttgaatagttcattctgttcaatttctttagtcaactgcttacgagttttgccttggataacgatgttacctgcgataacctctttgataaattgagcttttgcctgagcaagattaaatgcctgcttagtttcagcgattttatgctcgattcgtttggcagtgaatgtcttacggacttctacgaaatgacgaattaactcaccggaagttttgaacttatcgttcagcttaccattctcatcgatgaccacaatgtattgactcattttctcaatgagtttaaaatccttcatgattttagcatgacgctgctcagggtcttcgcttaaagcatagtctttacggaatttcaccttaaagccaaaaccagtcttagaacagtcatcatcataagtgatgtatcctgcatcttccagaggatcgagtactttctctacataagaagcacgctcaaacttgtatggaatttcgcttatatagattgagttccgtgaagtttctttatacacgccgtgcagctcaacagaaccgtcttctgtttgaacgatttttccgttaaatttaggaaactgtacttcaggttccatcatttcgccacgaagtgctgctttagtgcattccaaaacagattcaaaactatgcggaagaatagaagttgaatatcctgttgcaataccacgaacgccattcagaagaacagtcggaattaccggcagataatatgctggcggaacatgttctttatctttatgtgctggagcgatttctgtatctttgtagattttacggaagttgtcagaaatccggcagaaaatataacgacttgccgcagcagattgaaccagacgcgaaccgaagttgccttgcccatctaacagaggatagttgttattccatgtgtttgccatcaatgcaccagcatcttgggcagacgtttcaccatgatgatatcctaaatcagctacaccaccggcgacagacgcaagcttatggaatttttctttattaccgcgagctaaatcaagagcccgagcaataacaaaccgttgtacaggtttaaacccatcaatcaagttcggaatagcacggttttctacagtgtaaatcgcatactcttttgcttcattatcaatgatagatttcaaatcgcgatgacgaagatttgatgccttagccaaatcatcgatagaacctgcttgttttaatagagtgtcaaaaatatccattgtacctaccaaattagtgagccgatttgtactataacatcggaaatgaaaagcacaatataaatcattccgtaaatcattccatagtacaaaaccaaaagaatgatggaaataactacagcagaaactaggagtttcttaatcatttgtaaactcctgcaattttacaaatgcgctcaaacataataaatgctgcggtgaacgcaatgcttccaattactttagtggtaggcacgaggccataccacatgaatgttcctgagcaaatcattagggccatcagaaacacatagcccatcacgaagaaggttctcattagtatttctgcaaagtaaagatgaagttatcattcagaatacgattcagctcagagtaggtctgcgcgtcacttgaatgctgacgagtaaacgccaatgcaagctgacctttgccataaccagtggtgagtggtttcattttattagcaggaatccagaacacaccgtaggtcatgcaattcgagcgcagagtacgacccaactgagaacgtccagaacggatatgagaaagaacactttcaaatcctgcctttgaacgctgtttagctacaaagaaacgagcagatgcaccaatataacctgctttgccatcattgaacatcaaaaaataaaatccttcgcgctcagtaatttcacgagatggagcacctgctgcccaatcaccgttacgaatagaaccgatcagttctgcgccagcgttatcgagatcagcaaaagtcataatattacgcatgttaatttcctcagttgattaaagtttattctccgataaggggccgaagccccttctactaccaaaaatatactactgccgttacaccaccaacccaaaacacaagaagacctaaagcaagcagacgatacacgatgtgtcgtttcatttttgaccttcccatacggtttctactaaggatttaaggccatcagtttgaataatatcaatcgcattaatggcaaaataaattccgaatccgaacacggtgacaatccccagtgctaccgcaacaataacagacagaacaacagttctcattaagttaaagcgacgatcaaaactattacgaatcattatattttcctcagatgaaagcattaatccaaacgttaactaaatcccatgcgaaaacaccaatgaaagtaacgataaggcagaatactacaaagatgttcttcagaatcgtaagtaactttttcattttgttctccagtttagctaacaagattatagtatcaccgaagaacaggaaagtaaaccgttaaatgcacaaattacgaattttttcttccagagctttgactttatctatgtgttcatcgcgagctgcagcggctccattgggatacaatccgccgtaagttgaatcgccattatcacaagcaatgatagtataatgccaattcatagattcgagaatcctatactctttcaaaagttcagctttaatagaagcatttccgcgtttagctcgaagcgattttagttctaagtaactcatgttttactcccgttcagtttgtaaggccatagtatcatggccaatcccggaagtaaacaactttttaaaatttgtgcatgatatacccgccagcaccaactcgtgaaggttttactacttccatgaggtgttcgataccgccactgaacatcggtgtgtaccgtatgacattctgggacacttcttctgcaacgaatataattatacagtctgcaactttatgtttaaacatgggccctagatttattccacttccatctgggaatggaccgtctttaccagttgtaacattaatccatggcttatgatttgctcggtcatgaacaaagtgtgttttaacttcaactctaacaccttggtagtagggatgagctaatacgtcccaggcccattcatacggatcgttgttattatggtcaacaacttgatcgtttacgtatccatcaagaaaatccgctaccacatactctgccggtatagcaattctacatcttttaagaacatcaattctgtcttgagatgggtcgatatctaaactatatcttgcagtatcaatgatttttacttttgcttcaccccttagcttattcaaatctagggtaaatgtccgcaactggttcaatctctgcagggctttgttcatcaatgccataaattcctctgatatgtaattcaccaaaataaacacgatcgtcgtggttacaagtgtctggttccacaacaaaatcatcaccaagttctacaagttcatcacagtgcaaccaagcatagtgaacatcaccttcatgtttaactacatgatgacaaaacactgtagcagcatgatgagtaccacgaagattaacaactttagaatgagatacattaaatggattaatcatgtttcacccataataaaagaggagcccgaaggctccttataattagcgaagttctgaaccccaacgatcagttacatcttctaatactacataaccacatgtacgcattttagcatcgttgtaatcaaccgggatagatactacatcacgcggatgaactttaactgaaacaatacggtcagaaccactaccgaagtgaccgatgtaagatttagagcagacatgcagacctgcggaacaagtacgctgatcgtcttcatctacctggttacgcggcattgtaacagttttaccaggagagttatcaaacgtgtttgaagcacagtccatataagtggaacgaactactttccaaccaatgaagtgaccatcatcagtgatgtcgatatcgtttgcattcaggaaatcaaacagacgataaactgcacgacgagacgggttcagcatcaggttttccaggaaaggcagataacgtttaaagtcttcgccatcttccatagctcgaacgatacgctcagtcagaccagatttcagctcgatatctttatagaacaaagtgccatcttcaattcggacgttaccctgaacgaatttcttgatgccttgttccaggttaatgtggtcaatagcaccagcgatatcaccatctacaagtttctgcagcgcagatttaaacccaggatgttggctatcagcgttataagtagtacggccttcagtaattgaaatgaatttggaacttgctgcccatttaaattcacgctcaactggagcttctactttagcaggaacagctgccgcggcagctcgagcttcacgctctttaaacacacgccgaatagtgtcacgggaaacaccataattctcggcgagctctttcttagtgtacagaccgtttttgaagtttttaacgattgcatctttttggatttcagacagacaggtaacagccatttattcacctttattttcagaattttgagtagaagctccgtcaaggagctccatgatttttacaatatcatcgacgagtttgctgtcagtccgccaagtatccaagacacttgcgatgacaggataatcatctttaaactgttcaatctttttatagaagattgtctcagcatcaccagacagtttattataaattttattacataaagctaaatcatcgttttcatctttaattttacttgtacgacaaaccttagcgattttgtttaattttgtcaggaacggatttttcattccagacgcagtaaacttactcgacaagaaattcaatttatcgtaatgcgcaatatttccacagatacgatttccagtagcatttgatggcatgtactggtcataatctaccttatcaatacacttgatgtattggtcaataataaaccggtcaaatgaaagcaatccatcagcttttgccgcggctttcatagcacccggacgaattgcatagaatttcttaattccacacgcttctgccagagaccgcatgctcgcgatattcatattccaccaccaaacattatctgggaaagtgtggatttcatcacgattgcgaccgattgcataaccttcaagctcagcaatttcagatgatactaaagtctgacggtcttcttcccaatacccgtctttatcaatccaatgcagagaaacattaggagatttcggacgtttctcttttggaccagtatcataatcaggaagagcttttctctgggcttcaagttcagacacacggaatactacaacttcatcagtatccatgattttcttcagctcatcaatgacatgcaattcatcttcattgtctttgattacggtaatgtgtgcccagattggaactaacccagatttacacagagcacgaaccgtagcaatacgcttacccgctttatcgtcaataagaacaaacgctttagttctatcaaccccgcaaatatcagaaatgtttacttggttatgacgatgccaagaactgcttgacactttacgacgagcaggttcatcgcatgaaacataaactgatacttcgttatctacataatatgaacgaattttatcaagattatacttcgcaactacttgtttaatatcgcggttcccaatggtaataccacggctctgaagaatagaacgttccttagaactcagcttattgaactcacgcaagaattcacggtcagattcatacgcttcaaacgctttaatatctgcggtaattacctcttcttcaagagcattcacacgcttctggatattagcaattgtttcttcgtcaagagaaagctcttcacgagatggagtaatgtctaattcgccaagagggaaatgaacataaaccttgccataacgattaagcagccaatctgccttaacatctacaccgctaatcggatatacgatttttccataaactgcatacagaccataactttcgtaagagctattaacgctgaaccagtcggtcttatctaccgggaaatattcaatttcgcgacgaagagaatctaccttcggaggaacagcaccaaacgtacgcaaaatatatgcgatttcatagtgccaggtatcaatatcttctactttaaccggaactgtaatttcaagaccagtttcttcgtcttctttcatatcatcgacaaacatcggacgaatagtaggttcacctcggtttttcatgacagtataacctgtagctttaccatcatgataagacactacgttaaatgtactcgtatagcttaatggtgatttagaaccaagaccaagagcaccgatgaaatcattactattattctttgtggattcaaagaacgttttgtacatcgtcatcatgtcattatgattaagacctggaccataatcacgaattacaaatcgtgggtcaagacgagttggtgctttgatgtaaaatggacgattttcattaccattcagtttatgagcatcatcgcagttagtagaaagttcacgaacaacagcacgaactttatacttatagagtttgtttgacaagatgtcaaaagctttacccgaggccttaatagtaaacgttgaatcatcagcgtcagaagaaccaatgattacttcatcatcacatttaattttcattttattcctatcaattatgtcgtttaatgatttctgctacttcaaggagctcttcagcagtagcggtgttagttgtaaaaattttattatggatttctttgaagcgttctttgaattcctcagctgcttggatgtcaaagaaccgctggatgatacgatattcacgatatatagcatcgttgaataattcttctgatgggatgtaactgcgtttcataatattttcctcagtgatttagggaaattatatcactataactttaagcaagaatcctagaatcatctccaagcacttcttgattaaagccatataaatccattcttataaagaaaaagggacccggaggtcccttagattaccacaccctactaactcgaccataaacctcatgtttagaaccatcaatgttttccacccagatagtaacccaagttccgggcagaggtttcttttcagcgaacagatatccatagtcgcctgagatcaaagtaatccaataacgttgcatgttaattccttctaagtaagggcaatagtacccttactatttattctttattcactcatccatgtcttacgtggtgcagcatcattacccataattaattcaaacagttctttccagttttcaggaagagtgactacatcataaaccgggtcttgaataacacgttcgtattcatcttcttcaagagaaccaagacctttaatataacgaagtttccaacctttgaaatcatctttatggtcttcatattcaccaagagaatagaaccaacgttgttctttacctttggtgagaataataaccggagttttcacaaagcggattctaccctgttcaaacagttcaggccaattactgaaaaacgctaaaagacttgggaaaattgaaccaacaccatcaacgtctgcatcagtcatgatggcaatatttcgatagttagtattttcagcgggttcaccgatagtcaaaccagtgattgcacaaatgtcaaatacttccttgttcttcatagcatctgcagcagacattccccatgtattcatgaacttaccacgtagaggatatccgccatgaagttcacggtcacgagttgtgagcagataaccaatcgcagaatcaccctcggttaagaataaagtggtgtcagcatctttgccatatttgttggctttgatgtgcttagctactttagctttctgcgctttcttggcagctttagtttctgcagctttctctgcagcaagtttacgagctaacatcgcctcaataatcggcatatgaatatcttcggatttcataatagcgttagcaagtttcttataatcaatatcaatatggctacgaatttctccccaaggagaagtcagacgctctttagtctgagaatcaaatcgcatgttagacatatcacgaataaacatgatgacagtcagacattctttaattcgcgctttattaacttctagtttgtacttacgctttaatgctggaataagttcattgctcagttcatcaagaactaggtcaacgtgagtaccaccgtttttggtgtgaatgttattaacatatgaaagttgacggaacccgtcatccgaacgaccaatggcaatagcacaagtatcagaatcctgcactacagcattttcgtcatacatgtgggcgtaagctttaaacttgccttgaacccgtttacccatgaatttaaattcaatatcaggataaactactgctaacgtcatcagacgatcgtgaatgattgattggtcaacatcagttaagccatcagattcaaagtgggtgaaatctgggataaatgacacgacagtaccagtcttgtctttaataaattctttatctttagctggatgttcttcccaagaaacattctctgcgccatttgaacagcggacaacgatttcattttttccatcacaggttgcacccacaaatgtcacagaaaaaatattcgttaacgcagaaccaacaccgttcataccaccggttttacgctcagcatcatcaccaaagttaccacccgcacgaggacgagtccatgcagctactggtcctggaatagtttctccttcaggtgttactacaggagcctgcggaagaccacgaccattatctgttacaataattttgttgcctttgacatcaactgaaatcttattcgcgtgtttgaaattagtacgaatagcttcatcaacagagttatcaatgatttcatcaatcagtttgataataccaggaacatactttactgattggaatttaccaaaaagaaaacggtcatgcgcttcaaacgcagaactaccaatgtacattccgctacgcttaatgatatgttctcggtcactcagaattttaatttcgttcttaatcattacatttcctcggttagtgaaggaattatatcaactattaattatagcaagtaattcttctttgatatacatcaatttaccaagaacctcatggcctcctttaaccgctttatactcgggatatcgtggccgctgtcgttcaaacatagtccattgagcatcactaacgttagcgtatgcatatcgagaatttccgtagtactgttcaatccggtactcgttgttttcattaagtgaaatccactcttcacagacttcataatatttctgcatccaaatagtacgaccattcacgtcattaattggccaccaagcaaacctgtattttccaatagcccgctctaccatttttaactgtcgtttagcacgcctttgcgcagttgtcattccaataatcataatattctcctctggccaacaagactataataccaaaacacggtgtccatgtaaacaactaaatgacccgaaggtcatttattcataacgaattgtgctgttcttaagaaaaagccctgagcacactgttccgttaacaggttttcctgttggcccaatagccgtaaagcctgtgtgctgaaaatcatcctctgagcaagaaaagaacttatatccagtgattttgatatcagtaaatcccgcgttatctaacacgcgagttgcgttatcagcgtcagtgcatccaatcatcatgaaggcaagcgctgtaattaaaatctttttcattttaatttaaccctataagttatattacctactttaataacccggatttctccgggtttcatggtaatgcgtgctttagttcccatcaataatcaccactctttaatccatcgtagtgaactgccggagcagaaaccacccgcttcatttgaccttcacacttagggttaaagcagttaacagtatagtcacgatgggaaattttacgcataatttctatcttttttccacagacttcacacttgtaatcatacattggcattaacagcatccttccatttttgtgttttgaccatgatttgctcattcagtgcacgagtaaccatcatggagatttcatcatctgatacatgggtatcatttttatggcgatttctgaaatgcagccaaagtgcatccactacacagttaataacatctgcgcactcgccttcaaattcttctttctgccgccatggacgattaatccaatcacacatttctccagtttctgaagaaagttgcagcatgacattcccaatgctacggttgggaataggataagataattttgatgcttcaaaaataggagctaaatttaacattgatatgcactctgcagtgctgcaatagcagcgattgcttgaccacgattatgaatagaaagattcataaccaaatcggttggaattacattcgcggaagttccaacttcagtaaagtatttgaattcgctatcaaaaattacaaggtcttcaccaccaacttcatcacattctgtgccattagcccacgtaattccggatactctgttattttggtggtcaactttagtaacagtaaaactcccgccattttcatggagttcatacacaaagtcttcattaaactcataacgtgaagaaaattcttcttccgcttcatcattgacgaatttgtactgtacgccttctttaaaattcattacacaatctccatgtattctgggccatcaactgtgattacacgagcaaaggtacgaactgggacgatatcaccatggttcgcgaatacatacaaccaggtccaatgctcttctttaccgaaggttttctctttctgaacgacaattaagtcaggattgaacagaatgtcttcaaaagcttcggcagtaatttttacggtgttttcagttttcatgttattctcctcagtagttgataagataatagtaccacatccttgtggcaaagtaaacaactttttatactaaaccttgacgctgtgattccgtcggctctacatcggctttaggcagaaccgcatagttaccttgaaatactacatttactaaagttttaccgtcttcttcccactcatcagtgacaagaacatttttatgcagcgacagattagtggctgaattagtagaactcaccgattgggtaataacattgtccagcgaattcacgtgtacccacttgcgcagatagctttcactagattcaacgaattttttcaagcagtggatgtaatcaccaaaatcttcacggtaaatcttatacccagatttaccgtcattacgattaactactttaacgattacaccattgtgaccaacccacttaccaccaattactttaacgttttcacctacaactaaacctttcatcgtgtttctctcagtttgttaatgtagagccattatataacggctctttcataaagtaaatagttatcggtgagaaatttcacacccaacatctactccgaacatataccctgcatcccagcccttagccatcaaagccttggccaccagaaccatcgttggagagatttccgggaggatttcccggttgaaccactcttcgaagttttcatcgaactcaaactcttccattagccacgccccttaggtaaactcagtggatcggtatcttctggacttggtgcttcgcttaggcctagagcataacgttgagcatatttaagcattagaatatccttagcgcagtcatggatactatcatgcgcgataaacccgtcgagcgtaccctttggaagaggggtagttgtcagaccacgagtcagaagcagtgattcaatcgcggtacgaatatcacgctgattccagaacttacacggctcttctttaaatgtatcaatttcttcttcggaaattccttgggctcgttgaacatcgcgaagacaatcaacaaaaatcggaaagtcaaagctctgtccacgacaccagccaaaggaatcccatgggtgaattccattatcaatcagatattgctgagcttctttaattccagcaattactgataaatcgtctggcgttgaggccaggttagcccgagcttcagctgattgtttcttccaccactcaagagtagacttaccaaacaaccgatgacctttctgggatttaaggtcaaacttaatacgatgaccacgtttaaccaattcatcgaagctttccaaaacttcggggtcagaatcaaaggtgattagagcaaggtcaatcacagaagagcttgacacatttccgaatgtttcaaaatcaataataaagtctttagccattttgagcctctagcataaatttaatttcgcgtaactggcaaccaatatattcgctcagatacacctttgggtcatatcctgtgaaccaagtaatagcattagcattatctgctatatcacgaagctcattcagaactgtatcaattttaatgttaatagcacgcttaacattgtctggtgcttcaaacttagattcttgtaagccaacaatcattgtttgaaggtcttctaatttcaattcaaacatattacctcacacataaaacacatcatatcgaccacgagtagtaccaacatataataactgctgtgcgagagaagcatctgccatgtgaatgcatggagtataaatgaagcttctgtcaattgagatgccctggg

SEQ ID NO: 20 - DNA, 167337 bp, unidentified
  source 1..167337: mol_type = genomic DNA
ggaggcggagggtattactgcaatgataacaaatacttagtcttgtagcatagacctgtaatgtcatccagaacactttggagggcggcaggaactgacttgtagataccatcggccttagccagaatgaggtctagcatttcaatggtgtcctttggcagctctttctgcgatggtaaagccggtgtataactcttacctgagaatcctaaccactgctcaccaaaagcatctatcaaatctggaatctcgttaaagaaaacttcatacgctttatgtctggcatacgatttggtatcaaaatgcgctgaatgaaaatacgcctgagacgccataagtaaaccgatgaattcatcttgtggagtaagtttaccgtcctttacaaaatcattgaatttcattatcgagttgtatcctcatgcggttagcatattcttcacctgctgaacgtcctaaagaatcgcaatctttagaacaagactcactcttccatttactttgtataaaagaatagaactgttcagactcttgcttactaggctccttaaatttagcataaacttgtagagctccctcaacatacgagttataatccgaaatgtcgttgtgtgatgcagctgggagtgaaatcccgcagcccaacaccagggctaagcaaatgtgattaaaggccatacggcctcctattatttttgtccagtattacgtttgtgctgaagtacagccttaacttctttgaggtatttgtccagcttacgtttacgggtataatctgcttttgaactgtgctgacgaatttcttcctgaaggtgcgaaataccatgcccaatctcacgacgaagttcgtccagttgttctacagtaagattacgaagttgcttttcacttaaatgctgcatatacacctcatcagttagtaatagtatttatataagtatgtgttacttaatcccaaagccattcgcagatgccttgctcaatggttctagcaccagcttcgtcccagttatattcttcgtcatacttcaatgcgcgtttaatttcggctttatgaaatagacgtgggatcggcatagcataacgggtccaacgtagagttttccagaatccatcgcgctttgatttagcaatcagtttcttggcctctagcggtctttcccgattttcagaaatacgcagttcaacatatttctgttgggtttctttatctttctgagttttaacgtattcgttatagcttttaatataagcaaattcgttattattctgatcgttccatttggaagattttactacatgccagcctttacggcgaattgttctagacattattacctcgttaagttaaagtacctcaacgatagtaaaatcctgatttaaaaaatttaatattcatgaatagatgaccttacatttacatttaggacattcaggttctttatttttaagacgcttggtagctgtctttggagcagtgttgtaatcatatacatgaagacaacggtagcacatcacatattttttcatattaaaccatcaacgaaagcaatattacgtacagcaagaatccaactacgaatcctagtactataccacccgctatagcaaataagctactcatgtttaatataacacccattcatattagcaataaagtctttaccctgtgccaatactttacattcggaatcaagacgattttgaagttcttctcgtctatcgctttgaatagatgctgctacacccatccaaatgaatagcatacttaaaactagcatcaggagagtattatacgttcttggcttcatcataagcacctaccagttcgcaccagtgtttacgacaaagagaaacgtatttgtcttcaccaccaagttctactacttcaccatcggtaatagcatttccgttttcgtcaatacgagctaccattgtagccttacgtccacagtggcaaacgcccttgagctcaacaagtttatcggctacagaaagaagagctttagaaccttcgaataactcgccgcgaaaatcagtgcgaagcccatatgccattactggaacatcatacaagtcaacgattttacatagctgaagaacatgttcagcagtcaagaattgtgcttcatctacaaatacacaatgaatatcacgttgtgtttgtgcccacttgaaaaactcaaggatatcaatagattcgtctactgtattagcttcatgacgaagaccaatacgagaagtaacttccgttgccgaatcccgagtatcaatagcaggtttcagaatgagagttcccatgccgcgttctttatagttatgggctgctgtaagaaggttagctgatttgcctgcattcatactcgcgtagttgaaataaagctgtgccattaaagtgtctccataaaatcagaaatagcattcttagaacgaatgagttcatcgtattcttctggtagaccatttccgtaaatggcactaatagctactacttgctcggcacctgcataatcgtcaatcaactgccacagtttatttttttgctctttagtaatcatctatttacctctaacaagacgtatttagcttttagcctcttcatattctaccactgtaatgtcaatatcaggggttgctaaattaataagtttctcaattagttcccaatcaccgccagcaataccagcaccaatctttggaatgtatagaggacgattataaacaatacgaccagaatttagttcatggaatgcattaaaaattgcgccgtaatcaacatttggacctggagcatactgagtatacaaattatagcaatatgcagtgccattcttgtgaatggctcgagtatgagttccaagcttggctaaattattgtcataataacggtcttcatcgatgtcaatatcgagaattggaggatatgctttagcaagttgtcctgctacaccagcacccattgtagtaaagcaattacatccatgagcaatatcgcattcatgcttcatgaataattctacaatattacccttaatatatccagtaatcatttattcacctatggaattttatatgttgcatattcattaagattattgtatactcttaaaaatatagcattgttacaattaaggatagggttcagcactccttgttctttaggatgcattactccgtcaatagaaacgccatcgctctgcattccacatccgcgagcattatattcgacaagtggaactattacctggtcatctttatcttggtaattataaaatgacattagcaattttctactgctaggcacaaatgctatttcaatattgttcttgaatggaccgttgctttctattttagtcccctgcgccgctagtacaggttcaggatagcctgggagcttttcccaggcattaactgaaaatgcgcagcataataaaatagctgcttttttcattttgatgatagtcctgacatataacgagccattaattggtcacgatacattaaacatatattttcgttaggagcattgacacataaatctttcatgctcttagccttacgatttattagtgttgtccactgggccgggctacgtgaatcttttactccatcgctgaatgctgaatctaattcaagcgctaatatatcaacacattcagagttcgtattgcaaaatgttttagcgatacgaagtgaatctgtcattgaattttcagcattagcagagaatgccagtaccaatccaagaagcgcggcgtactttaccattattccacctttatatgtagcattttatgtttctttaagaaattagctttctctaggacatctgacgcataagagtttccccttttgacattccatcctgcattataactagcaagagcttttcgcatattgccgttatgtatatttaaccaatatgaaagctcaatatatgcccattccgcggaattctgtctagatttaagcatttttcttatttcagaatcactaaggtttttgccttctaatttagctctggctttaaccgtaggcaagtaattttgaaataccccataagaatgatgcccctttcctgcttttaaattggctcctgccgaagattctttccatgatatagcagccattatatatcctaagccgttattatcatatcggttatgcggagatttttcctttccggatttttgatattgctcaccaaaattatatgcgtaatgtaagttgtcaagttgaacattactgaaagttggctcagacccaaaggccgttgaacataaggccattagaccgataagcgcttttttcatgtttacctcaattaatgtgtataacttttgtgctgattttacctttcaaacgtttatcattaacgaatgccatacgacactttatactaggtccttttcctggtcttggaatatccatggtaaaccctagccacagatttccatccgtaatttctaaccgcattggcttatactcgatgttttcatcaatgtcttttgggtcaattggaagccaaggcattgctaagaattcattaatttctttaagatgattaggaattttggaaagaacagagaatacatactcttcatcaatttcacgttgaatagcacggtccaacaaatgatcagagtacttagtgaagaaaggctctttaccctcggctttcgcccgggcacgaacagataaattcaaagagcgaaaagcttcctcaaacttacgacgcagtttagttctgcgaatgaatacttctgggttagttgacatagttcattctcctttgtttgtagggccatagtatcatggcccgtaaggaaagtaaactactttttaatatttttcttctggacagaacactgcccggcaagcccacatagaagcttccttcagtttctgttttgctgtacgaatctgggcaatacgttcgtatgcttcatcgagtacctgcttgggttcattggctgactcttggtagttgattaatgcctcttcttcaagagcagtaaagataagaccaagacgggtttcagcgtctttgatagcattcactttaccaattttttcattggtatgtggcttgtatcctttaatatcttcgattgacattatagtgcctctgtgaaagtacgagcgataacgtcgcgttgctgttccggagtcagagagttgaagcgtaccgcgtagccggaaacacgaatggtcagctgcggatatttttccggatgctcaaccgcgtccagcagggtttcgcgacgcagcacgttaacgttcaggtgctgaccgccttcaacttttaccgttggctggtattcaatttctacttcacgcgccttgtagccataaaaagtttcagcatccgtaatagtatcttctttaagaacttttgaaacgattactcgtgcgtcatcaccatcttcgatgtaaatggtgcctttaagttcaccttcaagaatttgatatgctttcatatttcctcttaattagattctttattccaaccacgcatgtacgcggtaattacgtccatagtattccactcagtagaatggaacttggatgcagcctgcaagtacgagattttaccttctggcattaattttacccgtgctaaacgttcagaaatagcagcgtctttccatgtagcaaaacccgttggtccttttaattcttctttaagacgaataacttctgcttctaattcagattctcgccataagcgttctctggcatcattagcataaagtatttcttcatcagtttctttatcgtactctacaatttcaataggctcatcaactccatatccacgagtgcctatatacgttgtagcttcttcccactgttttgtggcttcattccaagttccattctgatgagcttcataaaaatcttgctcaccagaattactgaaccaatcacagaagctttcaactaaatgtggaggacactttataacaatttcagccattgcattgttttctcttgaatgcgttggtcatatgtgattaagcttgaactaatcacgcctttgagcttgccagatataaactcaattctaaaattaggatagcgattcatccacttcgtgttaggagcattagaaatgaattctgcacctttaaacggaccagacagaaacttgtagcgcttgtactcaagcaggtttccagccgtaaccattgttattaattgcttcatatcggaaaatcctgtattttccattactgtaatcatatcaacaatttctgtctgtgtcatcattgcattcctatcacgaaaaataaaggtaaggtatcattaggcatagaccatctgatagcttcctggtacatatcatagaacttcatcatatcgggaactttcattggttcttcaatgataattaatgctcttccaaactttcttcctctaaacttataagaggaatcattggatagaaattccctgattgtcatcggaacaattgatttagctatctcgttagccggtaatttattaattaaatgcgatgaattatattctcgtagaataccttccatcagttcagatgattgtgtgtatcgagtagataagattataaccgaaccatcttcaagcaaccaatcggtagcgaattggcataaggctgcggtctttccggtttgtcttccaccgtctagacgaagggtaccgtactctcgcataaggcaagacggttcataaaaactgtagttgggattattcaatcgtctgtctgcagcgtctctgaaagcatgcatcagggtcaaataaatgggagttaagtgtttcattttagattccagttaaaggggccattccttggcacatgtttaatccatcgacacactatgtaaaccccttaccgcacttgggctcgaccttattacaggtaggaaaagctacttcactcagaggactcgacgttcatgaggagaggtcgtgttcggctttattaggaaattgcttacttaattgatttagcgtaacgaatagcgccgcgatcgtttacgaatgcaattttaccattacgcatgtacatggtaacagtacgttggtaaccgttagaagttttgccagactgataacctactaatgcaaagttatcttcaccaggtttgttctgcttagacttaatacgctcatgaccaaatgccattaaggagcgtgcatcgccagatgctactgctttgcgagaagactcatcttcaatagaagaggtgaaatcatcgaatgaatcaaacttagcatggctcttattatataacttgccgtctactacgtagttatatccaacaacgtccatttcaatttctgtaccatcttctagcgtggctgtcatcttctgaccttttttaaatttcagaagattacttccaacagattcagtcattacgccaactgttgctaaacgggattcatttaaaaattcttgataagttttcatttattttccttgataagcggcccaagttccggtccgcatagtttcaattacacgacgagcacgattaggtgtctgacgataccaacgtgaatttgccagttctttggcagcagcatcccattttttagcagctaagagcttcatggaagcagggaatccagcgacaccacctacacccatttggaataccatgttaattagagctgctctacgaacatcatctaatatattatataccgggcttaatgtagcattagccacaatgcccttaattgctttttcaacatcctttgcaaaaattacttctgcctcagcctgggtaatttggccaccagtagaacgacctacaagcttgtccaggttagaaatagccaaagattttgacgggtctttagtcagtaagtggccaataccaatagtccaatacccttcggtatctttataaattttgctatcgtatccttcatcaatacgcagcatgccaaaaatatccataaggacctcctattaattataggagtatttatttggccctgcacttggctatgaataattcaaggctacacttctcgtatggtgtccatttacctttccaccacacataatctcttctatcgtcctcgggcaattcactaaatcccggatatagctgttctgctatataatatgctgattttgtatactcgccgtcaccgaagacataccgtgacttcattagtgtacgtgacaacttatctcgaggatgaaatatgctaatccatcttccgtcacgaacaaatcgtagttcatgcttataaatgtgtggaatgcctaattcaacagcttcttccatagtaacctcactgggctgtgctatacatctgtgtcatgattttatacaaacttggtcccatcacatatttccattgagaaggtttaattaaagcaaatgcgtcgatttccgggaaagaaattccattttcatctttatggtaagctgtgcaacagcaattcttaaacacttctgggctcacagggagcatatatccaaacaaatggatatccttattgctggcataatcatgtcgtccgaggtcatataagaggtcctggtcaaacccagtaaaccctgtttcttcctggcattcgcgaatagcagcttcttttggtgtttcaccaggctcaacatgtcctttcggaatatcccatctagagcctctgccctggacatatgtatttgtcatacgacccatgaaaagccgtttgtcatcggtaaagaataagattcctgcactgagctctttcattggcattcattccaactttcttcaagaatatcttccatggcagtatagaccatagactctagtacaccatcacaattatatgaaccctctaccgagaaatcacagataggtccattaataccaagcagttcttctttaagtgaaatctcgataccgctcagtgattcattatcgctgtaacacagaaggcgagtatcaccattttcaaattttacatgcactgcaacagccattatttcatctccttaatccaggataaagtttcattacgagaatcatctttagatttttctttctttactttgggcttatcaaatacgccccgctgtcgctgggaaacgaattgcaaccaacgagcaagcattgcaaaccaggttccaacccctgacatccaacctagatagtacagcgtatcaccaaatactggtgaaaagaagtagaacccccagaatatcccaacaccaacaaatgttgagaaggaaaacaggataagcagaaataggaagaaatacaagaaatcatcatctttaatcattccacgataacaagttttaatcattttctgcagctcctaatccaggtgttgaaatcttctttttctttccacttcttgtatttcatacggtaagctaaaaatgtgcagcaattaatcaacgcgataattagcatccacatgaggctgaatgcgaaaacacctaaaaataaaagcataatcataaactctgagacgttcaatccaaagaatgtccctccaacaattacaaaagcacaatataaaatccatgtcacgattccaaaagctggcgccagcccatcttggttccaaaacccgtcaggtttacattcattcattttcttctcacctctttaataaactcaaacgactttttgcggttccattcaagagttaaattcttgcactgttctttccattcagctttacgcttataattattgcgagaccatttaacccatcgggaacattcaattaatcccatgatgagcaaactagttccccaccatgcaagcagaattccgaataacactgccggtgtaatatcagttaaatgcatgatatcaatcgcggcaaaggtacacattgcgccgacagttgcaccaataccaggaacaagggcataatcaatctgatcaaatttatagacataattataaacgggaggttcacttggcagatataagttactcatttctgcaccctctcacggcagtatttgataaattcatcaatgattaattgtttgcctaccatgttgttagagtcaaacatacccatgacttttggtggtaattcattaacacagtaatttaaataattgctataatcatcctgagatgtcacgtatttaaccagattaataccgagacgataactagttttattatagataatctcgataactactgtatatgttgtggagctagaagtaaaatatccatcggcattagtacgagctgatgttagatttgatggagaatcgttgaaagaataaattccgtaccgaagtgcaaagatatctacaagcttaactccgtcggaaatagacgaaatattagaaattaagtttttcagcttggaatagtctttaagaacgatagcccgcggtaaaactgtggtgttatacccgttatagcgagttttccaattttcaggccgagtatcagaataagcaaatttctcaagaatatcagtgatttcttttgggaatcctgctgcaattaattctttaatttgaggtgttgccattggaatatctccagcgcattcatataacattttattatccaagttaggggcccgaaggccccgataaaattacttcagactttccagatattcctggacatcagcagtggtggtttcaataccaggctgagtaccgctgaaggtttcaactttcatcatgatgtcttgtacatctactttagcgagttccgcgatttcaatcacgtcatcagcagaggtaatacccagagcagaagcattacgggtctcacggatgtattcgagtttcactgccaaatcaagacgttggtcatcaagcttaactacggtttcttcaatttgggctcgcatttctttatattcggcagctttatcacgtaaagccttagcagtacgacgatacagaagacctagtttagcatgggtttctacattcataccttctgccatcaagcgacgaatttcacgctctttggaagcacctgcctggtctttttcgtcagcaagtttcagcagacgcttttcttcatttaccgatttaacatgcgtggtacgcagtttagtgatttcatcaataatacgatttgccgcagtggtatactggtcttcaacagaagtgttctgtgcaacaaaggtaccgaatttagaacggatgaattcaacaagttttttcagaatagacattttatttcctttcaatagttatggtggttttattcgtacggattaatccaatcataaacatatggtttaatgattagaccctgttcatttttgctgcgctcgaatatctcgatgtaatcagtaacgtatgactctaacccgagaataagaacagtttctttgccttcttctactgttgccttaattaggcgctcgatagctattttagcttcaagacgtatatcagcaagagtttttggaactatatttgctgtatccattactatttcctcagtaggtggggagttcattataactccccaaaattattagcagttaattaccgcttcaattcgtttggttaaagcactagcagtttttgcgaatttaatttgaacagtttcggtagcagcttcttcatggtaaactcgaacgtagtactcttcaacagcaggccaatctttgcgaacatgcttaatcaaatctttcagttcacgagtttctgctacgttgaacactgcgtgttcatgttcacctttaatccaaatcgcgcgataacgatcaggagtaccgtaattgttataaccacgttcaatttggataaagttgaatttagacattttattctccgttactctgctttgttttgatggagctatagtaaccgagttgatagaggaagtaaacaactttgtgcaaaaattttagggcatctggaggaactttctggaagttagaatggatttatacagccggggatacaaaaatgccctagatgaattctagggctgtaggattacattttattatacattgtacgataattctgtctgacgactgagttcaacaaggtgatgattcagtttagctaaaagcgttttcacttcaccgatatgctgagtttcacgtgcagaaggtttagcaccttgggattcacgatacttccacagattatcgaaatagaattgaactgccttataaagaggaccattatctcttactagcggaagagctttatcgatagctttaaacagttcacctgaaccaatgatgtctccatggtctccactaattttaaggccaggaatatttttaggtttcgctttaaccggagccggttttgcggccggtgcttgtgccggagaagctccacgtgcaggtgtagtaacctttccgcctaaactttcaaaggcagctgctaccttagcatagtctttaggatcgctaatcccaataccataaatcttttccacagaagccgcaaatttgctaaaatcatggcgttcaccacgtggaaccaataccagagcgtcacgccatttcgatttagtcatgcggccaggagctgcttcaaaaagctcttcttcggttaaaaaatctttaaatttcattgcaaaaaaatccttagtgtcgattaaattactatttatactaaaaagccccgtccgaagacagggctctaataatcgacagcatcacccactggcagatgacctgcgaaattcatttctttggactcggaggcatcagtctcatccaaagaagtatagcgtcaggaggttatgcttgcgacagtgaacaaccgactagcggcaatggacgaaccattctcttctatctgacgactcaacgagggtatacgcaagtttcccttcgaattacattacatcgtattcttcaactagatactgataataggaatcgtttgcttcaagttcttccgcatatgatgttgcttcggatttagtgtgaaaaatcttaagaggcaaagaatattcttcatagccatattcacagttccagttattttttactacagcatatactttcatattttcctcattaatttttggtatgggtaggaatcgaacctacaagccattcagcaccagggcctcacgctctacctatttgagctatcacataccagaatttggtgccgattgcaggagtcgaacccgcggcatcttcattacaagtgaagcgctctaccaactgagctaaatcggcatatttggtgaagaattacctacgtcactaggttggctgttctgtccacttaaggcttgcagcaggaacaccatggcttttcaccattgatcctctcacgactgagacattcttcataatttggtgcaccgagagggattcgaaccctcaatcctcgcggcgggagattttaagtctcctgtgtataccagttccaccatcgatgcgaaatggtcgaggcagaaggattcgaaccttcgacctgcggattagaagtccgctgctctatccagctgagctatgccccgagattgttcaggcaggacttgaacctgcacgactgattccgtcagcgatttaccaccgtcgccagcatatgatgcaatatgcgagctcaaaaggtgtccgtcaccatgtctaccgatttcaacactgaacaagataattatattactgattatttatagcatttcttaaacgataaagttgattacagaattcgcgttcagtcaaaatcgtttcagaaattttatttttacccatactgtgagtgagcgtagcattccgggtagcagccaaagcttttctgaatccttcatttttactaagtgcatcgtatgctcctgttagtaaattctgatacgcttctgaggcacggtgaataggaacacctttccaataaagtgtttgagttggccaccaccgtttctttttacctttgaacttagccgatttaccaactaatgtacatacatgtgcttgcatttcaggcgaagaaaatttgagggactgcaagaatccctccattgaggcacattctacgccatcatagataaatttatgaggagcaaaattactcaaagcacatgatggatatgaactacctgaaccaatatccattacttttccttcacgtatttcaaccaatcaacttttaatgggctttctttctgcttatacgtaattccaatatggaatgcaaccggagcatcaggaatacgaatttcttctttaatgtcaaagatttctactttctcaaatactcgcatgaaatcatagtcatattcaattggattacctagccaagcctgaatagcatacataacttcatttgaacaagaataatgattatctaaataagcatcaaactcttcgtctgagcaatcatatgcaggaacatcaacaccaaagaatttcttggaaaattcaggagttacatacttctgttcagtatgaagcttttcaagaattgcttcatggttgtaatcattatttccaaggtattcaccgcggcgaccattagaagagaaccattcaagaacgtgaattacttgattaatctcttctttttctaagccataaaccatttgggtagaataccgatcggcatcattttcccaagtggtaattgccattgctaagcctttaggaataacttgtccaaatttaatatgcatttcaatttcctcagttgataatttggtgaccctggcaaagactcgaacatgcaaccaatcccttatgaggggaacgctctaccaattgagctacagggcctttatagaaatcttatgacttttataaaagccctccgaagagggcgccttgtcgggctatccacctgctaggcagaattactcacacataaaatcagctacttcccagaagtcattttcaactgctactttaactaccggagaaatttcagacgttttaatagaaacaattacatcacctgcgacagtttctaccagaccaacgattttctcgctgcgagcaacaaatttactcaccggatggaatttgccggtagcagcgaacatagcttcttggtcaacaatcagtgcgatacgtttcattctttttccttgtttgttttgatgtagtaataataacaggttattcttgtagcattaaatctcgaaaatcgttccgttttcccacattgttgcgaacataggagaaaccttaacgaatgatttgcttcgcattgcaacgtagtcgttatctactttagccaatcctgaagcaatatcagtaatacgaccgcagcgcatagaaccacgaccacctttattatatgtacgttctccgtagaaaacgatatcgccaacttgtacgtctcgacctttagaatctttcatcatatttcgcctgataaattcgtttaaaatcagtaattagctcttctacatttgaagcattagtaaacggaataacttgacgcagtttacttactttacagccagaatgataagcaataacttcttgaatatcacgctcactgaagtactcatatttgattaatgcttcgtatctgcatttaatccagacccacatacctttgcgttcatcaaaagtatatgcaaaatcagcatgaagcattaaatcacgttcagatttacataatcctaaagcaaaattagttggacgattccattgtaatttcaccgtaatagcatttactttattcgcaacaccaataaaaatattcattctatttccttcgcttgtttttggccttcttgtcgtgcacgagaacgtcctgctttatgcagtgattcgtaatatgctcggcgtctatcaatgttttctgtacgatatgctttcccgaaatgggatgttttgaagccgtaatatttcataatataattctcaatggcaagcgattggacggtatgcccggcctcgaaccgagtcacattgactttgcagaatccatgtgtttaatatatcacccatactcgatagcatatctgaacgagactgcaatcccgctactcagcttacgccatcttgtattgtgtcataccgttaatttggtctccatagaatgactcgaacattcgacctctccatcccaaatggagcgctctaccagactgagctatacggagtaatttggagcatccaaagggaatcgaacccttatcaagtgagtggaagtcacctataatagccgttatacgatggatgcaaatttggcaggccctgaaggaatcgaaccctcatcactgggtttggagcccagcataatagccgttatactaagaacctgttatttggtgggagtaactggactcgaaccagtcaccgctcgattatcggtcgagagctctaccaaatgagctatactcccatggaaagctaatcatctgattgttgatgtaccactgctatgggcagcgtttaactttcataaatttggcggagagtaaaggagttgaaccctcaccgtttccgatggcccggatttcaagtccggtttgctaccactagcgctactctccattaattggtgaaggaagtgtcatatagacacaattcgcttagcgacagccacagcgttttgcggaccgtgtatttttccaccattccttcattgttggggtgaccgatgggagttgaacccatgactacgagaatcacaatctcgagttctaccaactgaactacggccacatcaatattcactccatccatcatgaggacttcatacgaaattaagagaagaatgatcagttcaacccctgtagacgcgttgaatgaatattaatttggctggactatctggattcgaaccagagataccggagtcaaaggccggtgacttaaccgcttgtctatagtccaattatttatttactaattttcttcctttataccatccttctggtataggggaatcttttgaaatctttttagcttctattccattattaatccacattgtgccaaattgtgaattttttgaaccggattgagctagtttcagtttatcagaaatttttcgtttagtttcagaagagtgtgttttacctaaaaacggatttccatttttagctatattagctttaactgcgtctgcaatgcgggaacgtgcatctggtgtaattccagatttaatcttatccgaaaaattcagtttaaatttagaatcatttctaattttattactggttgaatttcctccaagtattcctcttgctttcatttttgacggagtccaatatgttgagttaacatagtcaaatccaccttcgccaccaagttttaaattatatacgtttcctaataaaaattctggtgtaactatttcagattcctttaaatacatctcctcagatgattcacaataatgaataacttccttggtaaagttctcaattccgtattttagaattgcctttttaattaatacacctgaacccatgtagccatcattgatgtcatcagttttatgggctccaacataatatttaccatttacgttattggttattttataaatcaaatagtacataaattattctccataccaactatgtgataattatatcacatggtacggataaagtaaacaaaagaggcggaggcaggactcgaacctgcgcgtgtcgggatatgagcccaacattctaccaactgaagttaccccgcatttatccgggttcttgaagtactaacaagtagcttgatgtagaacacgctaaagatataatcttacgaatatagagcttattccgtgggaacaaacagcttcgtcctcggcattatcttacaggactcaaactcatcttcaagaactgccacgttcttatttggcggacctaacggggatcgaacccgtgctctctcccgtgacaggggagtattttaaccaactaaactataggtccataattcgctttcagagatactctggcacgatgccgaagcaaaggggaacagaactctcatcaccttggtaccagatgaatcttgtttagcactctgttctaagatgtatccctgaaagcgaactttcaacgccgtaagaaattataagcacgtagttatcgttgagggaactcgtacacagggaattctatgccgacgatttatcagaacgtcttctgacttcttcatttggcgggccgtgcaggtatcgaacctgcctagtcatttctgacacggattaacagtccgtcgcttaccctctcagccaacgacccgaattggtgggacaccgaagatttgaacttcggacacccggattaaaagtccggtgctctaaccaactgagctagtatccctaaatttggtggggagtgatggagtcgaaccacccgagccttttgagcaacagatttacagtctgtcccgctacccctacggtctaacgccccaatggatatttttatttatactgccctgaaattaatcagagcagttgatagattaataataacaaagaaaacctaaagcatattacacaatcggtgagctctttgatttaaccaggaataccctatgcggtgaatccatatgagagagcaatacccggtgctcaggaattggacttgtatggaacggaaccacacgataacctttaggcgtaaatcctagcaaaataccaacgcttgctgcagaaagtgacccgccgcaatagtatgataccaaatcaccaggctggatttcattgtcaagagaatcagttttgacatgcttaggcgtaactaaatcattaggaattggaacgccttgtgcatcatagtattcatgggcaagaagcttataattctcttgatagaaagtattaaacgcagctctgatattcatcacaatttcctcacaattaatctttgtatgcttcagttgaacctttagcaacggtctcaaatcgggaattcagtatctcaaaatagtcttgatacgttccctggagggcttcatagcattcttctaccgtagagtagacacctctgatttggtcagagccaggagcaggataataattagaccaagttaaaagtgcgtacattacttacgtttccagctgtagtgagccaaaataagaagcactgcaatagcaagtagtgatgaatgcagtgctgccagtagtgcacctagtcctacacccaaagtaacataatcatacttagttacttcttcacggtttaaatcatagtttttgatgaaccactgcttaatctttttcatgtgctattttatccattatgaaagaaatgatacccattagaaatgcaacacttaacactgatactgtttcaggaagagacataaaggctgcacctataatgccaaaacctaatgctcccatgcagattgttgatgcaacatttctaattaattcacaacgtttcattttattctcctcaagttgatagggttatagtatcactactacaacccgttgtaaacaactttattcagcgccagcggcttttaaaagctttttaagattagcagaacctcgggctgaaaaagttaccttaccatctttttcaccgatgctgccagtcaatttagaaagtttatcactaggaacttttttaaaatcggctaatgtcccgtcaacggtttttgtaacaatcggcagttcatcatcctgtcttttagcttctgtaataaattcttggtacgttttcatgttgcttccgttttgttagtttgtttttgatggagctatagtatcaccactaggaccggttgtaaacaactttgtgaaataaatttctatttcaaatcttctgaccagttcagttttagtggctcttggtactctctatcaagcactacaggtacttgaacttcaccctcgaagtgagctggaccgacattgtagctgagagtaatgtgcggtgagtaatctgggaaatcgtgagttgctcccagagctcttgcatattggtgacggaattttaagtattctgaatctagtttaagaactagtgtacgtccgtcttgcgtgtcccatacttcaagtttacctgatgtagcaacttcaaaacttcctgaagcgcaaacgtatggaacatgaactcttgaatagcatatcgtcgtatgaatcttatgacgaggtacaggattagggaccttcaactcacgctgaaggtcctcaatagcatcaagagttttctcagagaatttagcagctacatatagaccagtgctaaaatcactgaagttcattaggcatcagcttcttcagtagtttcttctgcgaactgtgcttcgatttttgcaaccaggtcatcaagtttaacctgaccgtcttcactgatttcaacgccggacacagcaatcagtttctgtagtacttcttcatactgtgcacgcagagcggacagaccttggatggtttcagacaggtcaaatacacgaactttcaaagtatcgacttgggcttgcagttgttcagtagtcatttttgaattcctaatatagtgttgatttttgaataaagttcttctagagaaccgtcgttagttattacgatatcgccttcgcgaatcggaagtccacgctctgtgacgtgagtatcttttttagaaccttcttgctcaggacgaactacatgaataactgtagcacccatcgccctggctacatcaagttcatggtcttggcgggtatctgggacaatgaaataatcataatcaccaaaagtatcagccataaccaaagtgaatcgtttcacccaatacatgcgatcgagcttatcacagacaatgtcagtcccaagggtctgcatgagacgacgaattgaccatggctcaacaggtttatttattacaacttgacggatgacttccatcgtatcgccgtcaagaattttacgcttgctatcataaaccaccccaggtaaaggcaaatcatgatggacatattcaatagcattcgccataatacgaatcacgtctttagtagacagatttaaatcctgctcacgatcgtaatcaataccttcaatcattgaccgagtaatgcgaggaaactgacgtgatgtatcgcgataccactcagtaagcattgcatcagccaacgcatctttaattggacctgctaactgatgctttgttgcgttatagttatccataatgtagtcagcagttgtatctttgccactacgttttttaccaatcaaaaataaaagcttcaaattattacctcatagaaggatgcattcccataactttctgttgatactgggattcgcgagtatcattgacagaaggtctaccagtaattattataccatctttttcaacttcaatgtatttgtactgcaaagttgctacacataccattgctgggtcggattcttcggttaaagaatactcaatttcagataaatcactcacccaacctccgatgtagcggacagttaatactatatcatgtttatcgttatcaagaacatgcattaaaactgcaccaggaaatccttcaccgccgttattccatccagacttgtctcggtcaatgtagttttgacagcttaacatccatttgtacatttgtacccatgaatcaagattttcatctactaaaaatctaacaggaacagcgtcaaactcaaaagtagacccaggcaatttagcacgatgcatgccttgaggcgaacctacagtatcagtagcaggaatatgaattccaggaactacagctgtttgaagattagctttaaacgcttgggtgaggcccccatcagggacctctaatataaagttagttgtgttagtttgattaaacagtccagtagacattatgatttccatacagaagtagcagagtagcgtttgcctttcgacatgaactgctgcagtggtaacatgactacattcgcccaatcagccggttttatctcaattaaagcaccctttatattaccaggaatatatgctttaatcattttgtcagcgccagcaaatcctttaacttggctccagtttatctttaatctggtcttattagatatcactggcgtattagcatactgtttaagaagttcttctaaaaactgctgacgagcctttggcggaatgtagtgaaggtttaacccatacatcaatgtggttgtaccttgctttccaagaccaagataaactatcaaaggaaatttatcccagaatggaagagtgtctttgtgcttagcgtcatacatgtaagcatatagctttccaggttgaggcttggttacagaatgaccacgtatatttttctttatagtttctgcaaaccatttagcagatttattgtttactgctgcgccttcattacgaattttatctttgatagagcttcgaaatgaatttaccatcacaagagcacgctcttgtttggtcattttgttagcaggttttttctcaatttctgctactttaattgccgttttaattcttgatgcatgacgagccattgctttactgaacgtagcaggatttattcctttgctttcagcgaatgatttagacgtcatgccttttttacgagcagcagagtattcaactcctaatgctacccattgattttcactacgggatttagctttaggcgattctgcagcttcagtgataaattcaaatatagccatcagcctttccatcctaattttttaagtgaatcttcggtaattaacctaaattctatacccattttactggcagtagcttgagctgctttccacttatcaacgtttacagaccaagtgtaaatttcatcaatgtaccgtttcttcgctgatgtcgtcaactttgtgggtttgaccggaggtctagtttctttctttggcttaacttcaaaaaagaactgttgaccattagaaaacttagcccagaaatccatgaaataccggcgtttctttccatctgcattactaaagtatggaattaccacgcactctgaattccattggactacgtctgggtgattatctaaccaccgcatcatgaaattgctcccaagtagatcgatatgtgatcttacgagggtcccccttatatttacttatgttttttggtaaaaattttccgctataagccattaggcttctccttacatttatcaaaatgccagcacttcattccacgaggttttcctgatttaccacagtgaggacatgttactataggctgcaattctgaaacagctctaagctttgctcgtgtttcttctgatctcttctttccggtgttagctaaatttaatttagtttggtgctctttagttctatttttggctgcagtagacatatttttcttcatggtatcactttttgaaatacctgtcatagaaatactgcgcttttcatttgattctagcgtctgagactttccagtaagagctgcagacagtttagctgaccactcctttgaccttggacttcgcttctttcctgttaatacggcagagttagcaatagaaacccttttgcgaatccattcatatgatttgttatttcttcctgctaatttagaagacattatatgaactgcatatgataacttatgattatttggataaatcttagctaaaagctgatgcgccacataatgctcagctgctgttaagtccacaaggttatctttatcatcacttccacccatgcatcgtggcacaatgtgatgccgttctttgtacccttctaaattgcgggatttgcctcttgcaattagttggtcataaattttacggtaattcatgctattctcctaagtagttagtagggtaataatatcataaaccactcgtcatgtacactacaactttataaatactgttattaatatttataagaggataaactatgctcttctcattttttagtccgatagattattctgcaaagaccgtaaaaggtgctaaggcaaaagctatcccaaccgctgacatatttcgtaattatcgcaaatatttcgacactgtagcagaaaactatcttttacaaacatattacataagtggagctcctagaccagaagaattagcatatattctttatggaaatagtcagttgtactggattcttttaatgtgtaataacgtatatgacccgtttagagattggattaaaacccaggatgcatgctatcaatttgcacaacaaaaatatgcagatgtaggtggagaccaaatactctatcacgtggatgcaaacggcaatcgttattataacctcgagcaatatcctgaaaattcaggcatttggtatgataaaggggactttaatcatcagtaccctcaatatactggggctttagctggtgttgacatttatgaagactctattatagaaaatgaaaaactgcgccaaataaacattatcaatcctagtgatattgaagcatttctttctgatattatacgagaaatggaaaaggctcctgacagtgaatatgaatcaggtcgatataaatcccagaccacaattggagaagttgtatgattgaaatgaatgattcgttgaaatggtttaccggtgttgttgaagacagacaagacccgttgaaacaaggaagagtgcgagtacgtgtttatgggcttcacccatttgaaaaggtgcaaggagctataacaggtcttcctactgaagaccttccctggatgtcagtgattcagcctaccaactcagctgggatttctggagttggctcatctataaccggaatggtagaaggaacatcagtgtttgggttatggcttgatgaattcaaaacagcaggactagtaataggaacatattctgcgcatagaaaaacgaagccaaactacacggaaggcttttctgatcctacaggccaatatcctagacaggtcgggtcagataccaacccactagttcaaggcgatgaaactgggtatagtgctataccaaatatcattcaggacagaaatttagacattggcattaatcctgatgatgctgacttaagtgatattcctgaagacccaaatcctgcaattacaataacagatatgcttaatagggatgaaggtcttagattgaaggtctattgggacacagaaggatatcctactataggtattgggcatcttatcatggcgcaaaaagtacgtgatatgtctgtcattaataaaactttatctaatcaggttggtcgtactgttacgggaaatcccggtatcattacaatggacgaagcagtcgcgttatttaagcaagaccgcgataaaatgctttctgatattaaaacgaattcacgtgtaggacctgtatatgctaaagtcaacaaatcaaggcaaatggctttagaaaatatgagttttcaaatgggtgtaggtggtttagcaaaatttggtaaaatgcttgatgccatgctcattggtgattggaaaaccgcttatacagaagcaagaaactctgtttggtttaatcagacaaaaggtcgtgcttctcgtgtttccatgattattctaacgggtaatatggaatcatatggagttcctgctccaaagccagaaggaaaaaacctgtctgctgcttacgtagaaccaaagtctggaggtaatcctgaagacccatggactccggaagattcaagaattcttttcaaagaacctgagtcttcatataatggtcagtatccatatgttcacacaatggaaacagaatcaggtcatatccaagagtttgatgatacacctggctatgaacgctatcgtattgttcacccaacaggttcatacgaagaagtagctcccgatggacgccgtaccagaaaaactgtagccgatttatatgacatgactcagggtgatggaaatattttaatctctggggataagaaggttaacgttggagggaacgagacctattataacatgtataatcgtcgacagcaaattgatggcgataacacgctttatgtacgtggaaatgaaactaaaactattgaaggcgatggtactatttttgtcaagggtaacattaagatagtcgttgaaggaaatgctgatatccaagtcaacggtgatgccactactaaagtagatggcaaccacgacgtaaccgtcggtggtaacttaacttggcaagtagcaggtactgtgaattggaatgttggcggggcttggactgagacaatggcttctatgagctcaatcgcccaaggtcaatacactgttgatggttcacgaattgatgtaggttaatcatggctgatatacttcctattaataccacgttacgcgaagtaatagaaggtgaatacgttgagcagtactttactgctcaattatctaccaacgaaacattaaaatcaataaatattatcgactatcaaccagtatctgatatctctgtgtctgaaacctattataaaggtaattataactcagtttttacttttggaaacgatgtgcttaaataccgtgaaggcgatgagctgaagtccgcttcagcgtgggaggatttacctaatcccaaaactgctgatttatacctgtggaaagcccccagaacactagagaagacatttacctatacagttgagataatatatacagtgacagaagaatcgtctggaggttcatccggaggttctagtgctccaatcataacagaacataaaaagcaaaagatttactctcaaacagttaaaggcaactggagtagatggggcgaccagcttcgtgcttatgtatatgcggggaactaaatggctggactatcatttaataaatgcttaactgccgggcatagtgcgtatcctccgacagaagtaaatgctacacaaagtaaagtattcactggtggaatagcggtattagttgatggcgactcaattaccccacacaccaagacggttgaccctcatgatacgcatggaggagttgttcaacctcgcacatccaaggtatttgtaacaggcaaaaaagctgttcaaatggccgatccaatttcttgcggcgacactgtcgcgcaatcaagctcaaaggtattcatacactaatggctattaaagaacctttaaattatcagttaacgcgtactgcaaacgctatcccagacgcatttactggagcaacattcgacgaaattaaaaatcagcttattaactggcttagtggtcaaaaagagttccaagattttgattttgcgggttcgcgcttaaatgtgctattagatttattagcatataacacgctttacatacagcaatttagtaatactgctttatacgaaagctttattggaacagctaacttgagaagttccgttgttcaagcagctcagcaaaacgggtatttgccaagttccaaatcagcggctactgcatctattatgcttgaggtaactcatccaaatccagagccagcaataaaaatacctcgtggaaccaagtttttagcatatgcacgagattcatcagtagacccatacaactttgttgttaccgaaaatgttattgctttaagagatacttcagcaccagaaggagttaataggtatcttcctattgtcaatttggcacaaggacgtattattcgtactcaattgtcatatgacccgaagaaacctattgttattcgtgatcagtcgattgaccgtaagcaggttaagctgtgggttgatggcgctgaatggactaactggacagacaggtcaatggttcatgcttcatccatttcaacaatttattatatgcgtgaaactgtcgacggaaataccgaattcttctttggtgaaggcgtggcagaagcctctgtagcaggaggagttcttgaaagtaatttcattggtggattaaaacctactaagggcgcgcaggtagttattgaatatattcgtactgatggtgaatctgcgaatggcgcaactgatttcagctatgctgatactctgcaatatatcgtagtaaacaaaatcattgaaaactggtcagattctcctgattatgttggagctgatggcggtggtgaacctgaagacatcgagcgtattcgtgagctcgcccagattaagcgcgaatctcagatgcgatgcgtgtctaaaactgactatgaatcattcgttagttcacgctttggttctatcgtacaagcagtacaatgctttactgatcaggacaaacccggatatgcatttatcgcaattaaaccaaaatctgggttgcagttaactgctgttcaacgagaagacattcaggattatctaaaacctttctgtcttgctccaattactccttcggtaatgagcccagattacttattcattcgtcataatattaaagcttcttatgcgctgaataagttacaagaatctgagcagtggttacagtcaaaaattatagactcaattaatagatattacgttgatgaagttgaaatgtttaacaaaaatttcagtaaatctaaattattgacctatattgatgatactgaccattcaatcatcggttcttctgttgatattcagatggttcgtgaaattgtcaactatttcactcttcctagcgcaggtattaaatactataatactattactccgcggacgttacgttctggtgatttggtctttactgtcactccaactgcagattcatatccagttaatatcgttggaactgacccagataaaaatggtaaaggaaatatggtcattggaccatttaaaccaggtgatattaaagagaatactcatattcagccatatactgaagacgattttgatagaactactaatggagaaagaactcgttggtacaaaatcggtgaagtagattattatggtgataatatttactggagccttggagctattggagccgatcctcttcagtttgaagaccagagtattgagctttattctactcctacccaggatatcgtcttcgcccgcgatggaacacttatcgtatttgagaatgaccttcgtcctcaatacacaactattaaattggagcctattactcaatgacaattgcaccgttcgtcaccagcttacgaattcataagctatctgcgaatcaggtcaatattcgttgggatgacgttggtgcaaacttctactattttgtagaactggccgaaactcgaaacagagcgggggaagttatccccgctgataacttgagttggtcttcactgggttataccgcggataatgattggttcgaacaaaatcgtattgaaccgcttacttattataaaatgcgtgttcaaactacgtcagcagggtttgagccgtctgaatgggttgaaacagaagagttccaaacttttgaagaaaacgcatacacatttgagcatatgcaagaattcagtttagtgaaagaattcattaaacagaagttttctttaaacaacatgtcgtatgttaacttcaacacatctgccatgatggcatctttgatgactgagtcttttcagtttagtcctgaatattctcatttatcagctattgaaaacttcgttgtaggtgaatctggatatcatgaaattcagggacctattgaagcagtgtgtgttgataaaaatagaactatgctgggagaaatagacggaattttgtatctgtttgaaagattccaacatatggttaaagtatcaaatgataaaggacagaattggcaatacgttcagttatttaatgaccgtgtcggaaatccggtttctagagtggtaatttatcaatctaaaactacttcttatgttttaggatatgataaaatcttttacggaaggaaatcatctgacgtacgttggtcatcgaatgaagttaagtttagcgataacgaagttacatttgctaaattgggagaccagttaaagcttggctttgaagtagagttattcggaacgtatgcatcattgcctgctgacgttaccaaatatgctgaagcgtttacctgcaatgacgactatttgtatgttgttgcaaaagacactgtccgtaaagttaaattaaaagatgctccaatagatactgaccctttaagcccgacatttggtgaaaaggtatttgaaaaggaagtatctcatataacaggcaatcctaaatctgtatgctttaaaatggattccgttgggggcaaaatctttgcccttattaccggggaagttaaaaccttaggattagacccaacagacccaaggaacgttgtggattctgcaactaaaggcgtctatgtttaccaggaaggcacaaatacttggaagcgtgtatttggtaataccgatgaagaaaaacgtcgtatagagcatttatggacttctatgtcaactgacggaaaggaaatattcttttcatcagccaattttaagacaacagagtacgctcaggatattgagcttgagacgaaatatccagaactaatttctaccgcagttaaaaatgttaacccaattcagtatcactctgataagcattatcacatgatgagtttcagagcagatgaattttcaagatgggaaacatttgttcctggaccgatgaggttttatgctgaaccttggtttgtctggatggctcgtgaaggcaacagatgctggataagtacagctgaccatgcagttgtcatttataatgatattctttatcaaaaaagagtagatacagcagcacagggaactaccgagcgcattctttcggaagtgtgggataaaggcgacgcaacgttttattgccctccggtttcatttaacggatttttgcagtatgcttctggtatcatgtttcacgagccagatggaaagctgataggttattatgcattcgattatcgtgttcgtgaccaggtaacgcttaactggaaaccaactgatgtaatgtttaaggcgtttctgcagaaccaaacccgtgaagaagattggactcctgaacatactccaggcttgcgtgacccggatttacgtccgtatcttactaaaatgatgccggatagttacttgctacaagatagtaattttgaacacttttgtaagtactatctccaattcctttcagatggaaatggaacacattacaacagtctcgttaatcttgttaagaacaaatatcctcgcgaagaaaatgcatgggaatatctgtggtcagaagtttataaacgcaacatttatctgagtaaagacgctcgtgacgctgtcgtccgtttctttgaagcacgcaagaatgatttctatgctactaaaggaattgaagactcatataagttcctgtttaaacttctttataacgaagacgtcgaaatcgatattgagtcaaagaacactaccgaatatgacattattgttgaaagtacaaatatttctgacgatttagttggtcgtacgatttatactgcttccggtcgtagtaatgtgacttatatcgagagagaataccgggatggtcgtctgttatggcgtattactattcataacttatcaggacggttcattgaaggccaggaaattaaatcagagcgtacggactttgagggtattatagttcaaggtgttcgtggaaaggatatgctgagtaataacattgattatataaaccgcagccgttcttactatgttatgaaaattaagtctcagcttcctacttctcggttccgcgacgatgtattaaggtttgttcatccggtaggtttcggtttcattggtataacattgctgacaatgtttatcaatagtggcttaaatatgaagcatgttgagactatcataaataaactcaagaactataaatgggatgcaggactgccatcagtttatcctgatagagttgctattatcgcttcagatgatacaatagaaagagacccaataaccaatgagcctaggtattcttcacgtgctcaagctggtgaacctttcccgttacctgctaactataatcaagaaaataacaatagtgttatcgctggacaaaaccctggacaacgacgtaagccgttaagtcctacgtttgaccaatcagcagtaacgtttgctaattatcgcgatttagttaaccaacgtcttaaagacgatgcaggtaatcctcgcgatcctgaaaatccgacacaggtaaaaattgatgagtaattcaacaagagcaagttcaacgcgtagcacgatttatcgtgctatcattacatctaagtttagaactgaaaagatgtacacattttataaatcaattggtccgggaacggaccaaaacacgttgtatgtttcatttggtaaaagcactccgtggtcagataacgaatctgaacctgggtttgcacctccatacccggccgataatgaagacggtgtggttgatatttggacaaatatgatgggtgcagtcaaaattgaatcatctatgcttgactgtgttgttccaagaagagactggggagatacaagatatcctaatccacgcacatttttaatcggcgatatcgttgttgctaactctgcgccatataacagaactgatgctggatttggatggatggtatatagatgtattgatgttccaaagaatggaatgtgttcaattggtaatcttacaagcaaagaagaatgtattaagcttgggggtaaatggacgccatcaactatttccggttcagcgcctcgtgggcgtggtgatgcaaatggtactgtcgatttgggcgatggatatctttgggaatatctatatgaaattccagccgacgtatcaattaacagatgtacaaatgaatatatcgtagttccttggccagaagagattgaagaatctccagctcgttggggatttcaaaacaacttaacttggcaacaaaacgactttaacctaatctatcgtatgaagtgtaatacgattagatttaaagcataccttgatgcaatttattttccggagtttagtcttccgggaaatactgggtttaggcagttgtcaattataactaatccgcttgaagttaagccaatgccaaattctcctaacgttaaggctgaaaaaggttggtatagcgcttctggtcttgaaagacagtcaggtgaaatgatttacatggaaaatcgacaacctattatacgttcaatggaccaaacagaagagttaaatttaattttcgagttttaattatggggagcctttggctccccatttttatataaataagactatactttgatatgaggttaacctatgtatacagataagggtaaaaaaataattgacgtcggtgagattggtaatgcttctaccggcgacattctgtatgatggcggtgtgaaaattaatgataacttcgacgccatttataacgccttcgctgatcaacgattatttgcagccggtggtggagctttaaaccaaaaaatccacgcaacaagttattatcaaaagataaaatttggtgatgctaactcggccggtacagttccgatgggttcatgcatagatgctgattgctcagaaggggcagttcaaattcgtctttcaaaaggtaaagcgggagaagctgtattcgttgtaaatagtaatggctcagcatcaaaagctagatccataaaaataacaacaaacggcgaaggtgtagcagatgcatttaaagacggatcgcgagaattgattatcaacacaccaagatgtagaattgaattgtggtgtgttgaagtcaaagctaacggtgctgcagtttgggattattcaatttcaagtatgtttggcagcacatattcaccgttagaagctacatataatttaacaagttctcctattaatattcggcttggatataacgatgattactctactgttaaattgttattaagcttcagcgcaaatccaggtggtcaaaccatcaaaaggcaatcatctgaagtcatgcttatgattgacccgactattacttcatcagcgccaaacggaagagtatttgacactgaatatgcagtgttaagaagcggtgaatcatctgaaaatgaaaagatgtattctatttcatactctattaacgcgcagaaagatttaatatgcacagcttcaacatcttatggaaacgcacgtttggcagttaaagttattgctacacagaccgtaggggtatctcaataatgaaacaaaatttgatagtaggccaatctgtagatgatgggtctggtgattacctccgtaaaggtggtcttaaaattaataacaactttgatgatttatattcagagttaggtgatggttcagttccatttgcagcaggtgcatggaaaacttttaaagctagccctactggaactactttaaatgctaagtttggtcaggcctttgctattaatacccaggcagcaagagttaacgttcagcttccaaagggtacagccaatgactataacaaagttattaaacttcgtgatgtttggtcaacctggcgattaagcccaatcacagttattcctgctcaaggcgatacattaaagggttcagcttctcctaaaattttcaatactaacttccaagatttggaattggtttattgcgcccctggccgctgggaatatattgaaaataaaactgtagataagctaactaatggtaacttaagtactgtagcgaaaaaatcaattattgctactgcgggtcagactgactttcttaacatttttgatggcgtagaatataacgaagactcgcttaatgtatatcgtcgtggtaatattttatattacggtgaaaccagcgttatggataaagccaatgctgattacggttctcctggaacggtagcgggtcaattggtagaattaaacggtaaagacattcgtttaaaagttccatgcgttgaaggggaagtaataacatttgaaaccttcttagatggaattggtgtatatcgttcttcatacaacaagttagctatccagatacgagattcagcccagactacatccaagacgattcctgggtcaatgatagtagataaccttgctactctccgcagaatcactctggatgacatgggtgtacttccaggcgtaggggtaaatcctaactcgcttgaaatttcattgaacggaaaggaattactcgaagctggaactgcaggtcttcctttattttattgtgaaggtgcggaaggtggatacgcagaagactgtataaacaatggtggtcaatgggtaaattctaaccaagattatagactggaatttgactcaactggtactaacgtcgaagctattatttttggtgaggcgtttgaagataaagaccttcttaccgtccgttggttcaataataacatcggtactactatggatatcaatgatatcatggcagaaaccgaccaagtgtatatgaatgctgagcaattagtaactctaaaaaatcgcattgaatacacaaattatgatgaacctaatcagaaaaatatgcgtcctgtcgctgatgatgttatgattaaagtcaataatattgcagcattttttgacgtaatttatccgattggcacgatttatgaaaacgctcacaaccacgcaaaccctgctgactatatgggatttggggtgtggaagctttattcacaaggccgtgttactgctggttggaataatgattcatctgatccttatttttcgcgtaacaacaataacttaaacgaaaatggtcagccatcattaacagcaggtggaacggttggagatttgacgtttacattaggaaaagaacacattcctgagttaatgtcaagagacaaagttctaatttcagaccctgaacatggcagcgtagttattggcggatgtcaattagacccagacgcacaaggtccaggttattctaaataccgtgaagacactgttgcggtaaacaacggtgtagttccaaatgacatcactaaaattcagccaacaatcaccgtttatcgttggattagggtaggttaaaatgacgattgaaactaaaactcgtgaaggggctaaagttaattcaagattaactgccttttcagaatatcgcgtagacccgcagaatattgcggtaggaaataaggctcctatagggagcctaacctttgaacaaatggatttaggtgtttggtatccaaacactgaagctgctattaatgatttaatgtcattacagtcagcagaaattggaactattatttgtaatgacaccggaatatctccacaaccagcacagcaaattacacgcgctactttttcaggcgtagtttcgttagaacctaaagaagacggttctgttggcgacccagtaataattcacattcttggattgccaattagaattgcgaatggtgatgactttgcagcagtagctaccaggtggtatgataaggtaaaagaattagaagcagttggaaaagtggttcaacaagttactcaatcacctgcaactcctcagtatgttgatattattcatctggattatcagaaccataattttgaaacatataaaaaatatggtttaactgttgagtttactgttacttcacctgctaaagcgggttatggacaatgggacgctattggtaacgaaactaaaaccttcggtgcaaacacatttacattccactattttagaaggatgggataatggcccagaataactataatcactacagtgatttggccaaatatacgatatttgacccagcaaatacacaatggccagttgctacaaaagacgtccaatcagcgctagcgttgattggaagctgggcaagaactgacattggattacctgcagcatctccaaccgtagcaggtataattcgtacagctacgcaggccgaagttgaagctggaactgtaggtaatgctgcggttaccccagctacattaaaatccacaattacccggcctgaagcaactaccgcaattcttggcttaacccgatacgcaactaatactgaagccgcagcattaaccgcaggaaatagaactattacagctgctgctcttggccatgtgtttaaaaccgtaaaagcccaagaaaacgtagatggaactgttaggttaacgactgccgctcaagctcaagcaggaactgatgaaaccaccgcagtaactcctaagcgtgttgtagaaatgattggaaagttcagcgttaatcctcctacttatacttctgcaacagaaagcaacttgggattagttcgtgtcgcaacccaagcccaggtagcagcaggtgctgttcacgatggatacgcagtaactccaaaaaccttcatggcatcaaaagcgtctgacagcgtatttggtatagtaaaatttgctaaagactcagatgtggcttcagctacttctaacaatttggctgttactccaaaaagtctacaagcgttaaaatcaaccaaggataaatatggattaacccgattatcaggttctccaacatcagatgcttcacttgctgcagctgcgactgatgctgtctttaaaactcgcaaaataaatggaaaaacccttgataacgatataacaattaccaataacgatatcaattgttatacacgccctgagtcggatggaagatatatgccagctggaacgcgtgtcggtaatattacttgggtagaaggtggaacttatattcctgctggaaactggtttgggtgtaattctccatatgaagccacttctagattggcgctgactctcacaataaaattccaacgtaataacgacggctatgacaatagaatttggagatttagaataactgtcaacggggaaaatagaggagaacatacactcaatatagagaataccaagggcggtagaaatggtcattcgtggagatttgaaggatatgctacaggctcatatattataaatgatgttcctcctaacgccagagttcaaattgagccatttgaaaatatccgtggcgataattattcagcgtcattaacgttttgcaccaaccgatagggaattatatgacaaaattagtagactcgcttccgtttgtagacggaattccagacgattttcaacagagaattaactggataaaaaatacagagcctcttaatggggcttcaacccgctatggaaatgatggagaactgaatagagcttctgtgcagattcagaaaaatgtggttcaggtacataacgatttgaacaacgttggaactgctgtagaaaatattcaagtagatgtagaccaaatcaaaaaatcgttagaaattacaggttcttctgacgccattgagcaggtttatatcaataaaaagaatattgaaaagcatgatggacaaattcttaaattagaagaagacaccgaaaaacttcgaactgaccttgattttctcgaagaggatgtaggtgtttatgattctagtaaagatgattattacagaacagttcgtgataatatagtttgggttaaacgtgaaattggtgcgtatcctgggcaagatgttaacggacagcctaagcaagacgctccgggttctggtatgaaataccgaatcatcaacaatgcgtcagctatagtaaaacatgacgagcgtattcaggcgctagaggatgcatacaatgattcagacgtaggttctctgactattgaagtaaacgacctgcgtaaagaagttggtcctaaatccggagctacgtcagcttcaatttatgcaaggcttgtgaataacgctgatgctatttccgcagctaataatgaaatctttgctattaaccaagccattgattttaccaatccagtaaaaattggagctcgtactactagattagaaaacgattatcgtatagttgacgcaacacttaactctgcacaaaccgggttagttcctcgtgtcaataatattgatgctcgtttggggtcttctgataagcctgatactattgaaggaaaaattagttctctttcaactgaccaagggtacatttctgatgttgtaggacgtgatacttcatcagggcttcagggtcaagtagcatggataaatcagcaagttggtattgttcctggcggacagccgattcctccggggtcaattttagcgagaatgaccaatgttgaagggatgcaaaactctcagcagtctgctatccaggacattcaagtagaacttggcaataacagcgaagggttaaaaggttctgtatttacgttacagactcaaatgaatggtgacttttcgtcagaaaatccagttcaacgggatggtgtatacgctactgtagtagaattgcaagataaattcgtgactgcagttactgacgtagaacagactggagcatacctccgtaaacggggcgaatggtttaagaagccttcatcaataggtgaattcagtaaagaagatttcactgttgatttaagttctgatgcattggtaaatcctaactcattggtcgctgcttcatttaatgctggcattcgtattgttgatgatattattgttgatgacgatggcgtattttgtgtagaaactgatacagttatcgaagcttctgattcagataaagctgtccaaattgttattctcgtcaataacattgaggtgtttacttatagcctaggtgttaaagcagtaaccggcgagcaactgttgaaaaccaagaaacttattaagttttcgtctggcgatgcaatcaaaattgtgtatagagctgcttcagaagaatcaaaagttcctgttagtattaaatcattggatattactattcatccagcagtataatgaaagggaccttcgggtccctttttcgtataaatagaatataaagaggagcttatatgtcatacaacacatacaacccaaaaacgcttaaagacgctatacttcgacgtctaggagcgccggtaattaatgtcgaagtaactgaagaccaaatttatgattgtattcaacgagcattagagttgtatggtgaataccactttaacggattgaataaaggctatcaagttttttatattggaaaagatgaagctgacaacgcaagatttttaaatggtgtgtttgatttgcgtggtcgtaatgtatttgctgtcactcaaatcgttagaacaaatgtaggttcattaacttcaatggatggtaatgctacctatccgtggtttactgactttttaatgggaatggccggaattaatggcggaatggggtcaagctgtaataagagttatggaccaaacgctttcggtgctgacctgggctattttactcaattaatgacttattggtcaatgatgcaggatttgcttgccccacttccagactattggtataactctgataatgaaatgcttaaagtaatgggcaacttcatgaagggggacatcattgtttgcgaatgctggactaaatcatttatgaataccgacatgatggtaggtaatactgcaggttacggcttcgctggtgaacaaacttccgaccattggggcttaggagataggtatcagaatcctaaccttcgcaataacggccaatatgcaggtgaaggtaatacaaatagagaaggtgcttataataatcgttgggtaaaagattatgctacagcactgactaaaaagttgtggggtgaaattctgtttaaacaccaagggctacaattagccggcggcgttacagttgatggccaaacacttaaagtagaggcccaagaagaaatcgagaggctccgagaggaacttgatttacttgacccgggttgtcctattctgttggggtaaaagatgactacatttaattctagtttattcgctcgccttgaggattaccgaggatacaataaaactaatgagacagaaattctcaatccttatgtgaatttttataatcacagaaatagccaaacgttagcagatgttttatcagctgaggctattcaaatgagaggaattgagttttatttccttcctcgcgaatataacaatccggatttgcttttcggagaagacccatcaagtaaattcaccaaggcttggaaatttgctgcttacttagactcttttgacggttattctggtgataacacgttcttcagtaaatttggtatgatggttaatgatgaagtcaatttgactattaatcctaatttgttcaagcatcaaaccaataattcagaaccaaaggcaggtgacctgatttatttcccgatggataattcgctgtttgaaattaattgggttcaaccatatgatccattttatcagttaggtcaaaatgttcaacgtaagattactgcgcagaaatacatttattccggtgagcagcttcaaccagaattgcagcgcaatgaaggaattatcattcctgagttctctgaacttgatttagaaccaatcaaaaacattgattctcttgctgatatttctgacgtacaatacgcagaaagcgatgcaattaataaagaagcctctgaatatgttcatccgtattatgttaataacggaagaggacttgagtctcctcctaaagcagattcgtttgatgacggattttttgaataaataaaataaagatgggacctttgggtcccttaggagaaatcatgtttggacattggtataattcgtccttacgccgatacattgtattgcttggagatttattttctcatgtacaaattgctcgttggcgtgaagacactggactaaaatatattaaagtacctatcacttatgcttcaaaggaaaagttcctttctcaactcggaaaatggactgctatccagtctaccgagaataaagcaaagatagaaactgttttgccaagaatgaatttgcacttggttgatatgcaatacaacgcgatgtataaaacatcacagttgaatagaaccaaatcatataaaaccccttcaaaaattacatctcagtataatcctactccgattaagatgatttttgaattgggaatttatacacgcaatcaagatgatatgtatcaaatcatcgagcaaatcgttccttattttcagccgcattttaacacgactataactgaactttacgacaaagacacaagctttaatcgtgatgttagaattgtattacagtcattttctccggatgaagctgttgatggagataatatcactcgtcgtagattagaatggtcgctgatgtttgaagtcaatggatggttatatcctcctgttgccgaggttgacggcgaaattagaaccatttatttagatttcttcgctaacagcaaagagctaactccagaaggaaactttgaatcagtagatagcgaagtcactccacgagatgttcaacacgaaaattgggatggttctagtaaacaaacttattctcacgatattcctattccggtaaatccggaggctcctggaccgagaggtgaaaaatgagtgaattacaattagatatggctaaattattagacatcgaaggaattcctggaatagaaggacaagaaattccagtttatgaaaaacttgaattagttgaagttaaatctaatccaaatgaccgtaaacctgacctcgaagatgactattcggtcgttcgcaagaacatgcacttccagcaacaaatgttaatggacgcagctaaaatatttttggaaactgctaagaatgctgactctcctagacatatggaagtatttgcaactcttatgggtcagatgactacaaccaacaaagaaattcttaagcttcataaagaaatgaaagacattacttctgagcaggttagtactggaaaaggagctaatcctcaacaaggaatgaatattcaaaacgcaacagtctttgtagggtctaccgctgatatgatggatgaattcggtgatgcctatgaagcacaagaagctcgagagaaaatagtaaatggaacagactcaaccgtttaacgttctgagtgatgcccatcctttaaatgacgggaaactgacggttattcgtcacccgtctgaaatggaaacgaaaatcgaaaacggagttcgtttctttaaatcgcaatgggatgataagtggtatcctgagaaatttgaagactatcttaagttgcatgggatagttaaaattcgtttgcaaggtgaagacccagctcatttccaaacgtttaaggacaaaaataataagcgcacccgctatatgggattgccaaaccttaaacgagcaaatattaaaatgcagttgactcgtgaaatagttgcagaatggaagaaatgccgagacgatattgtgtacttcgcagagacctactgtgcaattacgcatattgactacggtactatcaaagtccagctccgtgattaccagagggacatgctagaaatcatggcggctaaacgtatgacttgttgtaaccttagtcgtcagcttggtaaaactactgtagtagcaatctttcttgcgcacttcgtgtgttttaataaggataaagcagtaggtattcttgcgcataaaggctcaatgtctgcggaagttctcgaccgtactaagcaagcaattgaattacttcctgactttcttcagcctggtattgttgaatggaacaaaggctcaatcgaattagataatggctcatctattggggcatacgcttcgagtcctgatgctgttcgtggtaactcatttgcaatgatttacattgacgaatgtgcgtttattccaaacttcatagatgcatggcttgctatccaacctgttatttcatcaggtcgtcgttctaaaattattatcacgactacaccaagtggattaaaccacttctatgatatttggactgcagctgttgaaggtaaatccggctttacgccttatactgcaatttggaactcggttaaagaacgtctatataacgacgaagatatgtttgatgatgggtggcaatggtcacttcaaactatcagtgcttcttctcttgaacagtttaaacaagagcactgtgcggaatttcatggcacatccggtactctcatttccggtatgaaacttgccaatatggattggattgaagttactcctgactcgcacgggttttataaatttaaagaagcggaagcagaccacaaatatattgcaactcttgactctgctgaaggacgcggtcaggattaccatgcactaaatattattgacgtgactacatctgaatgggaacaagttggagtattacattctaatacaatttctcacttaatcctcccggatatagttattaaatatctaatggagtacaacgaagctccgatctatatagaacttaactctacaggtgtttctgtagcgaagagtctttatatggatttagaatatgagaatgtcatttgcgattcaatagttgatttaggaatgaaacagacgaaaaggtcaaaagccgtcggatgttctgcactaaaagaccttatcgaaaaagataaactcattattcaccatcgtgctactgttcaagaatttcgtactttctctgagaaaggagtatcctgggcggcagaagatggatatcatgacgatttaattatgtcactcgtaattttcgcatggttaacaacacagcaaaaatttgctgatttcgtggataaagatgaaatgcgtttagcatctgaagtttttaaacgcgaattagaagatatgaacgacgattacgctcctgtagtgttcgttgacgccgtgaatagcgcagaatatgcgcctcaagaacatggtctttcatttgtataaataataaaaagcaaacaacattgaggatatatcatgcctttagtctctcctggaattgagctcaaagaaacgagcgtacagagcacggtagtacttaacgctacaggtcgtgccgcaattgtcgggaagttccaatggggtcctgcatatcaagttactcaaatcactaacgaagttgaactggttgatatgtttggtggtcctaataaccaaactgctgattactttatgtcagcaatgaactttctgcaatatggtaatgatctacgtacagtccgtgtagttaatcgtgaagctgccaaaaacgcatctccactggttgataatattgagtgggaaatcacaactgctggtagtaactatgaagttggtgataaaattacggttaaatatgcagaccaaactgtagatgacactggttcagttactgaagtagatagtgacggaaaaattatgtcggtgttcattccgacggcaaaaattattgcatatgcaaaaagcattaatcagtatccggatttaggtgattcatggacaactactattacttcacagagttctggtgtttccgctgttattactctgggcaaaattatttctgattcaacagttctgttaactgaacctgaaactgcccatgaagaaatgacaaaaactgaattccagactgcgcttgcgcaatataaaatgcctggaattgtagctgcgtatcctggcgagctcggaaaccaactggaaattgaaattgtatcaaaagccgcttttgataaaggcgaacagctgacgatttatccgagtggtggacagcgtgcatcaaccgcaaaagccgtatttggatatggtcctcagaccgatacacagtacgctatcattgttcgtagagatggtgcggtagttgaatcaacggtgttatcaacaagccgtcaagataaagacatctacggaaacaacatctttatggacgattatttctccaaaggttcttcacgttatatatttgctaccgcgcaaggatggcctgaaggattttccggtgttattcgtctgggtggtggggtttcagctaatgaatcagttactgctggcgatttaattcaaggctgggatttatttggtgaccgtgaagcattgcgtgtaaaccttctgattgctggtgcttgtgccggtgaaaccgatgaaatcgcaagtacagtacaaaaacatgtttcgtctattgcagatgagcgtcaagactgtttagcactcatttcgcctccaaggtcaacgattgtaaatattcctctgactcgtgctgttgataatttaatcgactggcgccaaggcgatggaacttatgattctgctaacatgaacattaataccacgtacgcggcaattgatggtaactataaatatcagtatgataaatataacgacgtaaaccgttgggttccactggctgccgatattgcaggtctgtgtgctcgcactgatgatattgctcagccttggatgtcaccggctggttatcgtcgtggtcagattctgaactgcattaaacttgcgattgaacctcgtcaagcacatcgtgaccgtatgtatcaagcaggtattaacccggtaacgggtcaaggtacaggtgaaggtttcattctgtttggtgataagactgcaaccactgttccaactccgtttgaccgaattaacgttcgtcgcttgtttaacatgctgaagaacaacatcggtgattcttctaagtggcagctgtttgaattaaacgataactttacccgtagttctttccgtatggaaaccagccaatacctcgcaggtattaaagctctgggtggtgtatatgacttccgagttgtatgtgataccacgaacaacactccagcagttatcgaccgcaacgagtttgtagcgagcttctacatcaaaccagccagatcgataaattatattacgcttaactttgttgctacagcgactggagcggatttcgatgagttgatcggaccacaataaattgtacattttcgctaaatcctgatacaattgcacatatgaaatattatgtgcaattaaggaaaaccaagtgattatctctaaatttgttaaagtaaaaataattcctaaaaattttaaatacttttcggaacttggatacaagctgcctcctctgggttcgcctaggcatggattcaaatattattcaattgatatcagtgttgaccatcttgagcccgggtcaaacatatatgttgattgtgtttgtgataaatgcggtgaacaatattcacagcgttattgcagagacactgacgtgtgctatgattgccgtagcggaaaatttaagataggaaatactattggaacagctaataagggtaaagtgttgtcttcgatgacaggagaaaaccatcctcgctggaatccaaacaagacagaatataatgaatatgctagtaaagttagaagagaaacttctaagcataaaccaatttattctacatgggaaaattttgataagattggactatgtggaatacctggagcgtatcaattagaccataaggtttctgttgcatatgggttttacaacaaagttcctcctgaaattataggaagcattgataatttagagataatcacttgggaagaaaatcggtcaaaatcaaagaaatctagtattgatttatgggatctattgaaatgaaccccaggacattctggggtcatctaacctttagatgataaattatattaccgcacactttaatagcctctacgatgatgtagtcaatcaagaggctatataaatatctataggaaacaacgatggaattaacagacatcacccgtgcgtttgaatctggtgactttgcacgtcctaacctgtttgaggtagaaattccttatctgggtcgtaacttcagtttcaaatgtaaagcagcaccgatgccggcaggtatcgtagaaaaagttccagtcgggtacatgaaccgtaagattaacgttgccggtgaccgtacttatgacgactggactgttaccatctataacgatgataaacatgaagtacgtaaggcaattattgcttggcaggctcaggcccacgctcaaggcaatgatatctctggtatgactccagccgattacaaaaaggttgctacggtacgccagtttagtcgtgatggcaaaactatcacaaatgaacacaccattaccggtctgtggccaactaacgttggtgaagtacagatggactgggattcgaataatgaggtagaaacgttcgaaactacatttgctattgactggtgggaataatgttatggggcttcggccccgtatcgaagttctgtgagttatttgcttaaatatctgacaaaacttcgatataaatatacttatagataatttcggagactccaatggcctttcatattttggacttattcgctccgtgggaaaaacgcgacgaagctgaatataagcaacaaatcaacaatgacctagagtcaatcactgctccaaaatttgatgatggagctcgtgaagttgaatcaaacgaaaacgaaatccagtataattcattcaaccaaatgatgtttggttccaatgaacctggaatgaaaacaaccgctgatttaatcaacacttatcgtagtttaatgaataactacgaagttgacaatgctgttgaagaaatagtttctgacgcggttgtatacgaagacggtcatccagtagtttctcttgatttagattctaccgacttcagtcaagcaattaaagaccgcattcttgaagaatttaatacagttttaacatgccttaatttcgagcgaaaaggagccgaccatttccgccgttggtatgttgactcaagaatattcttccacaaaatcgtcaacaccaagaaaatgaaagacggaattcaggaactgagacgtcttgacccgcgcaacttacaattcatccgtgaaatcgttaccgctgatgacgctggcactaaaatcgttaaggggtacaaagagtatttcatttacgatactggcaaagaaagttattacgcagatggtagattatattccgccggaacgaaaattaaaattccacgcgatgctatagtatatgcacattctgggctagttgattgctcaggtcaaaacatcattggttatttacaccgagccgttaaacctgccaaccagttaaagctattagaagatgcgttggtaatttatcgtattactcgtgctcctgaccgtcgtgtgttttacatcgacactggtaatatgccttctcgtaaagcggcagcacacatgcagcatattatgaacacgatgaaaaaccgtgttgtatatgatgcgtcaactggtaagattaaaaaccaacagcataatatgtcaatgacagaagactattggttgcagcgtagagatggtaaagcagttactgaagtagatactcttcctggtatgtcaggtatgagtgatatggatgacgtccgttactttagaacagcgttatacatggcattgcgagttcctctttcgcgcatgccagatgcaaataatcaaggtggtgtgcagtttgatgctggcacagcaattactcgcgatgagcttgattttgctaaatttattcgtagattacagcataaattcgaagagattatgcttgatccacttcgcactaatctaattcttaaaaaagttttgtctaaagatgagtgggaagacgaaataaataatattaagattgtgttccataaagattcatatttcaccgagttgaaagatgctgaagttatggagcgtagaatcaatatgctcacaatggctgaaccgtttatcggcaagtatatttctcataagacagcaatgaaagatttccttcagatgtctgacgaagaaattgaacaagaagccaagcaaattgaattagagtctaaagaggctcgcttccaagaccaagaaaatgaagaggatttctaatggaaaattatatttccgcaattgaatccagagacctcgtagcagccaaaaaagcttttggtgcaattatggctgaacggacatctggtttaattgaagagcgcaaaaaatttatcgcagcgtctgtcatgattgagggtgaagagcccgttgacgatgaagatgaagacgacgaagatgaagataagtctgagaaagacgacgacgaagaggacgagtaatgcttatactgcctgaaaatcatgaattagttatcgacgctgtcgaagcttttcttcctgaagcacaggcacgttttgataagttgtccgcagcgctttctaaagatgatataaataaaattgtagagaacatggttacttctgagcctgatttagcaattgctttaggttcaattaacgaatctctacaattaaatgaatttatcgttaagcacgttgattctaaaggtactattacacgtactaaggatcgtaaaacacgtgagcgtaacgcgttccaaacaaccggactttctaaagctaaacgccgccaaatcgcgcgtaaagcagtaaaatcaaaacgtgctaatccatctgctcaaattcgtggattacgtaaacgtaagaaagcacttaaacgccgtcaggctctggggctaagttaatggaaaacctcaatgaacaacttttaattgagcattggggtcaaccgggcgatgtaattgatggtaaacccatgctggaatctattatcgttgaaggcgaaaatgaatctggcttaaaacctggtctgtatatcgaaggtgtttttatgcaggcagaagtagtaaaccgtaataaacgtctttatccaaaacgcattcttgagactgcggtaagccgttatattaaggaacaggttgctactcgtcaggctctaggagaattaaaccatccacctcgtgcaaatgttgacccgatgcaagccgcaatcattatcgaagatatgtggtggaaaggcaacgatgtttatgggcgtgcaagaatcatcgaaggagaccacggtccaggtgataaattagccgctaacatccgtgctggttggattcctggtgtatcaagccgcgggctcggttctttaaaagactcaggaaaaggatataacatcgtacaagaaggctttcgcctgactgttggtgtagacgcagtttggggtcctagtgctccggatgcatgggtacaaccgaaacaaatttcggaaaatacctcggcacaagttgccaatagtgctgatgatgcttttatggctctcgcagagaagttaaaagcgttataaataattatgtaacttaacacaggacatcaaaaatgcttaaagaacttttaatgaccgaagctaaaactatcgatgcttccgtcgctcttgacagtattttcgaatcagttcagctttctccggaagctaaagctaacttcagcactgtattcgaagcaacagtcaaaaaacacgccgtagctctggcagaatctcatattgaaaagattgctgagaaagcagaagaaaaagttgaagaagaaaaagaaaaagctaaagaagaagctcgcgaagagctgaaagaagctgcttctaaatactttgaccatatcgctgcagaatggatggcagaaaaccagctggcggttgaccgcggtattaaagctgacctgtttgaatccatgtttgtcggtatgaaagagctgtttgttgagcacaacgttgtaattcctgaagaatcagtagacgtagtagctgagatggaagaagaacttgctgagcaaaaagcagaaactgctcgtttatttgaagaagtttctaagcgcgatgagtatatcaattatgcccaacgtgagtatgctatccaagaagcaacccgtgaactgactgatacccaaaaagagaaagtagtttctctgacagagggtatggattattctgactcgttttcaactaagctgaaagctattgttgaaatggtgcagggttctgtagagcagtctgtaacggaatctgccgatataaatactatcgacaaagaagcagacggtttaaacttcacaactgaagcagtcgaagaaactcctgcgactaaaaccccatccgttatggatgcttatgtagcccaagcggctcgtctttcttaatttaaaaggttatacaacacatgaaaaagaataaacttatcgaaaaatggcagccgctgcttgagaacgaagctctgccggaaattgttggcgctagcaaaaaagctctgatcgctaagatttttgaaaaccaggaagctgatattaatcaggctccggaataccgcgatgaaaaaatcgctgaagcatttggttctttcctgtctgaagcagaaattggcggtgaccacggttatgatgcacagaacatcgcagctggtcagacctctggtgctgtaacccagattggcccggcagttatgggtatggttcgtcgtgctatccctaacctgattgctttcgatatctgtggtgtacagccgatgtctaacccaaccggtcaggtattcgctctccgcgctgtttacggcaaagacccgctggctgctggtgctaaagaagctttccatccgatgtacgctccggatgcaatgttctctggtcagggtgcaaccgagaagttcgaagcagttaaagccggtgatgctctgactgttggtgatatcgttgttcacgatttcgcacagaccggtcgtgctcatctgcaggttgttgaagatttcactgtagacgctggcgctactgatgctgctaaactggacgctgcagtaactgccgctctggaagctggtaaagttgtagaaatcgccgaaggtatggctacttctgttgctgaactgcaagaagcatttaacggttctaaagataacccgtggaatgaaatgggcttccgtatcgataaacaaactatcgaagcgaaatctcgtcagctgaaagcacagtattccatcgaactggctcaggacctccgtgctgttcacggtatggacgctgatgctgaattgagttcaatcctggctaccgaaattatgctggaaatcaaccgtgaagttgttgactggattaactactccgctcaggttggtaaatctggtatgacccagaccgttggttctaaagctggtgtattcgacttccaagacccgattgatatccgcggtgctcgttgggcaggtgaaagctttaaagctctgctgttccagattgacaaagaatccgctgaaatcgctcgtcagaccggtcgcggtgaaggtaacttcattatcgcttcccgtaacgtagttaacgtactggcagctgttgataccaacgtatctccggcagctcagggtctgggtcgtggttataataccgacaccactaaagcagtatttgctggtgttctgggtggtcgctaccgtgtatacatcgaccagtatgctcgtcaggattacttcaccatcggttataaaggtgctaacgaaatggatgctggtatctactatgctccgtatgttgcactgaccccgctgcgtggttccgatccgaagaacttccaaccggtcatggggttcaaaacccgttacggtatcggtattaacccgttcgccgattctgctgctcaacagccgaaaggtcgtattacctctggtatgccttctatcgtcaactctgttggtaagaatgcttacttccgtcgtgtatgggttaaaggtatctaataccaataagggagccttcgggctccctttagttgttttaatggatataaataaacttataaatccacagaggaaagcgcaatggctaaaatcaacgaacttctgcgcgagtcaactacaacgagtagcaacttaattggtcgccctaatctcgttgcattaacgcgcgcaaccactaaattaatctataccgatcttgttgctacacagcgtactaaacagcctgtagcagcactgtatggtattaaatatcttaaccctaatggtgacctgacgtttaatacgggtgcaacttatgcaggtcaaatcggggcgccagaacgtgagtcaattgaagaactcactatggcaaataaagactcattcaataaagacgatatgttcaaataccagaatgtggtctttaaagtacttaaagatagcccgtttaccgatacagcagaaaccgatgaatttggaattgtatctgaagcagtagcagctaataatattcgtatgatgtcagatgctgcagtcactgaaaaattcgaaggacctgattcagacccaatcaccgaagccagttttaaaattgataaatggcagacccaggttaaatcgcgtaagcttaaaacggatttaactgtagaattagctcaagacttagaagctaacgggttcgatgctccagagcttattgatgatttacttgctactgaaatggcagaagacattaataaagacatcctgcaatcattgattacggtttcttctcggtttaaagtagctggtgtatccgataaaggtgtattagatttaactaagcaggattctgccccggaacaaggtcgtactctgtatcgtttcatttgtgaaatgaattcagcagttcaacgtaatacttcttattctggcacctacgcagtagcatctactcgttgtgcagcggtactggcagcttctggttggttaatgcagaagaacgatgggactattccagaaaacgcatatggcattctgaataacggccttccactgtattgtgatactaacagtccgattgattacgttattgttggtgttaaggcagaatttggtgggaaggaaactgtaggttcattattctatgcgccgtataccgaaggtcttgatttagacgaccctgagcatgttggtgcatttaaagttattgttgacccagctagcttgcagccttctgtagctttactggttcgttacgcgctgtcggttaacccatatactgtaggattggacgaggacgaagctcgtgtgattaatgctgcggatatggataagatggcaggaagaagtcagatgtctgttatgctcggtgttaagttacctaagctgattgcggactaatttatgggagccttcgggctccctttttgctataaactaaatatgtcaaacttcggagagtattcctcctcgagggatttaaacactttcttatcgtatagattaacacattctatcccgtgcctgcgagctatatcaacagctactctcgtccctccagatacactcccgcatcttttctcaggcgcccaatataataccttatctacaggctcagtgcattctaggcccaatacctgcatagaattccgtgcgaataaagtctgcactatcttcgagcattcatcccagtacgacgtaacttctctcgccttaatgatgcttttgattttggcttcgtttgataattcagaccatacaacaacacctgtaccaggaacatggccacaaaagccagaataaggaataatcctacaagaatttgacctatcgtatttcgccaaccacgcttcatctgaacctggagctccacctgaatatgaaaaatgcccctcttccgagaggcgttgacctattgtagtcattagactcagaactctgcgtggcgcttctcgtgaaccaataagcgccaatctcattattctacaacctcatgccatttactacgaatagtattttgaatcaaagtagtgatttctttcttaaccgcagaaggattatcagcgaataacatatcatgaccttcacgtgctgcttcgttaatgatatctttcatagtcagacccataacacgaccgaaatctttagcagttacagtaccaatatgagacagaacgttacttacgcggttccaggttacatattcggaaaagatttccagaacacgcttatcattctcggtgagttcaaccttcgctttaataggcttatcggatttagccttctcgctgaacttagagttcttacacttaatagcaacacgagtaccattattgaagaacttaggatgaaccggcttaagaacatagccttcagctacgccagtttcagaagaagcctgtgggccgaacacatgtttatttgcatgttcaaggtcagtcgtgtcaacaagctcattatagtaattgacaatagatttaaagtcattcacatactgagatagctcggcaaatgaacctcgaccaagaagtggagctaatttaagaccaagaccagtagcaaacgattctactacataatcgtcccaataaactttttcgttaccggaatccgacaggatatcaaatacgtagaaatctttctcaccataatctacgcctttctgaataccaccgccagcaaattcgccgaagatttgaacagatactaaatccatggcgttcagcatgttctgcatcttaacgaaagaatccttatacttcttcatgataatatcatgaccgaagaagctttcaccttctaaaataggaccagtacgcttagcaggaacgatttcggtaggagtaataatcacactaaagttagtgccatgaatcttctcacgagccacccactcaacagtatgcatatcaaaaccagcaccgcgaatcttctcgatgaacttaccgttgtaatgattctcgagactagaatattttgcaaacattataatttccttagaatgtgattttcataaagtcagtatcaccattacgctgggcactggtataatttgtaacaaatccttcatcatgcaaataattaagaacacttgtaatatgtttcttaactaaactgctaggatacataattaactcacgttgacccgctaaagcggttttctcaatctgagttaatacttcttcttttgctgcactcaattcttctgtagcaatattgatggctgtattagccattctatctgcaaggttcataatttttctctcaataaataatataaaaccaggagtctatcttggtcaaaatggtatcagaggatttcccctgagcccattataccacatcgatttttaaagcaattaatagccgctcggcacgaagcgatacatgatatatccgcttttagttagcatgatttcaaattgacttttgcttccaacctcaagtactaatggaatatctttatccatcagcatccaatcaatttttccataccgttcattaatcaaatccgttattttacgtgcaccacttttatagtagtaagaactctgaacagccatcattttactaacaaatttagatgcaaacaaccagacatttaccccattagcagctggcgtaaatttcttagaaagcatttcttcaaatcgttctactacaattgggtctactttaggcattttcataataacctcatgtgtttaacaagtttcttatgacgagattttataccaacgtttgttaagcgtttccgataaacgactttttctttttgcttaaaccgttcgtgtgctttctcaactgagacccacaatttagcagcttccgctggagtgatatctaacgcccttgcaatttcttgaaaatcctttccgctttcatgcatcaagtgagcttgtaatgctttcataataacctcatctatgtgacgaggacataataaaccaatccgtgaatagcaaaaagggagcccgaaggctcccgaatattacggatagataatacctgcttccagcgcagtacgatgaacaatgtatccatttctagattcttgtacatcgacttctggataatcatctagcattttagctagagtataccgatgcaggtaataatcgctgtcagggtcgtcgagtttccaatctttgccctcaacagtcattcgttggatttcatccattacccaccatccacaccagatataggctgttccacggaacggtagaggatgaatatacggaagttctccgtctggctccggggctacccttttagtaatggttacatcgccagttttagtgactgtaatcggggtgtaatcttctgcggaaacctcaacagaaacctcaatcacttgagaccctatatcagacgtgtcaatcactaacgtgcttgttgagccttctacaggagaaccgtctttggtccaagaataaaccccagttgcaccttctggagcaccgataacgttggctttaaaagatgcttcagacccttgttcggtcgtaatagactcaggagtcaaagtaacagaaacaccgctcatggtctttttagtaaaagcgacagcaatacctttagttgcagttccattattatagtctggggcagaaaccgttacttcacaattcagtgtgtagctagtttccgttgactcggttaaggtaattgttttacccgtttggccagaaataacagaagaaccacgtttccaaacataagcaatgcttgctcctgaaggggcaccagtaacatcagctgtgactacttgggattgaccaatttctttagaaacagaagtcgggctcaaagttaaagtaattgcaggcatagttttgttattaacggtaagagttgtttctgcttcagccgtttcaggatcgccttcagccggagtaacagtagcaactactttaacggtcttactacctgcaggtcctgcagcaacataattcatagctgcggtaacagaagattgttttacaccatttactgtccatacaaacgtttctgtgccttcagctgcggctccagaagttgttgcagtaaaattggttgttgctccaatgactgccgaagcagccaaaggagcaatagatacgctataagccatagctgttccttattttaaagttacaaatgaagaattacgtgtttcacgaatcataacagacccgtttcttttgatgtaatagattaaactaaacagtgtctggtgtgctgatgggtgttcaaacgacgttggccgagatttccaatctgggttatctttaatccattggtaaatccaccatggaagagtaatatatcctgggttcttacctagcaattgcatatttggactaaagttttcaggaagctcaatgatttcgtctgttttaataattttaactactttgtccattgctttgaagaattcttcagggtccgtagtactaattggaatgtttgtaagttttccttcatcatctatatgaataacgctgtctccaataggagcttcagcataaaatcctttatcattgatagaaggtgtttttacttcaaatccagggtcatttaccttaggggtttctttatagaaacctgggtcaatatcatgaattttaataccaacattaactggagcgtcaaacagtagttttgcttcatcagacgcttcatcattgaaaagtgattttccttcaatttcatcatctgcttggattaaatcagcaattgatagaccatcgttgtcttctggcataggctcatcggccaatttagccagttctttttccaaatcagcaaccatattgtcaaatgagcgggtcttcttcagtttaataccgaaggttttggcatattcgtcgagcttgtctttagcttcttttttatcgagtgcctgaatttctttaatatagtctttatctagcattgggtgtgcctcatgtaatgtataaatatgattgtatttataaactgaggatagtacagtgcacgacatccaagtcaaatttaaagattttagtcatgttcatattgagtgtgatgactcgattttctatgaactcagagactattttagcttcgaagccgatggatacagattcaacccgaaatatcgctatggacattgggatggacgaattcgtctgctagattataatcgtctcttaccgtttggtcttgttggccaaattagaaaattcgctgaccaattcggatataaggtttatttcgatccagctatattcgagcaagaaactctttcgcgggaggattttgataattggttgtcaactaaagaaatttattcaggattaactaagattgaacctcactggtatcagaaagatgctgtatatgaaggtctagttaatcgacgtagaattcttaatcttccaacatctgctggtaagtctcttatccaggcattacttgctcgatattatgtagaaaattacgaaggcaaggttcttatcatcgttcctactactgcgttagttgaccagatgattgatgatttttgtgactatcgtttatttcctcgtaatgctatgctgggtattcgaggtggtactgctcgtgattcgaatgcattagtttatgtatctacctggcagaccgctgttaagcagcctaaagaatggttttctcaattcggcatgatgatgaatgatgaatgccatcttgcaacgggtaagtcaatttcaacaatcattgcaggtcttacaaattgcatgtttaagtacggactgtctggttctcttaaagacggcaaagctaatatcatgcaatatgttggtatgtttggtgaaatcttccgtccagtatcaacttctaagttaatggaagacggacaagtaactgagcttaaaattaatacaatcttcttaagatatccagatgcagccgcaaatgctttaaaaggaaaaacgtatcaagaagaaattaaattcatcaccaatgttaagaaaagaaatcgttggattgctaatcttgctactaaacttgcagcgcgtgacgaaaatgcctttgtgatgtttaaacatgtagctcatggtaaagagctattcgagatgattaaagctgctggtcatgagcatgtctattatgtgtcaggcgaagttaataccgaaacacgtaatgctttaaaggctatggcagaaaacggaaagggaattattatcgtcgcaagttacggtgtattttctaccggtatttctgttaaaaacctgcatcatgtaattttagcccatccagttaaatcgaagattatcgtactccaaactattggtcgtgttcttcgtaagcataaagataaatctttggctacagtgtgggatatcattgatgacctgggtgtaaagccgaagtcagccaatgctaaaaagaaatacacacatttaaactattgcttaaaacatgcattagagcgtattcaacgatatgctgatgaaaaatttaactacgtaatgaaaacggtaaatctatgattaaatttgaagatatttacgaagccacaattcgtgaggctactatcgataacttcatgagtaaaattaatgcttgccagaccttagatggtctggaagaactcgagaagtattacgataagcgctctaaagaaactactcttgctgattctgatgatatcattgtgcgtgatgctttggcggggcgtagacaagctcttgaagctgattctgaagatgaagacgacgaagacttctgatataaaaaagccccaaccgaaaggaaggggcaaagccaattggctacatcaacactagactaaattaaaagctgcgtttcttgcaattgctcttctgtgtcttcagtgacaggcaattcaatcgcataattatagcaagctccgggatgaaccgggcctttgtctgtttggacaaccaatgcttcatcgattggtcctttacagacgacacataccgtattcgacatgattgtctccttagtttacaagtttatttattacgcgccagcttcaaactgacgaaggtcaataatatgcttaatgctaaaacctcgtgacttaatagcatccatagcatcactacagaactccaaaagaattccccaatattgcaatttagtatctacacccaagatttctttatcagcgcttaaaacagttttcatttctgatttttcatacacatccatgcatacttcaccaccaacctcgccacggccagtgtaataatccaatcgtgctttaagattttgctttttgagggcatctaatcttaacatctcttttcgacaagtcgagtgcttacgcacccatttaccatacagaacagggttattagccgcttcatactgtagtttagtctggtcgataatcaaatcattatccaattcatcctgtaattcttctaatctcattctatctccactctactgtttctttggaaggactagtaccattatactctactgctagagttagcattactacgcatctgtatgcgtatacgttctagcgtatcagggtcgtctactatagaaaactgcacggtgacaattatagcattatcgtcatataacggaagcacatcaactgatagacggttaatcctaggctcataattacgcacggcagagactatattacgctttatcgtatcaccagttaatggagtcatgttttcaaataattcgtttgtgatatcacaaccaaacgctgggtcaaatggccgagacccctttcttgtggttattattccaagaaggctatttttaaccgatcgtgctcctaccgtttttgacacatcggtatcccaagcaagtcgcatctctgggtcaaggtcagaatataatttatcaatattgctcatgacataatcttaaagaattctttaagccccttaattacatgaatgtgagaaattccgcattcacaagtaatgggaactgccaattgaacctgtggcttcaatagcatatttttgatgttaactacatcttcggttgtaatagcagaatataaatcatcgatttctgcatcatttaaatcattaaagtaaatctgctcatttccaaccacgatataatctatgcattttgatatcatcattggaatgtctgaatcgtcaaaaagattcggatacttgaactttattttaaatccctttaagtcataccagaggtcttctggaggatcgatttgcgcatgtgtataatttaatggcacaggaattttacgcccacaggtgcaattccaggtcacctcatgattaacctcgcctatactatgcgcccaaagtataactataagtaattccgattcctgtttgtttaattcagtggcattagtgcattctctgagcaatgctttaacgcattcatcgattgtaccgtttttcttcgctgcaattaaattagcgtattcttctagtgtaaaagctcggcactggatattcttgccatttattcttgtttcaaatttgtatgtgatgttcatatccactcctcttattcaaatatttataaatagtataaagaggattaccttatggccaatatagttagatgcgaattaccagatggtgtccaacgttttaagccatttacagtagaagattatagagaccttttattggttagaaacgacatgaacaccaagtctgaagaagaacaaaaacagcttatagcagaattaatggatgattattttcatgaccatcctgctgagtatcgtccttatatatttcttaaggtatttctttcaagtattggtaaaaccaaaatacctgtcagaatgaagtgcccaaaatgcggaaaatataagcagtatctttttaatcttaatcagcctccgttgacaaatccgaaagtagaggttgctggattaacgctcaagttcaaaaaacccatagaaataattgacgatacaggtaaaatgattttagataacattatatctgtgaaggattcatctggggaatacgcgtggaatgaattgagcgatagcaataaattgaccgttatcgatgctatagatgttgaaaccttggaaaagattttatcgcagatgaagccgtttaattttgagctaaaaacgtcatgctgtgataccacgacagtattaaaatatgataacattgttgatatctttaagctattgctacatcctgacgagattttcacattttaccaaattaaccatagattggtttctcaaggtaaatatgacttgaattctataatgaagatgctgcctattgagcgtggcataaccttatcgcttattgaaaaggaccttaaatcatgacaacacaaagattaggatatcctaatataagcataaaattatattctggatatgatgcgtggctagctaatagattcgttgaattagcagctacatttattacattaacaatgagagattcattacgcgggactaacgaaggcctacttcagttttatgactcgaaaaatatgcacacgcgtatgaacggtgatgaactagttcaaatatctgttgcaaacagtaacacatcgagaacacaaacccgaatttatgggattaaacactttacagttggtgttgatgataaaggcgatagcattatcacccttcagcttggaacactgcatgacataatgaatctcaagttcagcagagcgttttttagttctgcgtatgaaactataaaagaaatgataggtgcaatgtatgttgaccaaccattgattgctcctcctatcaacggaattaacgcttacgtcccacgggttccctggactagtaccctcaaagattacttacgatatgttagaaatgtaggcatttctacagacaacgatcaatttatttttgcgtgggaagatatcaccggaattaacatgatggattatgaatcaatgatatcccaggacccaaatgtattcatgttcggggctcctcaaacaataggtcagtttgctgcaggattaaaatatccattagcatgggattttgaatggcttgttaaatcaaatagatataatagaaatcccatgaaaaacgcaacattttatgcacactcgtttgtggacaaagatgttacccgaattattaatggagaaggccaaaacagcgtattcattaataggtcaggaggatattctgacatgatttttaggaatggctatgaagaagcactacgcatttctacgatggctcaatatgacgggtatgctcaaactaagtgttacggtaattttgaactaactccaggaatgaaaatcaactttgttgatttaaaggaccagttcagaactgacttttatatagatgaagttatccatgaaatatcaaataacacatctataactaacttatatatgttcacaaatggctctgcccttgaacctgtagatttgattaaggtgaaaaatgaacttaaacgtgattcttcctattaagaaaatagtaataaatgaaaagacgatatcaattccaaaactggggttaaagcaccataatctgatgaaagatgttaagggtccagatgaaaacatgaatcttcttttggattcaatttgtccaggattaacagcagccgaatctgatattgttgtattacacttattagcatttaacaacagaataaaagaaactgttgttaaagatgattttacctacgatttgaataaggtttacatttgccagcgattaactcaaaggttagatggtaaagaattcaaattcagagctcctcctcgttattccaaactaggttcagtagattcaattttgagcgaatttcttgaatcagtagatggaaaaccaatggatataaactttatgaagcttccagcttttgtgacaaagtgggctgatgacttagtaaacactatagccattgatggacctgaaggaccaatcaaaggcatgcttaacgtaatggaaatatttgaatgactaagaaatcagaaatgaattcaatgcgtagaagagttattgctgactcggctccacagaaaaaggctgagtctcaagctgatgctcagattaatacgctagaagatattggtcgtcgcttagacgaccaacaagcgtctactgatttgatttcggatgtaatagaaactaaatcaaacgaaattatcaaatcagtagaagatgtttcagctggtgttgaattaactgctgaagcttcagaacgcacaacagatgctgtctcgaaactaaatgatacagcatcgttaattaatgataagctcacgaaacttgccgatttgttatctaaaaagcatgatgttcagcaagatgtccaaaagactggtactggaacatcgttagaaacaataacggaacaagtacctgatgctccggttcagcagccgctagaggaattactcgaaaggcttattcctccacaggatgatagacgtcctgacgcggatttctttcctaacacagaagagcaagaggaaagaaaagaacctaacaaagaaactgaagataagaataaaaagtttcttgacctaaaatttggagaattaattaaaagcgttaaatctggttttggaaaaactatttcattaacagataaaattagcagtatgctgtttagttatactgttagcgctttggcccaaatggcgaaaactgccgccatggttttgggtgtgataatgcttatagatttaattaaagttcattttaattattggactaaattattcgaaaagaactttgttgaatttaacaagcaggctaaagaatggggtccgctattaactgcaataagcgagatgtcgaatgaaatagtaaaatcattcgtcaaaggagattggggcggattagcaaaagccattggctcgggtttggttgatgtaattgataagctcggagaaaccattatgctcggaatgagtaagcttcttgctggaatgttacgcgcattaggatttaacgattcggcagataacattgaaggcgctgctttagacagatttcaaactgttactggagcagaactcgatgaagaagatgctaaaatgagagcaaaatatgttgaccgtcaagaaagagaatatgacgaacagcctgaatggaaaagaaagctttctgctaagttccaaaaattcaccgggcagattgatgacgatgaatataacaaactgctgagcggagagaaaaagcagtcagcgtatgcagacttgccagaagacgaacgcctcaaaatcatcacagctcgtaataatgctgaagcagaactcaagcgtacaaaagcatatgttgaaaaaactgacgcatctgattccactcgattagactctgctaaggatgcagtacaaagcacaaccaccagatataaagaattggagaaattatctccagaagttgcaaaagacttaaaggttgaattagaccaattgcaaaaactccttgattctaaaatatcagaacctgctccaactgccgaagctatacctgcagcagaacaacctgaggttaaacagtctgcttctattaaagccgctgcggatagtcgtgaagctgctcgtacacgtgaatctaatacacagtcgcaacctattcaggttaataccgctgtaaataagaatagcacatacgtttatagaacgcctccacagacttcaacagctgctcctggaatgcaaggcgctatgaaaacctcttaaggaaaaacaatgatttttgaagaactggccgatggccttgaaaacatcaaaaaatcaggaactcgaatttcccaaggtaaatctaaactgacgaatgcgccaaccactaaggtggcgcagttcccagctgaacgttcagctgggaatgattccgcccaagatatgagagtacatgacttatatcgcaatgggttattattcacagcatatgattttaaaggaagaactactcctgatttgcgttcatttagacgagatgtaatgttatcgtctgtattcgattcaccaatgtcagcattggctaattcatcaagttctaccactagtactgcaccagtagctaatattctattaccgcggtctaagtcagacgttgattcagttagccataaatttaatgatgttggggattctcttgttacacgtggcggcggtactgctactggtgtattaagcaacgtggcttctactgcggtgtttgggtcgatagagtctttaacgcagggattaatggccgataatggtgaacaaatttataacactgcccgtagtatgtatgccggacctgataatagaacgaaagtgtttacttgggatttaactcctaggtctgcagatgaccttatacaaattattcgcatctatgaaatttttaactactattcttacggtgtgactggaaattcatcatacgcaaaagaagttaaagctgctattgatgaatggtataaaggaactcttaaatccgcagctccagatggggctaaagtagaaaacacggtgtttgagcaaataacatcgtttttaagcaatgttattgtagtttctaacccaacgatttggactgttcgtaattttggatattctacatcaatggatggtagagaggatatatttggtccatgccaaattcagagtatccgctttgataaaacgccgaacggacatttcaatggtttagcaattgctcctaaccttccaagcacatttacgcttgaaattactatgcgtgaaatacttactcttaatagaggtaacgtttatatcggaggtattgaataatgtttactctcgaagaatttaagagtcaagcggctgatatcgatttccagagaactaatatgttctctgttgtattcgctactgtaccctctagtaaaacccaggctcttctaaacgactttggtggagagctgtataataatatgggtttagatggaaattggcttggattgaccccaggtgaattcaatcagggtataacaactatagtgacacaaggaactcggcaagttgttcgtaaatcaggtgtgaatacatttatgattggcgcaatgactcaacgtgtggtgcagtcattattaggagaatttacggtaggtacttatctgctcgatttctttaatatggcatttccaacagcaggattgatggtttattctgctaaaataccagagaacagattatcatatgaaatggataagttccataacgctcctaatataaaaatcacaggaagagatatggaaccgctggttctttcatttaggatggacccagaagcaagcaactaccgggcaatgcaagattgggtaaatgctgttgaagacccagtgactggtctgcgaggattgccacaagacgtagaatgtgatatccaagttaaccttcatgctagaaatggattaccacatactgtatgcttgttctcaggggctatgcctgtagcgtgtggagctcccgaatttacatatgatggagaaaacacgatagcagtgtttgatgtcacgtttgcttaccgtagcatgcaaacgggttcggttggaaaacaagctgctatggattggttggaagataaggctattcagaaaattgagacgattaatccaaatcagggcttgagtgcgtctgcttcaagattgtctcgtttaggcggggctggtggtggaatttctaatatcactactacaacaagtagaataatttaggggccgtaaggcccctttgttttatgcaatgcagccaataaaccctggctcagtgcgaagaagtttcatttcgtttgtggtccaaactactttaacaggaatgataccttctgcctttccattaagaacggcttctacaaacgatggctctgttggcttacggaagatatcttgaataagaaccgtcggagtaccttcgttaaacccttcaagcatgataagaacttcttcattgaacttctctgcatctttaacatcagcagaccattcaataccgttaaagcgaaatacgtgtttcatatcaatttcctcattggtttgtgtaagtctatagtatcacgtccttgtgataagtaaacaactttatgcaagtttttctgggataccatccaggttgatagcaccagccagtagctccatggtacgcgtgtagctaaccttatctgtagaacggtctggcgaaaagtaaatctcatttaaaaagcctttgaacttgctttcttcaagaggttccactttgccctgttccatcaagatgtcaccatcatagagatgaaccgattcatcgatttgctctggcggaactaccgtcatttctaccatgaatgtcttgttattcgctacaccaactccatttctaaaaggagttccccatactttgttgactttcattgccaacccgcgaggaagaataacttcagcctcatcgctaaagcttgacaagacacccgggataactaccttaactttatcggccccatggataacgaatccaaacttaaactcatcgccataggcaacttcctcgcctctatcaactctttccaagttgtctgttccaataacagaagatactgcatctatagttgtttctttgttttctaaatcagaactaggtgcgtctggcattaatgaatcaccagcatttgaataagcaccaaagataattggacttaacgaagtagaaacatagttctggaaataaaacattttagactcaatgttatctttaaagtcttcatattttcctcgctgaccacgatacaaaagagtgcctggttcaagacgcaaacctttttcaaaggcagaatcgagcggacgaattttcttgtcaataattggatcgcctaagctttccatgccaataagatagttattaacaaatgaataaccagaaccacagtaatggtgtattgcatctctttcttcttcgcttaaacgagaatgcatttcacggttatattcaattgctttggatatagaatcgccaacaattgacacataagcggatatcatataattgacaagattttggtattgacgtaaagctccgaaatcgtcagctggaggcatatcaaatccacgagtagctacttcaacgattttacgcattgtttccatagatgcaggatttttagcttgagcaataacgtcagcaacgtctgaaattcgttgttcagcgattttcattttgtctgaccccgaaggaatgaaaaccttccagtcgtcatgcattctcgacatttggcctacaaataatctctcaactgcatcgccaaaattacttccatatccgccacgaacacgatagtgcttgatatcatcaacataaaaaggaattgatttttctaatccggctttgatatctttttggaggtctaccgtatcgccttctgcgctaagaaccggtgtgttagtagttaattcgtaccaacgttcgcgtttattttctggccaatcttcatcaacatatgaaacaaatttgccgtactgtgctcggattaaatcttttcgagacactttcattttactcattacagcgagttcagatttcttgtcttctttttcgccaatggaattagccaatgcttcggctttggtaacgttttcgccggtttctttagacacataaacttcgcctactttggaatctactttggtgtaaagttcttctgaaatttcaggaattccttcaatctcttcaagtttcttacctttacgaaccataatagaataagcatacttacctttgtagtaagccatatctttcattagattgaaacgaccgccggtgcgagtagtaatcaaccgagcaagaatgcgttgaatggctttatcctgtccttgcattttcttcggattaaagcggaacattaccgcatcagctttaatttgcttaactactttgttgacggtctcaaaaatggtattgatagcaccaatcgggtcttggcctaaaccacctttaagcgccccgatgttacctttttccgacacagagaaaacatagacctggatgaatttatcacccatcttgatgttcttaactgcatcaccttgacctgacccttgtactaaccgaatcattaaattgttattacccggcaccttaatcaaaaagacctgtggtaccttaagttttggcttaacgttctcgacgggatagattttactattctcttcatcgaaaacttcatttaaaagttccatgacatatcctcgtttgtttattctatttatacgaaaaaaggcccgaaggccttaattaattattgttactgtacgccaaacttgtagtccatttacagactcatactcttcaatgttttctttgaagtttcttaatgtgttaatgttattaaactcaataacttctgtgtgaacagaaataccaccacgtccgtcaagagatttagcaatcacttcgtataaagctttcattttattcctgttgcctcagtaaagttaacaccaaacgcggcttcgaatgtattagccacttctttatcatatctacgctgtttaatgataggtaagaataatcctactgtaccatcatcacgaccttcagcagttacccaaccattacattcaagttcccagatagttcctggaagagaatctctgtttttccatagatgagtacgatcaagttcatgtaattcttcgggcttatctttaagacctgacccagcgttaacacgaatacgaccacattctgatacgaacattaagccgcccattttaccaggttgttttctatgctcgtacgaaccgacacatttcaaatctacagtgataacctctttaaatttaacgaggttcttagaacgcttatcttcccaataagcaccgatattcttaaggataataccttcgagaccttggtctacgtatgtcttatagatagcccgagcttcatggatgttatgtacgacatggttttcaattagaataaccttgtcatagcctttgctcatcatttccaatgcacggaagcgtacatcataagcaaatccaggaactttaccttcggaatatactacatcaagcggaacataatcccaaacttggaatctcataccttccgcttcttcggcagatattgttcctttaatagccttattagccaatccgtttgattccgtgcgagccgtctgttggaattccttagctttacttaactcaggaagctcaggctctttaaacatatcaaacaggtcgttttcttcttctttcacttcgacatgatataccaactcgccgtcaatcatcacaccgttaggatggcgttctcgggcttctttggtcatctcgataagttgacgcttaagtttatctagacccaggtattcattaccggaacgagtaagaagagtcacatcatctaaatcatctccgcggatttcagcgaagcatcgggctccatcagctttaagttgtgcgaatgcagggaacttaatatatgacagcgctttctcagagtaggctgatgctaacatctgtggcatctcaggaattaatttcttccataccttattagcaatagaacctgaagcgccgcaacgcatatctttaagaagaacccgtaccagtacactagcatcaccctcattcatcttagagagcaaatctactagcccctggattgccatattaccagtaagtactcgtgctgccagaatgtcttggaggtaatctagaccatctgaaaacgtctttgaaggaacatttggatatttaacgggagtatattctggaactttcttaataaaaaatttaaatcgcccggaatacgccagcagataagctcgctttaaatcaacgttatctttattgtcaatgagaatttgggttttggctttagaacccttagcatcttcaattgctttgatgatatcaaaaatcattattcacctaattcttttgaaagttcgcttacgctacgatgataagttaatccatcgatataaacaaacccgttattgatgcattcattccaaatcgggcacgactttgcttcacgccaaattggattccaacgataaaactgattaacatggccataatcacatgataaccagcgtttaccaaccttagtatgaactacaaacatatttcctcctagggtatggcaattataccatacccagagtgttagcaattaatttggtgattatcacatgtaatacgaccattattccaccagtcgtttccaggaggaacatgcggaccaggactaaacggaatgataggttgtttccaccaatctcctggaacttgtcgtggaggccaattaaaaggatgttgctctttacgaatttggtctttgatagcttcttcccacaatccagaaagagacttctgcggtttcttaacgaatttcagagattccaggcaagttacaatttgatgccaatcttcaaccataattccaggagcagtcactgaaccttctcgctcaccacgaggcatataaaacacacgggtttcagtgtcttcaaagactttgctagctgcagcaatgtgtttaggcaaatcatctacatagcaaacgatgcgatcgccgtattttactttagccttttccagtaaagcatctttagattcatcataatcgcagaccatgatttctgtaaatgcatcagggaacaaagcattcagattgaaacgacgattaaggttagcatctactgagttgccaagagccgtgatagcgacaaaatcgtatttttctttgagcttattaactgtagctaaagcatcagcatacggagcaagataacgaataaaatcactgttgttgtacttcagaagcagcttaacagctagttcttcttcacaatcaaacagctcagcgggtttaatgaatttttcagtagtcatcatatcaaggatatgctctacaggaaggttatatttctgggcaaagtaaggcagaccactttgccatttaacgatgattccatcaacatcggtcgcaattacaggttttgacattcggggaaattcctcaatgcttgtttaaatttggcgacgctatttgcggcaccggtgaaattgaaccagattaaccctggagtgtccgagggttctatatcaattaattctatattataatactcaacagtctttagcatttccctggtgatacgtcgggcaaccatatgaccgaagtgaggattaatagacatcgtcgttagcagcccttaattgagtaattggataaagctcggattctgcatggattgaacgattgccatcaacccaattaacttcataccaaggttcaaccaagtaggctttaattgctggagccgtatcacatacaactccaggaattccatttgctaatcttactgtactgaagatatgatatttcatgcatcaagtctcactgcccattcgggcaattcaaagaaatccggagcatcaatttcatactcaacggtgtgttgtttaacatcagctgacatgatatcaaccattgggtggtttttcaaactgcaagaaaaaataccagctttaggtttaggcacggatacaatcatgttgatttcctcaaaatttagttatgaatttttctttcggcattttggcatttgagccatcactgtcagaatacccaattggcatagttgcattaatgaattcaattttagcatttataacattaatgctcagagaatctacaccatcaaccatacgaaattcaggagggcaatacttatcaatgtatgctttcacgccatttttattagcaggtgtaccatcgcgagtatcgctgataatggtttcaacttttttctttcgtgaatcatagaaagctgatacaatcatttcaatttcctcttaaaacgggcgaatattaacgtgaaccacagggacagcaaaaggttgcatgattacaacttttgtgtctttagttgcattcaggcgttgtacttttgcaagattaacagcttcttcctttgttaatccgccattgtaggtatcatttcctttatttgatgtccaaacaccccaatcattgcttccatcatcgtcggtcttcggttcaggttctttgtagatggtttcttcaaaataatgctgaaactcttgattagtaagaatacaccacatatgggaaaagcgaacttcatctacactaacgcgtttgcattctccatctggcttaatgatttcaaattcaactaatccggtattttccgcatatttaaaggttctggtaattttaatcggattattaccgatttgctcaaaaacacccttgataagagcgcctggagacaagattggagtctttttaagcttatagaatttacctttttccattatcatttcctcaatagtggggccgaagccccgagttagttaaaacttgatttcgtttgaaacgatatcccagattgcttcacgttgttcttcggttgttttacgaccgaggatgtggcgcagataaattttaacaagcagctgacgatttgtgttccaagacggatgtgaagataaatcacgtttacgaacttcatcatggaatccaactttgatttcagaaccgttgaactgaatatccagagtaggaccattttcaaagctgaagaatacgtagttatcttcccagtacatatcgatttgagctactgtgccattgttgtgttcccacagcaaagtagtagaaacgtcccaagcattgttctgtacgtatttgcggttgaagttagtgaagttcatttttattctccgtagtttgtttatctgtttgggtggtacaggtctatagtaacccagaccacccaagaagtaaacaacttttattcaaaaacttcagacatttttaacctctacagttttaacagtttttacttctgcaaatccggtgcttttaaacagttcatacttggtagtttcggggacgatatcggttagttcaaggatgatttcttttgcttcttttaaagtgaagacgctacgcccatctttaaccactggagtaggtttaacgaacgttgatgggatttcaaaaactgcatagcggtcatcagagctttgattttcaaacgctcctatttgcacaacacgtccttcttctaactcgtgagaagaaaataaacatgacagagaccggtcatattcatctcctatggtttttgccgaaatgattttaccggtttcggttttaatcttaacgacccgtcccagcgaatcaagttctaacggcgtccagccttgaactccgacaacggtggcaatgagatagttaattgtgttcttagcgtctttccatctacggtaagtttctggggaaatgcaatatactcggtttttgctgtaattcattttgatatcctcaaagatggggccgaagccccagtcaagattactgtttagtccaattatccatgtttaatttaccgacctttttcatttgctcaattaaagcatcggcacgattacgaccattttcataccaggttacatcttctgagtaaccgtcttcttcatctgtgtaagtttcagaacgaatacgaccaacaactggagtgttcagaacatatacagaacctgtgaaccaattggttagcgtgatatgccagcagaaatcatctgatggaccgtccggtgtcatgcatggaacgatatcaccttgaactttagacaaaatccacattttctcgtggacagtctgagctttataaccgtcatggtctttagtcttgatagttgcattcaggttgatggtattcattttattctccgttgtatctgtttgggtggtacaggtctatagtaaccttgttgagcctagaagtaaacaacttttttcattctgcggaaaataaaaaagggactcccgaaggagtccctgaacttatgctttcggcttaccaaaacgagaagcatcatcgcgaagaaccgcacgagcccgacgcatgattttctcaaccgtctgattgatacgcttgttcgacccacgcttgtagccagcgcgtttagaggtaccaacaacttcttttactgcagtttttgctttagcttgtttagccattttatcatcttccattttggagaaatacatgggagcacgttcttccgaggttcaacttctttcgacagttctttcggttgtagctcccgcaagccctcaaagggtacgtttaaactcttatctgttgcacaccgttagcttaaaggttccgggtccgatttctcggggataagatatacaccgatggatgtataggccttgaggcgtactcccgattggccatcgcctcggggtagcatgcacttgccgtttattttctagctgcactttggtagcaaatcaccgatggtttcggatgttttacgtggggataaccaacaacgtccacatcatacgttacccatgcgtacacatggtgggcgtacaaattacttcagcgttaccacaaagtggcgaacagctttgcgagcagcagaaccaagatgcttagcatacttcagttcatccatcgcttctaaagtatcacgaaattcagcttgagctgggttcagatgtttaaaacctttcagaacttccagtgcttctgcatagatatcgattgaagcaccgtagttttcgtgaccggaattccatgcattacgttggagttccagagctttagtaagttgtttgttcattgaatcgttcctcaaatgaggttaaaatttggtggacggtaaccgaggtttagctcgggcatccaccgcgtagaattgctcgggtaactaattgtccgacgcccaattcatattattatttatatacgcatgcaagggacttataatgacaagtcacaaacttctgccgaatttctttaggtttcttcacacctgctgctactaacggatgaggtacatttctgatattaccaacaggcagtggagtcaaatcaccgacttcaacaaatcctttcggtacatcatcaccgatagaatagatttcacacatatccggcagttgtccttgttcttcttttccaagaataataccggaaggagaaacaatttcatcaccttgctgtgcaggttcagatacgagaattacatactcgcctagagctttaattggaagttccatgtgttacctttattgtttgaccatgtagttatattaacatggtcagtttaaagcaaattacttaccgatcatctgcagcagatgctcaactttcataccatttaccgagataagtttatcaaaggcaaatgagcgccaaccttctttctcggtatcatatactggaagtgaagtagtgctttctgctcgagcagatttagtagtgctttctaccaaatcagatggaataatgtctttatcacgagtacagcgcagagtacgaatagtgccatcagctttttcaaacacaatctgggattcgcccatgctcagcacagccttcagagtttcacgaatatggatgttttgttcagtagtcagtttcattttgatgtctctttaatagttttgataattacagatttgcgcttggataattcttttaataatcgaactgcttgatcttcaaatttaaatgttgctagtggtttccatttaaaccaataccggcgttctactgagtatgatataacaacatcaccacttaggttaagtttattaatttcaacaattctaagtttcattattcaattccacagaattctttaatgttataccaattcaacttatccaaattacgttttggaacattgaacacctcgattccagcagaacgaagaatatcgtcccagccgggttcgttcttgtcgtatgtttcgcagtatactaattttttaataccagactgagcgatggcttttgcacaatctggacatggagacagtgtgacatacattgttgctccatcaatactactgccgttccgggcagcaaaaagaatagcattaagctcagcatggatttcattgactttagaccatgcagagtgggctgctcgatgttctttgagcaatccgacttttttgacttgaaatccgtcttgacgcaatcccgtagatttgtaaggaatttcaccaatccaaccttgttctgctgcatggtcacaacagttcacgccgccagaaggtgaaccgttatagccagtagaaataattcgtccgttcttttcaattactgcgccgactttccacgagcagcattttgactcttgagatacgagatacgcaatttgtagtaccgtcgacgctttcatttaaatcaccagataagttgtgttatttgttttaaccaattttaactcgtcggtaggagaagcaaaactctctactcgagaagtacgaatgcctgtaccatctggaaacggatgatttcctcgttcaagaacatcggaaaagacataaccataaagaggttggccttccttaacatcaacgttactgtacaaaatagcatcatattcttcgcgcggaattgaccaaacgccttggtcagaaccaataacagcattaattagacgaataccattttggctaatttctgccctaattccacgagcatgttcaattaaaagagcttctacagcctcacgtaaagtcattagatatgtcctaaaatgttagtcatttcaacttggcctgttccggttaaagccaattgagtgtgttgattgctctttccattattaactgtaatgatataagcatcaacatagttaaaggatgactctcgtcggagagtcactttacttccaggaacccggtttgctacttcctgtgcgaagattttaaccttcgaaataaattcatcatgtgaaaatttagcgtcagacaacataagtcataacctgttgggtttcaaaattagcaataattccaacgataaaccaatcgtgttcaccttcgccacaagaaattttaacttcagatgaaccgcctgagcggtcaatagaaaatttaataacttcgccgtttggaataagtgcattcatggcagataaaaactctgcatgcattttggctacttcagatggagtaaactcatctgttaaatgattagcaacaacttgcgtaaatgatacttttactacttcggaatactttggaaacattatactttcctctaaaaatcaccgtgggctacttgccagcattcaacaccgatacgacgccacatttcaaccacctgcgccctgtcatctactgcaagttttacattataacgatcagcaattcggtcccagaagatttcttcttttaccacatcgtctttgcgtgaatcgccttgcttacgttggaagtgttcgcctgtttcgccaacatggtccaacaaccatttcttcgtaatgcgttgataaacagtagggtcttctttagtaccagactctctgccggaaacagtaagaattttatatcctttgttacgaagcattttaagaaattcaattaccatttcctttggatggtctttaccacatttggccaagtcataaggagaacgatgattgttatctgctaacgtgccgtcaagatcaaagataactgcttttggcaatgattcgtctggaatgtacaaatcatatggatgcatcttagaatagaagctacgaagcacttcaataggaactgcattcgcgccacgatagaggttacgattaagcaattcagtccaaggaacgtcaaagcgtttaatttcccacttgacaccatcaatttcgtatgccaactcttgccacttcttgatagtcgttggattaaggttagtatcagcaatgatgacacctttagtggtttccatctcgagtagagtcttcgccatagaaaactgacatacagatactgacttctcacgaagcttagaatatttgtaatcattacgtttatcaaggccaaagatgccttcacgcaaatcatcacgagacaaaacataccaacctggattagctgctacgtattcgttagcccaggttgttttaccagagcctggagccccttgtgtcaaaaccaattttttcattatacatccttaagagtgtcaataaaatcatgaagagccttagacttttcaccccaattagcacgatatttttctttaattgctcgcaatggcttattcattgacagtatatcatttttgtcataattttcagctgcgcgtccaaacacgatgcacgccaattcattttcagcaattaatcctttaagtgtttcatactgctctcggttcattataataccatcacttaacgcaacgaggttctttaaggtcagaacgataataacatatcattccattagcatctttagtatatcgtaaaatgtcattcatccagatacgatattcttgcgactcttcaaacggcataccaacccaggctttaccgtcaattacttttacttcccaatgtccttcccatttttgaattgggtctggccactcaggatgtaaaaccgggacatctggtgcactagaagagcatccagcaagtaagctgataatacccatggctaatagacttcgtttcatctggtagcctcctggatatcttctgcaaacttattgaagcttgcattaatctgtttttcaactaatccaggtttggctgcaactacgtttccacgcttagaatctttattcatcttagcgttagaagtatcacgagctgctcggttttcctgatagcctttatatgttgtctgcagattttttatagaaacaccaatgttttctatttcttttgcttgtcgatcagattcatcttggacgactttgaggtcagctttaagattttctacccgccacgaaagatatttcaatccaccggcggataacgctaacacaccaatcatcaaccaagttgtgtttattttgagcatagtttaaggataacctctacgatatcatcacgggataatcccgaaatgaggatgtgacgatcagaactttccgaaggagaacacttgaagcaagcttctacatattctgccatctcagaataattcagctcgcgatgcataatgccaagacgatgcttgccataaatcgggtcaacgattacatagcatttgcatccgttagcatgaacgtttggctgggtgatgttcttgaacacctctgcaccatacttcgcgagatgattatctaggaaatcaatcatttcatctacagcttcaggaagggcttcggcacgctgctcgttcacacgattagtgtactctttttgcttcttacgagcagcttccttgcgcgccatgtgcgtccgtaggtcagtgacgaagcccaccttcttggtaccattccacacaaaaatcccatcagaatgagtaccatatttgttaacaaccatatctaaagtaatcgcttgcatatccatttcaatatcctcatcagtttgtgtaagtctatagtatcacactctgatgaggatgtaaacaactattcttcagaaatttcaatttctttttcgtactcttttggaacatatcctgcccagtacttcaagaacaccctttcgaggtctttaagcagtttatccacatctacagttccttcgtacatgttcatgataacaccaaaaagatggcgctgattaaccgttgctttctgagcagcaatagcataatctttacgagcacgacctctgtattcatcgtagaacgactgacatagctcaagtgactttcctaggtaatctagataagcttgctcaaacgcagaaattttcttaattgcgtattcatctccagcaaaaagagaacgcaaatcgtcggaatttgcagatacgacagacgcaaacagtctttcatttgacgttattgagtctttagtgtgatgaagagcagaataccattcggttttaaccttaaatctctgcccagtgtttagaactgcaatgtacccttctacgccttcaagttcacgaacaccttcaacccaagttttggggtcagaaattccgtaagcattaattaaataaggacgaatcttagcattagcgtacaaatcatcatatttaatatactcgccagttgcgttattacggacgtttaacacaaacagctgtggctcctgatatgctaaaacaacacgattattaggtgaaacaaattccatgtttaccgtataaccatctagcgctagctcaagaataacctgatgaagcgaagaatattcttcactgttaagcaaagctgaagcttgtcttgcctggtcactgtaaagagaggtttttgatttaaggtatagatacccatcatcaacataagatgatactagagagccatcagccttatccataatgtattctacatcgctaatatcaattcccatcgttagtgggttttcattcaaattgaagaatttttccatcggacgcgaagcaattcgaattggggtatcgccatccatctcaaacatgataccgcggcactcaagagcatcgggttttaaccactcactgtaacttgcgtagtggtatgaaaacactctgaacttaccatccataggaccggtaaaatctttataaaagaattttgcaacttctgagctttcacacagattcattaaatttttatatagctctaacatttctttaccttatgtttgcaattatcgtagtgccatctgatagcaatggcctttgaagttattataccacaatgcgggcatgggctgtacaaaggctttttctttcctttttggctttctgaccgcttgagtttagtttcttcagattgtgttttaccggttaaagattttgatatcttttcgcgtgtttctttggcatgagtctttccttgagtgggacttactctgcctttcagtgctttagataaattctttctatgttcttccgttcgtttctttccggagaataagttagatgtataattagaatgctttattctagagctttcataaaatctggaatgaactttaaaattctttccagaagaattacacatcatccaaagagcataattcattttagaattattatgtatctttgataatagcaaatgggcaatgaaatgttcacgtccagtcaataaaactaaattagaaacatcgtcatttcctcctaatgattttggaatgatatgatgagcttcagtataatagtttaattttcctttatcattgcctcgtaatttaccctttgctattaggttatcatatactttaacatagttcatttagctttgttagtatgttgggtgttccatggaggattgaactttttaattagaagaggttcttccaagtccatagtggatattgacatctcgccaagttcattattaatcaaaagattaaaacactgacgagcatagaactctacttttttgccagccattagtgcttcaaaaatcttggcagatttagccgaatcagaggtttggtctttccgattaatagcagttctataataatttatacgtttacgaagatttttagtcttaccaatgtaaactagttcatcatcaactgcgatggcataaactacgtttaacttgtttgctatcagaattggtttgatggtaaaatctggttctaactcaagttgaacatattttataaaagaaaactcgttagcaatatcattcataataaagaggggccgaagcccctttccttataagtactttttaaatccaattagaacatcatcagtgacatcattgtcaatctgagctaccagataagaacttatctcaacttcctgcggagcagattggactgcatcagagttaagatattcgcgaatccaaggaataggatgacgagttggtgcatccgtgattgggcacggcagaccacagctacgcatgcgagatacagtcagatagtcaatgaagtcatgaagaattttaacgttcagacccggaagaccaccgttgcggaaaagatggatagcccaatctttttcttggcggttaacttccatgaagattttaattgcttcttgttcacactctttagcaatctcaacccattcttcgccatcagtgccagtttgaagttgacgcagaatgtactgcgtgcccttcaaatgaagttgttcatcacgagcaatgaacttcatgattttagcattaccttccatgatttccatatttttatggaagttgaaggtacacgcaaaactaacatagaaacgaatagcttctaatgcgttaataacatgtaagcaaagataaagagatttcattaaatcacgtttagcttctttaatttcgatattatcttgattaaagcagcgatttttggcattttcccatgcgcgagtcttcgctataacatcatcatagtaaacaccaattgactcagcgcgtttcatgattgcttcgtcaagaacgatttcatcaaagattttagctgggtctacatataggttacgcatgatatgcgtgtatgaacggctgtgaatagtttcactgaacgtccaagtctggttccaagtatctaggcttgggtcagaaataagcgcagataaaactgctgctggagcccgtccttgaattgaatcaagaagagattggtacttcaagttatcagtgaagatattacgttggtgttctgggagtttttcaaactgaccacggtccatcataacgttaacttcttcaggacgccaaaagaagctcaattgcttctcaatgagttcctcgaatactttatgacgctgaatatcatagcgtgcaattcctagaccagaaccaaagaacattggttcggtcatgatatctacttgcttggtattaaaaactgtactcattctatttcctattctgtggtgttaaccatccgtggtctaattataattcccttttattaaagcttacaggccgcgcagtcagcagagtcttgaatcatatcatcgttaccggaaccatcacgggtgttatgatagtaaagagtcttaccaccaaagtaccagaaataaagcaagtcgtccatcattaccgacatttcaactttgcctttagggaaattcgccgggtcgtaataagtattagcagagatgctttggtctacaaatttctgcataatcagaacctggttcagataaggcttattaccctgtttcgcgagctgccaggcataatcataaagggaagcattgtgttcaacatttggaacgacttggttgaagcttccttcttttgattctttaactgacactggtccacgtggtggttcaataccgttggtagagtttgatacctggctagacgattcgcatggcataagcgcagataacgttgaatttcggataccgtatcgcttgaggtcttctcgcaggagttcccagtcacagacatagtttggagctgcgagttggtcaattctttcgttgtaccagtcaataggcagttcaccacgtccgtatcgagtttctttgtaaagcgtgcacggacctttttcgctagcaagtttaacagaggctttgatgagtgcatattgaatacgttccatcatttcgtgagtaatatcattagcatctgcgtatgaagcaaagttgcttgctaaccaagctgcatagttagtaatgccaacacctagtgctcgacggtctttagcttttaacgctttgtctacaggatagtcttggtaatccaaaaggttatccaaagcccttaccattacttctgcgatttcgttaacttcttcttggtcttgccagttgaagttgtcgagcacgaatgctgcgagtgtacacagcgcgatttcgccatcttcttggccaacatccgaagttggtaacgcaatttcgaggcagaggtttgattgcttaaccgtagccacatcacgaataaaaggaccatattcaccaacgttatctaccatgtacgggtaaattcgagcagtaccagcacgttcagtaaggaacaactcaaacagttcacgggctttaatacgtttctttcttacgtctgggttcttttccagctcttcgtataaagtacggaatgcttgtgcatcacggaagtattctgtatacaaagtaccaagacacacatcgggactaaacagagtgatgtaatcattcttaatcaaacgttcaatcatcaggttattaatctgaacaccataatccagatgacgaatacggttttcatctacacctttgttgttcttaagtacgaggaggttttcaacttccaagtgccagatttgatagtacaatgtcgccgcgccaccacggactccaccttgggagcaggatttaactgctgtctggaagtgtttccagaaaggaataactccagtatgtttgacttcaccgaatccaatttttgaaccctctgcgcgaatcattccagcattaataccaatacctgcacgcttactgatgtatttcgtaattgacgcagcagcttcgttaattgaattaagactatcaccaccttcaataaccacgcatgaactgaactggcgtgtcggagtacgaacaccagacataattggtgttggcaatgaaatctttttagtagaaactgcatcatagaaacgaataacgtttgctaaacggttttcgccatcatcttggtgcaagcacataccgatcaacataaaggcaaactgtggagtttcatacaattcaccagtgtgacggtcttttacgagatacttctcgataagctgcattgttccagcataagtcatagtgaaatcacgctcatgcttaatataagaatcaagcaaagtaatttcttctgcagaccacttacttagaatttctttatcgtacttatttgcgttaacacaacgtgaaatgtggtcaataaatgcaggcggttcaaactgtccataaacacgtttacggatttcaaacattgctgcattggatgctacatattgataatctggctcatcaatagaaatgctattcgctgctaccttaacgatagtcttctggatatctgcagtgctcatgccatcacgcagatgggatttaataatttcatacagctcgtatgggtctactttagttccttcgcacgcccattcgaggactttaatgattttctgcatgtcaaattcttgactaacacctgagctcttaattacttgcataagtcctctaattcaaatgtatctttaaaaagtttattcactacaagagctattatatcaccatggcaaggaagcggtttgcaggtgcatcctaatctcattcctcttaaagtttctaagtgctctcgctttatttctccgttccgaatcttagcaataaaatcgtccttaaacgctgcaatagcatcaggacgattatcgcaatctttaccgacgtaatttccccacattgttccacgttggatatttacatcgaagtcggaatggtatttattaaccacccgacatatcttcatgttatatcaacttcaaaccaacagattaattgtgttttgcctatagaccattcatatgatttaacaatagacagaaccctttgttcggtcccatcaaaaactatcttgtcattaacttcaggcaaatcgctagagaatgcatcacacatctcgcctaatactgttttagactggtgtcctttacgaacaaatcgaatattcatatcgccatctttcctgtaattgttgggtgagatttatacccaactagttcaaaatgatgaggacgtgcaaattgttctaaccaacgaacctgagaactagtctgccaagtttcatacgtatctgggaatgcaatttcaagctcacaaagttctttcggttctcgacgaagaatttctttacattgctcaatatgattcaggtaaatatgagtattaccaccagtgaataccaaatgcccaggtttaagatttgtcattttagcaatgatatgaactagtgctgcatatgacgcaatgttgaaggggaggccaaggaatacatctacagaacgctgataccattggaggtcaagatgcccctgacgaacgttaaattgatacagcaaatgacatggtggcaatgccatcttatccaaatcaaccgggttccatgcagtcacaatctgacgacggtcatatggaagttgcttgatacgatcaatgatcaatttcagttggtcaacacccatgaaatctcgccattgcttaccatacacaggtcccagttcacctccggaataccccatgtcttttgcctggttttcatagttgtcgtcccagacagttttaccttctagtaatgagtcatgctgaataagacgtaattcatgcacattagtagacccacgcatgaaccaaatcagttctgcaatacacgctttccacgcaagacgcttggtagttactgccggaaatccttcttgtaaatcaaaccggtgttgagtaccaaactttgcaatagtaccggtaccagtacggtcatcagtctcgtatccattttcaaaaatatctttaattaattcttggtattcacgcattaaatttttcctgaagaggagtaaagaaaagctggtctccacgcttttcaaatcgtccaataatagacactacatcatcgttaaccgtcacattaccgtgtgacattccgatgaacatcttcttataatcacgctcaatttcaataggtatatttccatttcggttatatactgtagttgaaccgttataagtgctaagaccattataactgaaaactagaagatgaataccatgcttaaatggaaatcttttccacttcttttggactttgtcttctgatagctgagtgatatcatagtttgcgctcatagaccacctctgaaatgttagtcacttcatcaatatgataccagtgattttctttagtaatgaatcctgattctggccaagtaggagctgctacaaattcagcaggtagagtgacatcagaattcactctatgactttttctgatggttgtttggataaccctatctgcatatggatatgccttctggatgattccggcaccacctatgatagaataattaaggtctctattaaaagtgatagtactgttgtaagaagtatgagcggccataatgtcaccacccaagaaaccgataaattctaattcacttacataagcatctgcaaagaagccatttttagcagttgccaacgcacgactcatgtcttggacaacgattgtcttacgaccaggaagaggtttaggaaaactcataaaagtctttgctccgcaaatcaagatagtatctcgagtacgattagcaaagtttttcatgtcctgggaaatatgtttccatggaagaccatcgcctaaaccgaaagcattttcgtttttgccgtctacagtttttgtaggagcaaatgcataaactatttgaatcatttaaacctcagcaaaatttagacatataaaaataatcctaatataatgccgctaataaaagcggcagtaacagaaattaacaaaactactaattcagcctcaatcatttcttggccttagcaagtttaaatgcttttttgaattcttcaacatcttcaacaggaatccagaagcctgagccatacccatcttcatagcatgggcagttatcacagtaatcattccaatagacagtttcaccacccatagtgaatggagcttccatctggcacagtacttcttcaacacgctctaattcttctgggtttttgtcgcaaatgcagaaattccatttaccacgatattcagaaccaagtttgatgctttgacgttgaagtttcatttttattctccagtagattatggagctatactatcacaagcatagctccttgtaaacaattattcttcaaaatcttccataaagtaatcaatgtcgtcccattccagagattcaagatatgcaataaccttttctctagaaccgcggaggtcaatatttggccaaccaccaccaggtccatgacgcataatcaagtcaaaatcaataccatggtcagtgtcataaaaacgtgtaccatctgcatactccaaatctacacaaataccgtctttgttgataataggagttgctacgatatcaatgtttaatttacccatgatgttttcctctactcgttttgtttcgatgtagatatagtatcactcatcaactggcttgtaaacaattttgtgaaatattttttggaggaataaagaaaaagggacccgaaggtccctttatattagaggtcgttcaaaatatcattcagatcgtcatcgccaacactgtcaccagcatcgcccatgatatcgtctgcggaacgagaagaggtcggtttggattcaaaatcagacaggtctttgtcaaaggaatccaggtcatcgccaattttatcggcttgagctgctgcttttgccgcggcaccaccaagagctgctgtacccataatctgtttaaatttggcttcgttaacttcaaacgatttaaactgagatggagcaacaatttcgctgaggtcagccatattttcggtcaggaatttctgagtttcttcatcattgatgtttgcaatctcggactgaccaaggaatttacattcatcatagttctggaaaccaccgactttcttaactttcatgacgaagtttgcaccttcatacacgcaagttacatcaaccggagtttcacccatatcaacatcaacttcaaccatcgcgttgattttgtccataattttctgaccgaaacggaatttgaatactttgccttcgttttctgggttagccgggtctttaataaccaggatgttagaccagaaagaggttttacgtttcagaagcttatattcagctgggttgctgttataagaatcgtttttactcagatgagcacaaaccgggcaagaatcaaaatcaccgtgggtagaagtacaattttcgatgtaccatttaccgccgtgtttgaaaccgtgattgatcagttttacaaacggtagagagttttcatctttaccaggcaggaagcgaattactgcttgaccattaccagcattatcggtcttcagtttccattcgtttttgtcttcgttagagaaagaagaaccacctttcagaccagccagttgttgttgaagttgagcaggatttttacgcttaaacatatgattacctttttaaatttaacagttgttgttgcaacatgggtccttgcaactggacgatagattaattatatactaatttctttacaagatttgattatgctaataaagagtttcttagcttcagcaccgtcaacgtttaaaagttttttataagcttttaatttagtggagtaattactccaaactaaattatccgttgcagtatcatgagtatttattatatctaaaaacgagtcaagcatgatgaatgtctcgaaagatataacgtttgactgaagaagtttgaacacataagatgttccgactttctcattatattcaaaaatatcatgaagcttatctacattaactttcttggcaaaatagtaaatgttctttacatcttccgagaacgttgttttaatctgcttcaatttacctatatattcacgataaaacacgagggcatcagcatcactgatatcgccaatccaagcatcttggttagctacgaggttactcatgaatatcagtgttaactcttttaatgtatatttctcagcgagtttctcaaagaaatatttgtctctacgcttttgataagctttatcagagacccgcataacccagttatacttaacaacgtcatatcgaccggcaaagtgttgtttgagcattaaatataaaagataaacgctcttaccgttaacgtatctgttattatttccaggcatgcggagacgaatcataataaaaaatccagactattcgttttatgtgtttgactaaatgatggtcgaagcatattttcttctaatgcttctgacataattttttctatgattgcaggtggaatatatctattgaagtttccctcaggaatagaattttcttctaaccactgagttgttgcttcaagataccccattccaagttctgttaccatagactcaatagtaaatccgttagcttgcttatctaacagctgattaatggattcagagggggatacctccccctcgtctttaagcgaaaatagagtcataagcttctaccacttcatctttttcagtttcaaaacgatcgcgtgtacctttatggaacagggcaagcagctgattaaataatttgccttctacaccaagctctttcttggcgcggtctttaatgtctttgttaagttcaagatagctttctgctttcaacttattacctgaggcttctttaatcatatctcgcagagcctgtccatgtaccgcttcatcaaatactacttgctctttttctttcttagccattatattcaccttaaaagttgttaatttctttcattaatttagacagaccggatttaacaaagtagctataaattttaccacgacccggtaattgatagttattataacaatctaaaatgttagcaacaatgtcttcgcggatgtaatcaaaatcgattaacacgcggttttccaagaaacgcttatactgttcttcagtaagcaaatctttaatgttttcgccagcatcaagacattcttcaacaaatgtcattttcgttgaaggagtacgctcaccatcaacatgggtgtaccaaaaatctgaacgaactttaatagaagctacgttatctttcttgtcacctttaataattttaaccatacaatctaaagcaggagaaccggttttagattttaccagtttcttctgcattggtgaccattgcttaacattaggatacttatgcaattgagtaaagtcaccatccgaagaaacaatcatgactggatggccttcgagactgaactttttggttaataccgcaatgctgtcatcagcttcagctttatcaatatcaatgacataataaggcatatactgcttaaattcatcaattacagtacgaagaccttcaaagtatccatcccagtcccaattggattcttcacgggctttagcacggttctttttatagtaatatgctacgtcccgacgccaatacccattaactgcgttatcaacgcagatgacaattttagtgtatccatctttcttccacttaaaagcattaaattttaaagtagaaagaataagatgacgaaccataggagttgttagtttgtcaccttctttatacgtatgaagaattgtcgccattgcaatttgtgacaagtcaattaaaatgacgccttcttttacttggtcttcttcggcgaataagcaatttaaatcagacatttgaacctcgttcaattagttagtacagccattataaatacttctataatgaagcataaccccataggagactctatgagcgatttactgaaacaacatttccgtgcaacgaacggcttggacgcaggcggaaataaagttataaatgtggcacttgctgaccgcaacgttaaaaccgacggcgtctccgtcgagtacgttattcaagaaaacactatccaaaaatatgacccgacacgtgggtatctcactgattttgctgtgacttatggacgtcgtatctggattgcaaataaagatattccaaagcctgctggagattttaaccaggcgaattggacttctttacgtgttgacccgaactggatttataccgtccgtaaaggagagtttgaaattcaatctggtcagttcatcaacgttgactctaacgctgcaggtaatgctacattactgcttccgttagcaccagatgaaggcgataccattgtagttcgtgatattggcgggcgtcctggctataacggaatcttaattaaagcacaagatactggtgcgtctatcgtatttggtgaatcgcgtctgcgtgaggtaagacttacacgtccgtattcacaaattatgcttacgtttagtaatggtgcatggcgtgcgagtttaacagattttggcgatactgccaagatggtagttccgaacgggattgttccgacgcaagttcaggcaggtgataacgtagttcgtcgttatacttccaactcagagatttttattactctgccgttgttcgctaattcaaacgatatcatcaattttactgaccttgacggtacatcgccaattaaccatatgactgtgcgtacgtttgacccaactatctcaattgggactcctgggcaaacagaggttcaagtacgtacttcaggcaccggatttttggtatatgactcgattgacaaaatctggcgtatttttgaaaatgatttacgcaccagagtaagaataattacttctgatgttactttaatgcctaatgagcatatttctgtatttggcacagataacaataccgttaaaacaattaacgttactttgcctacagacgtagctgttggggatactgtcacaatcgcaatgaattatatgcgcaaaggacagactgtagtaattaaagcttctggtggtgatactatcgctagcaatttgaatttactgcaatttccaaaacgttcagagtatccacctgatgcagcatgggtgcaatcaagctcaattacctttaacggaactacatcgtatgttcctgttcttgggcttgcatatattgaagataaagcatccggaaaaagctattggattgtaactgaatctgaccctaccgtagaacgagttgatgctaaagacaatacaactagagcccgattaggtgttattgctcttgctacgcaggctcaagctaatgcggagtcaaacccagaaaaagaattagcaattacgccagaaaccttaaatggacgtcgttctactgaaacccaaactggtatagcaagaattgcaacttccagcgaagttaatcagtcaacaactgcttcttacttggataatgtaatcgttactcctaaaaagcttaacgaaagagctgctactgaaactcgtagaggtttagcagagattgcgactaatgctaaaatggatgcaggaacagacgattttacaattgttactcctaagaagctgctttatcgtactacgtcggattcacggttaggtgttattcaattagtaaaaactggtggtgctcctaacacaactgctgatcgttcttctgctggcaccggtatattcgatcattctgattacaaaaatgcagttactccaaaaactcttcgtgagtataaagctactgtaaaccaatcaggaatagtctggttagcaactgatagcgaagttagaaacggaactcctgcttcttcaaatattcctacggttgttacaccagaatctttgcataaaaaagttgctactgatggagcaattggtttaatccaaatagctacacaaactgaagttaatgctggcggcgtgactaataaagcagttacacctaaaacattaaatgaccgtacagcaactaacaatcgtactggtattgctcgcttcgcgacacctggtgcccagggtgaatttgaagctggtacttcaagtacagtaatggtaaaccctaaattactgttcgataaatttgctaataccgatcgtatccaagttaatactagttctggcttaactattactgggaacctctgggaccattataccatcaacatacaggaagcaagtacttctcaaagaggtacaaccactcttgctactgctgctgaggttagaactggaaccgacgctaagaaaatagttactgctgccgcgttacatgctaaaacagcaaccgaaggagctatcggtcttgctcagtatgctacacaggcacaagttgatgcaggcacattaagtgatagaattgttcctcctgcttacttgaaacagactattcaggtaacagagtcatggcaagctacagacagcgttagagggaccgtgaggctatctacaggcgatggaacgtggaaaggtaatgataccaatggctcaactcttccggataacgggtatgcctctaagggcgtcgcagtgtctccgtatgaattgaaccttacactgaaacattacttgcctcgtctcggtaaagcctatgacacaggaatgttaggtggtcaaacaccagacaaatatgctcgtcgcgatatagcgcagactatttctggagcttggacatttagtcaggacacttcatttagcaataatatttctgtcaagaatgttatatatgctaatggtggtgaagttaaaatttctccaactgctgacactggaattgtgcatgttcgttttcaaaatagagacggaagcgagcgtggtataatttatgctgagcctcaaacagcttcagccggaaacttaaaagttcgcgtaaaaaacggaacaggaactactgctgcaagccagacctacacatttggcggtaacggtacgttagaagttcctaacgaagtgtcaactaaaactctgaggtcttctggaaatgcaatagttggcggaactgttatggttaaggacgttcagatgcttgctgtcgagggattgaattcaatattcggtgcccaatcacagtccgcatttattcgttcccgtgacgctgatacacaaatttttgcacaggattcaactggatcgtatccaattttaactaccaaaaactacgcaagattagctgatggccgttatgtcaagaaagctggtgataccatgaccggcaatcttaacataaatagttctgctatcgtcattacgggttctgaatcctggtatgtgccaacgaatgaaactgtaataagacaaggttcttggactgctgaaatcaaagacgctactaaattgaaaggtcttcgtggttatatggttccaatcagaacaccgattgaccctggtaacccaagcactttagtagtgactgggtatgaagaaaaaactgcagctggtggtgttttaactcaggttggtgtaactacaaacaatacttatcagctttggacgccttatcctccgacaaccgaaactgctgataagcgtttcgcgcatactgtgtggatgaggatttataatccaaaccttaataagtttgatgattggatgcgagtatttacatctgctactcctccaactgcagctgatatcggagctccgagctcagtatcaactcaggttaaaacccttgaagttttggaatggattaagcttggtccagttaaaatctggccagaccgtccaaatcaaactctcaaatttgaatgggtaggtgattaatggctgaaccaattttaatggcagccttcggcgaggatttcgtggaaacacgaatcctctctgaggcaaactctgtgaagtattggctaaaagcttatgctacgcattctaatgctgttccgaataagccagaattgaatattaacggtgcctttgatatgacctcctccttacggagggggattaatgttgttcaagttaatggtgacaggtttattaactttaaaacatttgacgttaccactgatgataacaacgctaataacaaagcgtttgtagaatatgcaaatggattaacttcgggattgtatattataatgacacatgaacgatttcaatccagcccgctaatagacaggtggtttaaaaataagtggtctgcttcttggccaggttctgatttttccaaatcatttccaaactctgcttatgtaggagtgctcggagcagcaaaaggacgcatattaattgagtcattttacggaaatgatggaaaggttaaagaagattccagagctaaagtcgatactgtatatgataacgttggcgatgtaggatatacaggctgcccttatcgttccattgaagacactaatgagtactcggattctactggatatgaatataagcgatatccagttcaaaatgaatctataagcaaaatagctgattatggactatctcctggggattctgtatttttagtatgtgatatgtatgcatctaaaagtcttcttgatgctggttctactactagagctagcctgcgatggttcaaaggctcatctttattatcttcaaacgtatcattagaagttccaaaaaatggagctgatagatggttaagatttgaaagatttaccgctgttcctacagacgctgatggatttactattgtggtatcaagatatccaaaaacgtctgtagttggtgactctaaaatcaaaaaccttgtatttgttcaaacctctcatagcgaaaaactgaatagtgttgttcaagaatttggtgtgaatggtataagaatgaataaaggcgttgaaggaggaaccactatgattatggaacttccaaattcaaaagtcgatccgagcggtgttattccagttcaatcgttcagagaaacatcagactaaggaagccttcgggcttccttttttcgtataaatagaaaatatataagaggataaactatggccgatttaaaagcaggttcaacagttggcggaaatcctatttggcacgcgggtacttttcctcttgtgccggcaggaaactccctaacttatagaggtaagaaggtttatactgagatagataaacctcaagcaaatgataacgacttcgtgtccaaatcccgtggtggtacgtatacaggcgaagtaaaaatagcatatggcgactctggcaagttaagcatgggtccgttggcaaatgttggtattagagtcggtggtagtaatggtgaagttcttatcatcggagggaattcaaaaattcaattgcgcggcggcggaacggaagattccagcggcatagttgaaattgctaaaaatggtaacttaactgcacagactggtagaattaccgctaacgtatttacttctaaacaacagccatctggcgtagacgatttaactcgtaaagattatgttgatggacgaataaatactgttagcaacgtagctaacgcagcagtcaagaaagctggtgataccatgaccggtgtacttagggctaacgctggcgtagttatagtaaataaagcaacatccggtgaatatgctcctagattagatcaggttatttcacgcggggtaacaatagattttggcacatactaagaggtagccatggccgatcaaaacttaaaacaaatacaatttaaaagaactagcacagagaataaagcaccaggtgcagatatcgtagcccgtggcgaaatcgcgttgaatacccatgggcgtactctcgctatctacaccaaagatgaagccgataacgttgttcagcttgcaggtaaaggtgttcctttcttagatactgcaggtaatcttaatgttgatggaactactacgttaaaagacaatgtaaccatttctccgaataaagcgatcaattttgaagcttctgatttaagtggagcattagtacgtcatatcaccggtaagtgtgctaataacgatggctggtacattggagctggtggcgcatctgaccagggatttcttgaaatcggtacgtatgataacggaaatgaacctatctattttgttcaaagaactggtggatcggcgcaagctgaagttcgtcgtttagcattattagatgggtttggcgatacctctatacctggggaccttcgtttaactaataaaacggtaaaaatttcaaacggaagcactcttactttggaaatgggtgtaggcgctaatgacgcgtacattaaaaacctgagaggaaccggtgttcttcaattaactaatgacagcaatttaacgttcagaaattcccaggtttattatgccatgaacggaagaggtcctggtaaatccggtactcttctgacgaatgtagaaaacaatcgtcaagcctggcaatatactatttctgctgcaactgctggaactccacgttgggttaaagtagctacaattaaacacccaggagatgcgtcttcacagttagatttaatgattactggtggcattgattctgggcacggaagacattatgttgattttatcacgttatcaggacgaaatttaacatcttggagcactaacaatttagataactgggttgaatggcgtcgagttggttctcctgataaaggaaagattccagagtattacgttgttaaaaatgatgctgctacagattcagaggcttcatttgatttttacgctaaagttcctcgatacggcaatgggctttatgttacagtgctaaacactgctggatacaacggccaagatagcggtaaagtaattatctatgaaaccaaccaagacactggtggatatggaccagctggaagtattcttgtttcaatgaaacagatttttgacagttacgcaaaaccagatttcggcgatactacgggtactcttccagttaaccgtggtggtacaggtgctactagcgcaggagcagctcgtaataacttaggtcttggtactgctgctgttcgcgacgttggtgaatctaacggaaacgtgatggaagttggtgcttatggcttaggcggtaatggcggtaaatcaatcgaaaacattacctctaatgctgatatgttgacccgtttaaaagcatatggtggtactttctggcgtggtgttactaaatctggtgttagtgttcaaaatggtctttatagccatggctccggtatttttatgaatgctggcgataccatgtcagctattaatatcgactacgccagcgctaaagttcgcgtatacgcagctaacgacagaagtcttgctgagggaaatgttagatacaacgaactttatggtacagcaaataagccatctaaggctgatgtcggacttggtaatctgacaaacgatacccaagttaagaaagctggcgacaccatgaccggtgatttagctgcacctaatttacatgcttccggcaccggtactgcatcagtgtatgttaatgcaggaagcggaaatgctcatgtatggtttagaacaaacgccaatgaacgcggtgtaatttgggcaactccaaatacagcggatttaggacaaattaatattcgcgcaaaaactactggaggtgtttctgctggtgattttagcttccgttctgacggtcgatttgatgttcctgtagcagttaaagtcggtggagcagcaatgctgactaaagacgggaatattacctctggttcgatgtttggtggtaaccttaacaactatttgacttccattaaaaacgacatcactgctggcgataataagcaagtaagtaaaactggcgacacaatgaccggtaacttgactattaacgctaacttaaaagtcgaaaaccctaatggaacaatggctgattttggttcagagaattcggataagtatagcagaataactcttgctcgcaaagttggtagcggtgctgccgtagcaatgcttaaagttactcctgaaggacacgtgcaatttggttatcaaactgcagtttctactccagctcctagtaaatatattctagttaaatccagcggtcttgaggtagaaggggatttagtttttaatcagacatatagcggcgctgaagaggcagttgatatttccgataagactatcgaccttaatagtctgattattagacgatcagatttaggtactcgtcagttatataaatgcgtatcttctggcggtggttctaagataacaaacaaacctacatctgatggtaactttgttcttgaagttctgtctttacgcaaggtttctgataccgattggtcatgtaagcagacctttactacaaagaacggcggtgttgaaggcacatatatccgctacggacaaaatggttcatggtctgcatggaaagaagttgtttctggtgttcagccaattaatttaggtggtactggagcaacttctgcagcttctgctcgtaacaacctcggtgttggtgaaggacaaactgtaaaattcggtaatttagttacaaccgatttaaccgcaaacggaaacgctagattagtcggaagactgaaccttggttctacttccgcaaccggtgtattacgggctaatgaatctggcgcagttgttttaggttcttctagtggtcaaaacatccacatcagagcaggaagcccagatacttcttctggtgaaacccgctttgagccaaatggaaacgttttagttggcggagttctgacgtcttcaggaagcttacaagtaaatggcgaagctgcgatgagcagaagcttgatcgtttctcaaaacataaagaatactaacgataacagttttattctgatggggaaagattctgatttaggtttcgttaaaaaatctaactcaggcgctaagctggtatttgcttcaggaaaatcatttgttgttgctaaatcatcagcaactgccatagctaatccagcttcggaaacttacactgatgtgtttaaagttgacgcagatggaaaccaaacagtttatggaaactcagcagtttctagagctttgactgtatcaagtacagcaactattaatggggttattaatgccaacggcggtattattgttcctactaccaagtatgtgcaaattgccgatgctcctacacagaataaccaagctgccaacaagaaatatgttgatgataaggttgcttctgctattagtaacgctggcgatacttatcttccattagccggtggtactgtaactggtaaccttgacgtaactggcaccagattaaaaacatggcagttagaagttgatggcaaaagtactctaagaggcgggttagatgttagtagcagtcttaaagtttctagcggaaacttagtcgccgctgacacaaccaatgctggtggtctttttgctaaaaacggtaatgtttactgtgatgcaggttcagctggtacaaactctaactactggttccgtgattctgctggaaatgtcagaggtgttatttggtcaaatggtcaaaacggtgacatgattatccgtaaccaaagtggccgagagcttgtattcagaaatgatggatatctgcaattagcccacttagcaccaggaaacacagataatgcaaacaccgtaaatggaatacgtttacagcgcggtgatacgattttcgatagctttaacgcatggcagtcgggtgaatatgttcgcgctggatggcatttctataacgccgctggagttgaccagtggttagcacttacagatactggtgtaaaaatctggggtagtgctgctaatctacgcgttgaaggtgttggtaatttctgggacgttgaaattcgttctgaccgtcgtgtgaaatcaaatattgctaagattgataacgctcttgataaagtgtcgaagctatctggtaatgtttatgatttacagcttccaaatggtgatactaaaccatcggctggccttatcgcacaagaagtgcaggaagttcttcctgaagcagttacaactgataacgataaagatgcattacttcgtttaaactataatgcagtaattgcgttattagtcgaatctgttaaagagcttaaagcagaaattgaagaacttaaatctaaataatgttatggggcttcggccccatctttgaggagatatcatggcagtaacaggtcctaatgtaggaagctcagctaaggctgtaacaggagaatcttcaatgattgcagctggagcaaaattaaggctgggaacacccttttggatgtccaacatgataggaagaaacgtttggaatgctagtataactatttcaggtaacaaccctgcgacaggacctaaggttcgtggcgcttggaatgataagaacagtgcttcgtggaacgtattacttgattctcgtgggtccttatcaggtatatgggaaacaggctttaatttggttgtttttgggctagcagagcctagtaaatgggacggttataatgatgccatcgttttagaaggcagtgggaattttaatgtaaattggcgcgttgatattgaagatggaagtcagttccattttaacagctctagagattatagaggaagacgatgctataattgtacagacccaaatgctttttggaattggctttacgccaatgatggacgaactttccaactgtcgtttacagcatattaagcatatgctagagcaataaatagctctgtaaggagagcaatatggcaagcaaacaatcaataccgttttttgatatgtttcttgggttgctcgagctattattcaaagatggagccacgggaagagttctcttttcccgtgttttcgttgtcgtacttttagcactattggcgtttgctggatataagtctgatagtcttattacagcttacgtcgacagtacttatgacaagtatgataaactggttcaaaaggatagagattcccgatttgataatacagcactcgaacaactccagatagtacatatctcaagcggtgcagacttttctgcggtctttacgttcagacctaaaaacttgaactacttcgtagacttaattgcttatgaggggactttacctagcacggtagattctaaaaacttgggaggatatccaatcgacaaaacaactgctgaatatagcacgcatttatcgggtagatatttttggacggataaggaatttgttttcttaccaacaaaaagaaaaccgcctgaaatatcgtatatgtttagctgtccgtatttcaatttagacaatgtttatgctggaactgttgaaatgtactggtacaattccaaacctgcattatctaacgaaagactaacatcgatatgtggtcaggcggttagagctcttggaagagctaagtgattacttattactatgcatagccattgttcgatagatagactcaaatccctcgttgtattcttcaacgagaattctcttctcttcgtcagttaactcagaaaccattttacgaaagttgctctgatttaactgacgcccctgctcattcttgattccaatttcattcaagaacgcaataaattcatctcgcttctccatgatatgttcagcattgaacttggtcagaatagaagcaacagtaacaatttcttggacaatttcaaacttagtcattatttttcctacaacataatggattatgtgattatagtatcatcttgataccgcgttgtaaaccagtttatgccaattcccaacgagaattcaaatcttccttggtagtgatatactcagcaccagaggacatccagagcccgtagcgaccatcttttactctagccgttaaataccattcctttccaattggacgaaccctacgattcatccagtgacatacgtcaattgcctcttgaaaggacaagtcaatcagacttccaagcgcgattttattcattaacgcttcaagatatctttgtgattcaacgacagattctaggttatgactcatgctaaaaccacctctccgcgattacctaaaatgctttcgatatactcaactccacttataatgtcacctctatcctttgctttaatagtaataattccatacgtgtggaaatctgctgatagactaaacggtttagaagtttcctgagtaaacgtaaacattactgcttgctctaaatgttttacttctaagtcattagcccaagagttaagaactttaagcctaacttgtaaggtgtattctactttaattgctgaaagcaattcaacgcgtttatgatatgccttggcttcatcttctctgcgtaaagtttcagtattcatagataatctccaatatcataagcatcaacgcatttctgaaattgttcaataacttcttcaggttcaacattagcgataatagctacagtaaaggtaccattattccaatcgtgtaccatccagtctccatagccagcattctgtaggtcttccattagttcagaatggatatcttctactaatccggaatggtcccctaatttcttatggagagcttctaggtcatcacaaataatggttaaagtagtacatttggaattattcagaatgcgcattttctttgcctttatgcttttgcttacgcttagattcctttgcggaacgctttttatctttgtgtgctccgcctttattaaaatcatgtttagctactagattttgcactttcaatttccttgatgtaatagtcaatatctttaatcatttcttctgtcattactttgtacatttcagcaagaaacggtttagcgccgccattaaatggatgactaaacggacagatgtattctttatccatgagagttttcatgaatttgctatctgccattttaaacccggcttcattggtatatgtaccccaattatcgtccatcatttctaacgaacgctgaagcgatttacgctgaatttttaaaagcgtaatgttattctttaatgtactaatcattagtataaatcctctgagaataattcattggcgggtcctgatttaggacgaactgtattaacttggcctgcatgtgtagcgatgattaatgcttcttcgcgtgtgaagtactcaccccactggtcaacaaatccttgattgtctccatggacatggtcagaaactaatttgtcacggaacatatctagaacgttcgccatatcaacagaataatggcgagtgcctggaactacaattgttccaccagttttcaattcaaaacgatttgctgcacaaacgatacgacgttgaagtaatcgtccatcccaccaatcagctactttaaaacagatttcaggaatactaacttcttctggctcattaattagagtaccgtgacgagaagcatcaacaaatttattcatttgttcggaaaacttgctcatttaaagaatcctttaattttctgccataaacttttcttttcacgaataccaatctgacgaataacaggttcaccctgcattttctctaaccattccattgagttaacagcttccgccattggaacaaatttagcaagggccttttggtagttatctacatccatgatatgtttaccatctgcattgtagatagcatagcattttgtgaatttcttatcaatgtatccgataaagtgcccacggaaccatacatcccaacaatcagttgggatattagcattcaagttaactttttctacacaacgctgaagttcattcaatactttaaacttgttcattacagttccttaatagagcggatgatggtttcaatgttttcagcagtacgagcgatatctaagtaagtattgcctgttgcagctacacggcaagacattccgaggttagtgaagtgtttctgatgctcttcagaaatcttgtaaccgaagatacggaaagtacctttgttgttaacttcaagactacgaataccgaatgtgcgtttttccagaactgcgatatagttactacggtaaacagtaagttctttcagaggtaagatatcttccatctcaccgagaagtttcatcatcaggtctttgtgctcattcatatcttcagtcagaggacgagctttacgagtattgcgtttcttaagaagttcaggcttgttctcttctgcatagataactgccgctttagagatgatgtcctgtgcttcaccagtgatgattaaaccgtcaccagatttctcgatgagacctttcttaatcagaacaccgatgtttgagttaacagaacctgcgttcatggtttcttcaaggatttcacgcagttcagcagaagtgatgaaatcctttttagctacctgaaccaagatagcagcagttttttcgttcagagcatcttcggaagctttgatgatgtaagttactttagacattgtgattctccattctgttttgttcaatttgtttggtatgagactataataacatctgctaaccagcttgtaaacaactttgtgaaaataatttggggcattctaaggagggattttggagggatatagatttatatggaaggacctggagatgacctccaggttccctagattaactgaggagcaataaaactagacctaatactgcaattacagaacctataattaaataaaattctatcatagttcttccaggtctttcagatactcagcctcaggagttgtcttttcccagtacttaacctcttgggcaagacgttttgcttcctgagcgagtttctttgcttcatcatcagtgatgtgatagatgttcattgaaacaagtttttcagaatgttctttgaatagttcattctgttcaatttctttagtcaactgcttacgagttttgccttggataacgatgttacctgcgataacctctttgataaattgagcttttgcctgagcaagattaaatgcctgcttagtttcagcgattttatgctcgattcgtttggcagtgaatgtcttacggacttctacgaaatgacgaattaactcaccggaagttttgaacttatcgttcagcttaccattctcatcgatgaccacaatgtattgactcattttctcaatgagtttaaaatccttcatgattttagcatgacgctgctcagggtcttcgcttaaagcatagtctttacggaatttcaccttaaagccaaaaccagtcttagaacagtcatcatcataagtgatgtatcctgcatcttccagaggatcgagtactttctctacataagaagcacgctcaaacttgtatggaatttcgcttatatagattgagttccgtgaagtttctttatacacgccgtgcagctcaacagaaccgtcttctgtttgaacgatttttccgttaaatttaggaaactgtacttcaggttccatcatttcgccacgaagtgctgctttagtgcattccaaaacagattcaaaactatgcggaagaatagaagttgaatatcctgttgcaataccacgaacgccattcagaagaacagtcggaattaccggcagataatatgctggcggaacatgttctttatctttatgtgctggagcgatttctgtatctttgtagattttacggaagttgtcagaaatccggcagaaaatataacgacttgccgcagcagattgaaccagacgcgaaccgaagttgccttgcccatctaacagaggatagttgttattccatgtgtttgccatcaatgcaccagcatcttgggcagacgtttcaccatgatgatatcctaaatcagctacaccaccggcgacagacgcaagcttatggaatttttctttattaccgcgagctaaatcaagagcccgagcaataacaaaccgttgtacaggtttaaacccatcaatcaagttcggaatagcacggttttctacagtgtaaatcgcatactcttttgcttcattatcaatgatagatttcaaatcgcgatgacgaagatttgatgccttagccaaatcatcgatagaacctgcttgttttaatagagtgtcaaaaatatccattgtacctaccaaattagtgagccgatttgtactataacatcggaaatgaaaagcacaatataaatcattccgtaaatcattccatagtacaaaaccaaaagaatgatggaaataactacagcagaaactaggagtttcttaatcatttgtaaactcctgcaattttacaaatgcgctcaaacataataaatgctgcggtgaacgcaatgcttccaattactttagtggtaggcacgaggccataccacatgaatgttcctgagcaaatcattagggccatcagaaacacatagcccatcacgaagaaggttctcattagtatttctgcaaagtaaagatgaagttatcattcagaatacgattcagctcagagtaggtctgcgcgtcacttgaatgctgacgagtaaacgccaatgcaagctgacctttgccataaccagtggtgagtggtttcattttattagcaggaatccagaacacaccgtaggtcatgcaattcgagcgcagagtacgacccaactgagaacgtccagaacggatatgagaaagaacactttcaaatcctgcctttgaacgctgtttagctacaaagaaacgagcagatgcaccaatataacctgctttgccatcattgaacatcaaaaaataaaatccttcgcgctcagtaatttcacgagatggagcacctgctgcccaatcaccgttacgaatagaaccgatcagttctgcgccagcgttatcgagatcagcaaaagtcataatattacgcatgttaatttcctcagttgattaaagtttattctccgataaggggccgaagccccttctactaccaaaaatatactactgccgttacaccaccaacccaaaacacaagaagacctaaagcaagcagacgatacacgatgtgtcgtttcatttttgaccttcccatacggtttctactaaggatttaaggccatcagtttgaataatatcaatcgcattaatggcaaaataaattccgaatccgaacacggtgacaatccccagtgctaccgcaacaataacagacagaacaacagttctcattaagttaaagcgacgatcaaaactattacgaatcattatattttcctcagatgaaagcattaatccaaacgttaactaaatcccatgcgaaaacaccaatgaaagtaacgataaggcagaatactacaaagatgttcttcagaatcgtaagtaactttttcattttgttctccagtttagctaacaagattatagtatcaccgaagaacaggaaagtaaaccgttaaatgcacaaattacgaattttttcttccagagctttgactttatctatgtgttcatcgcgagctgcagcggctccattgggatacaatccgccgtaagttgaatcgccattatcacaagcaatgatagtataatgccaattcatagattcgagaatcctatactctttcaaaagttcagctttaatagaagcatttccgcgtttagctcgaagcgattttagttctaagtaactcatgttttactcccgttcagtttgtaaggccatagtatcatggccaatcccggaagtaaacaactttttaaaatttgtgcatgatatacccgccagcaccaactcgtgaaggttttactacttccatgaggtgttcgataccgccactgaacatcggtgtgtaccgtatgacattctgggacacttcttctgcaacgaatataattatacagtctgcaactttatgtttaaacatgggccctagatttattccacttccatctgggaatggaccgtctttaccagttgtaacattaatccatggcttatgatttgctcggtcatgaacaaagtgtgttttaacttcaactctaacaccttggtagtagggatgagctaatacgtcccaggcccattcatacggatcgttgttattatggtcaacaacttgatcgtttacgtatccatcaagaaaatccgctaccacatactctgccggtatagcaattctacatcttttaagaacatcaattctgtcttgagatgggtcgatatctaaactatatcttgcagtatcaatgatttttacttttgcttcaccccttagcttattcaaatctagggtaaatgtccgcaactggttcaatctctgcagggctttgttcatcaatgccataaattcctctgatatgtaattcaccaaaataaacacgatcgtcgtggttacaagtgtctggttccacaacaaaatcatcaccaagttctacaagttcatcacagtgcaaccaagcatagtgaacatcaccttcatgtttaactacatgatgacaaaacactgtagcagcatgatgagtaccacgaagattaacaactttagaatgagatacattaaatggattaatcatgtttcacccataataaaagaggagcccgaaggctccttataattagcgaagttctgaaccccaacgatcagttacatcttctaatactacataaccacatgtacgcattttagcatcgttgtaatcaaccgggatagatactacatcacgcggatgaactttaactgaaacaatacggtcagaaccactaccgaagtgaccgatgtaagatttagagcagacatgcagacctgcggaacaagtacgctgatcgtcttcatctacctggttacgcggcattgtaacagttttaccaggagagttatcaaacgtgtttgaagcacagtccatataagtggaacgaactactttccaaccaatgaagtgaccatcatcagtgatgtcgatatcgtttgcattcaggaaatcaaacagacgataaactgcacgacgagacgggttcagcatcaggttttccaggaaaggcagataacgtttaaagtcttcgccatcttccatagctcgaacgatacgctcagtcagaccagatttcagctcgatatctttatagaacaaagtgccatcttcaattcggacgttaccctgaacgaatttcttgatgccttgttccaggttaatgtggtcaatagcaccagcgatatcaccatctacaagtttctgcagcgcagatttaaacccaggatgttggctatcagcgttataagtagtacggccttcagtaattgaaatgaatttggaacttgctgcccatttaaattcacgctcaactggagcttctactttagcaggaacagctgccgcggcagctcgagcttcacgctctttaaacacacgccgaatagtgtcacgggaaacaccataattctcggcgagctctttcttagtgtacagaccgtttttgaagtttttaacgattgcatctttttggatttcagacagacaggtaacagccatttattcacctttattttcagaattttgagtagaagctccgtcaaggagctccatgatttttacaatatcatcgacgagtttgctgtcagtccgccaagtatccaagacacttgcgatgacaggataatcatctttaaactgttcaatctttttatagaagattgtctcagcatcaccagacagtttattataaattttattacataaagctaaatcatcgttttcatctttaattttacttgtacgacaaaccttagcgattttgtttaattttgtcaggaacggatttttcattccagacgcagtaaacttactcgacaagaaattcaatttatcgtaatgcgcaatatttccacagatacgatttccagtagcatttgatggcatgtactggtcataatctaccttatcaatacacttgatgtattggtcaataataaaccggtcaaatgaaagcaatccatcagcttttgccgcggctttcatagcacccggacgaattgcatagaatttcttaattccacacgcttctgccagagaccgcatgctcgcgatattcatattccaccaccaaacattatctgggaaagtgtggatttcatcacgattgcgaccgattgcataaccttcaagctcagcaatttcagatgatactaaagtctgacggtcttcttcccaatacccgtctttatcaatccaatgcagagaaacattaggagatttcggacgtttctcttttggaccagtatcataatcaggaagagcttttctctgggcttcaagttcagacacacggaatactacaacttcatcagtatccatgattttcttcagctcatcaatgacatgcaattcatcttcattgtctttgattacggtaatgtgtgcccagattggaactaacccagatttacacagagcacgaaccgtagcaatacgcttacccgctttatcgtcaataagaacaaacgctttagttctatcaaccccgcaaatatcagaaatgtttacttggttatgacgatgccaagaactgcttgacactttacgacgagcaggttcatcgcatgaaacataaactgatacttcgttatctacataatatgaacgaattttatcaagattatacttcgcaactacttgtttaatatcgcggttcccaatggtaataccacggctctgaagaatagaacgttccttagaactcagcttattgaactcacgcaagaattcacggtcagattcatacgcttcaaacgctttaatatctgcggtaattacctcttcttcaagagcattcacacgcttctggatattagcaattgtttcttcgtcaagagaaagctcttcacgagatggagtaatgtctaattcgccaagagggaaatgaacataaaccttgccataacgattaagcagccaatctgccttaacatctacaccgctaatcggatatacgatttttccataaactgcatacagaccataactttcgtaagagctattaacgctgaaccagtcggtcttatctaccgggaaatattcaatttcgcgacgaagagaatctaccttcggaggaacagcaccaaacgtacgcaaaatatatgcgatttcatagtgccaggtatcaatatcttctactttaaccggaactgtaatttcaagaccagtttcttcgtcttctttcatatcatcgacaaacatcggacgaatagtaggttcacctcggtttttcatgacagtataacctgtagctttaccatcatgataagacactacgttaaatgtactcgtatagcttaatggtgatttagaaccaagaccaagagcaccgatgaaatcattactattattctttgtggattcaaagaacgttttgtacatcgtcatcatgtcattatgattaagacctggaccataatcacgaattacaaatcgtgggtcaagacgagttggtgctttgatgtaaaatggacgattttcattaccattcagtttatgagcatcatcgcagttagtagaaagttcacgaacaacagcacgaactttatacttatagagtttgtttgacaagatgtcaaaagctttacccgaggccttaatagtaaacgttgaatcatcagcgtcagaagaaccaatgattacttcatcatcacatttaattttcattttattcctatcaattatgtcgtttaatgatttctgctacttcaaggagctcttcagcagtagcggtgttagttgtaaaaattttattatggatttctttgaagcgttctttgaattcctcagctgcttggatgtcaaagaaccgctggatgatacgatattcacgatatatagcatcgttgaataattcttctgatgggatgtaactgcgtttcataatattttcctcagtgatttagggaaattatatcactataactttaagcaagaatcctagaatcatctccaagcacttcttgattaaagccatataaatccattcttataaagaaaaagggacccggaggtcccttagattaccacaccctactaactcgaccataaacctcatgtttagaaccatcaatgttttccacccagatagtaacccaagttccgggcagaggtttcttttcagcgaacagatatccatagtcgcctgagatcaaagtaatccaataacgttgcatgttaattccttctaagtaagggcaatagtacccttactatttattctttattcactcatccatgtcttacgtggtgcagcatcattacccataattaattcaaacagttctttccagttttcaggaagagtgactacatcataaaccgggtcttgaataacacgttcgtattcatcttcttcaagagaaccaagacctttaatataacgaagtttccaacctttgaaatcatctttatggtcttcatattcaccaagagaatagaaccaacgttgttctttacctttggtgagaataataaccggagttttcacaaagcggattctaccctgttcaaacagttcaggccaattactgaaaaacgctaaaagacttgggaaaattgaaccaacaccatcaacgtctgcatcagtcatgatggcaatatttcgatagttagtattttcagcgggttcaccgatagtcaaaccagtgattgcacaaatgtcaaatacttccttgttcttcatagcatctgcagcagacattccccatgtattcatgaacttaccacgtagaggatatccgccatgaagttcacggtcacgagttgtgagcagataaccaatcgcagaatcaccctcggttaagaataaagtggtgtcagcatctttgccatatttgttggctttgatgtgcttagctactttagctttctgcgctttcttggcagctttagtttctgcagctttctctgcagcaagtttacgagctaacatcgcctcaataatcggcatatgaatatcttcggatttcataatagcgttagcaagtttcttataatcaatatcaatatggctacgaatttctccccaaggagaagtcagacgctctttagtctgagaatcaaatcgcatgttagacatatcacgaataaacatgatgacagtcagacattctttaattcgcgctttattaacttctagtttgtacttacgctttaatgctggaataagttcattgctcagttcatcaagaactaggtcaacgtgagtaccaccgtttttggtgtgaatgttattaacatatgaaagttgacggaacccgtcatccgaacgaccaatggcaatagcacaagtatcagaatcctgcactacagcattttcgtcatacatgtgggcgtaagctttaaacttgccttgaacccgtttacccatgaatttaaattcaatatcaggataaactactgctaacgtcatcagacgatcgtgaatgattgattggtcaacatcagttaagccatcagattcaaagtgggtgaaatctgggataaatgacacgacagtaccagtcttgtctttaataaattctttatctttagctggatgttcttcccaagaaacattctctgcgccatttgaacagcggacaacgatttcattttttccatcacaggttgcacccacaaatgtcacagaaaaaatattcgttaacgcagaaccaacaccgttcataccaccggttttacgctcagcatcatcaccaaagttaccacccgcacgaggacgagtccatgcagctactggtcctggaatagtttctccttcaggtgttactacaggagcctgcggaagaccacgaccattatctgttacaataattttgttgcctttgacatcaactgaaatcttattcgcgtgtttgaaattagtacgaatagcttcatcaacagagttatcaatgatttcatcaatcagtttgataataccaggaacatactttactgattggaatttaccaaaaagaaaacggtcatgcgcttcaaacgcagaactaccaatgtacattccgctacgcttaatgatatgttctcggtcactcagaattttaatttcgttcttaatcattacatttcctcggttagtgaaggaattatatcaactattaattatagcaagtaattcttctttgatatacatcaatttaccaagaacctcatggcctcctttaaccgctttatactcgggatatcgtggccgctgtcgttcaaacatagtccattgagcatcactaacgttagcgtatgcatatcgagaatttccgtagtactgttcaatccggtactcgttgttttcattaagtgaaatccactcttcacagacttcataatatttctgcatccaaatagtacgaccattcacgtcattaattggccaccaagcaaacctgtattttccaatagcccgctctaccatttttaactgtcgtttagcacgcctttgcgcagttgtcattccaataatcataatattctcctctggccaacaagactataataccaaaacacggtgtccatgtaaacaactaaatgacccgaaggtcatttattcataacgaattgtgctgttcttaagaaaaagccctgagcacactgttccgttaacaggttttcctgttggcccaatagccgtaaagcctgtgtgctgaaaatcatcctctgagcaagaaaagaacttatatccagtgattttgatatcagtaaatcccgcgttatctaacacgcgagttgcgttatcagcgtcagtgcatccaatcatcatgaaggcaagcgctgtaattaaaatctttttcattttaatttaaccctataagttatattacctactttaataacccggatttctccgggtttcatggtaatgcgtgctttagttcccatcaataatcaccactctttaatccatcgtagtgaactgccggagcagaaaccacccgcttcatttgaccttcacacttagggttaaagcagttaacagtatagtcacgatgggaaattttacgcataatttctatcttttttccacagacttcacacttgtaatcatacattggcattaacagcatccttccatttttgtgttttgaccatgatttgctcattcagtgcacgagtaaccatcatggagatttcatcatctgatacatgggtatcatttttatggcgatttctgaaatgcagccaaagtgcatccactacacagttaataacatctgcgcactcgccttcaaattcttctttctgccgccatggacgattaatccaatcacacatttctccagtttctgaagaaagttgcagcatgacattcccaatgctacggttgggaataggataagataattttgatgcttcaaaaataggagctaaatttaacattgatatgcactctgcagtgctgcaatagcagcgattgcttgaccacgattatgaatagaaagattcataaccaaatcggttggaattacattcgcggaagttccaacttcagtaaagtatttgaattcgctatcaaaaattacaaggtcttcaccaccaacttcatcacattctgtgccattagcccacgtaattccggatactctgttattttggtggtcaactttagtaacagtaaaactcccgccattttcatggagttcatacacaaagtcttcattaaactcataacgtgaagaaaattcttcttccgcttcatcattgacgaatttgtactgtacgccttctttaaaattcattacacaatctccatgtattctgggccatcaactgtgattacacgagcaaaggtacgaactgggacgatatcaccatggttcgcgaatacatacaaccaggtccaatgctcttctttaccgaaggttttctctttctgaacgacaattaagtcaggattgaacagaatgtcttcaaaagcttcggcagtaatttttacggtgttttcagttttcatgttattctcctcagtagttgataagataatagtaccacatccttgtggcaaagtaaacaactttttatactaaaccttgacgctgtgattccgtcggctctacatcggctttaggcagaaccgcatagttaccttgaaatactacatttactaaagttttaccgtcttcttcccactcatcagtgacaagaacatttttatgcagcgacagattagtggctgaattagtagaactcaccgattgggtaataacattgtccagcgaattcacgtgtacccacttgcgcagatagctttcactagattcaacgaattttttcaagcagtggatgtaatcaccaaaatcttcacggtaaatcttatacccagatttaccgtcattacgattaactactttaacgattacaccattgtgaccaacccacttaccaccaattactttaacgttttcacctacaactaaacctttcatcgtgtttctctcagtttgttaatgtagagccattatataacggctctttcataaagtaaatagttatcggtgagaaatttcacacccaacatctactccgaacatataccctgcatcccagcccttagccatcaaagccttggccaccagaaccatcgttggagagatttccgggaggatttcccggttgaaccactcttcgaagttttcatcgaactcaaactcttccattagccacgccccttaggtaaactcagtggatcggtatcttctggacttggtgcttcgcttaggcctagagcataacgttgagcatatttaagcattagaatatccttagcgcagtcatggatactatcatgcgcgataaacccgtcgagcgtaccctttggaagaggggtagttgtcagaccacgagtcagaagcagtgattcaatcgcggtacgaatatcacgctgattccagaacttacacggctcttctttaaatgtatcaatttcttcttcggaaattccttgggctcgttgaacatcgcgaagacaatcaacaaaaatcggaaagtcaaagctctgtccacgacaccagccaaaggaatcccatgggtgaattccattatcaatcagatattgctgagcttctttaattccagcaattactgataaatcgtctggcgttgaggccaggttagcccgagcttcagctgattgtttcttccaccactcaagagtagacttaccaaacaaccgatgacctttctgggatttaaggtcaaacttaatacgatgaccacgtttaaccaattcatcgaagctttccaaaacttcggggtcagaatcaaaggtgattagagcaaggtcaatcacagaagagcttgacacatttccgaatgtttcaaaatcaataataaagtctttagccattttgagcctctagcataaatttaatttcgcgtaactggcaaccaatatattcgctcagatacacctttgggtcatatcctgtgaaccaagtaatagcattagcattatctgctatatcacgaagctcattcagaactgtatcaattttaatgttaatagcacgcttaacattgtctggtgcttcaaacttagattcttgtaagccaacaatcattgtttgaaggtcttctaatttcaattcaaacatattacctcacacataaaacacatcatatcgaccacgagtagtaccaacatataataactgctgtgcgagagaagcatctgccatgtgaatgcatggagtataaatgaagcttctgtcaattgagatgccctgggccttatggaaagtcgaagccggtaatgctttcactttatggaacttacgcttagcatcccagaactcagaccagggtgctttaccgcctttattccagttcttatatgtatctgcagtttttgccaagaaaaattgaaacttattcatttcttcttcggatgagatgacacagattttctctctagcgtactcttcatcgtcgccataggtttcaatatctaatacccaatgacgaaccagatattcacctggaacacctctggcacctaaaaatgacgtggtttcagttgcatctaatatgcgaacaaactgaccattattgaaaagaatttcgctgaatttcttcccttcaaatttaagttccttggtaagaggttcttgcataacaacaatctcacctactacgaatggtcgttcagtttcatagattcttcgcctgattatttcattcagtttatccacagatttattagtgaacgcaagcattcggttttcaaataaatcttctggtgttttaactaaattaaaataatttagcataaaatctttaagggcagttccttttgtaaaaccacggactccatgaccatcaactacacagtcacgaatccatccaccatttctgatttcagtagcgacttcaatgattggggcattactccgcatcacctcggtcaaatgaagttgtaagaaatctttatgagtgaagaatggactcagtgcaggttcattacttccaggttctaccggacgtatctgagccttatcaccaatggcaatgacaatacaccaggcaggaatagttgccatcaaaatcttaaacagtttacggtcatacattgaagcttcatcacagataagaactcgaatagatgccatatccggaactttcttttgttcaaacagaacgttttcttcatatgtcgtcgggttgattttcagaagactatgaatagtactggcctgcattccgctgagcttagataaaacctttttggccccatgcgtaggtgctgccaacgcaatgccagagataccctgagaaatcaaagcgtcaatgataaatttggttaaagttgttttacctgtaccagcaggtccattaatcgtaatgtgttgacctttggctccttgtttgaccatttcaatgactttattaaaaatcgctttttgactttcttttaattggtcaaacgtaatcatgccacttttaccctcactacatgtagatttttaatttttgctttgagtttttcgcgctcaacatcgctaagtggttcatacactagctcagttgttttccaccaaagcattcctttggttttgctttttccagtaaaattcccttttgctaatttgtctgttaaaaccgacattgtacgaatccgtgctttattagccgattcttcattagtgaagaccacacatcgttctccatcgtacatatcagttgtgactggatggtcaaatccgtctttatccttatacgctactacatatccatagtgttgcattacattttacctctcaaaagttggaagaaggacgcagtcaatggaagaccttttttcaattttaacttatctagcattgagcatttttctaaccgacgaagtgagctaacaattagccgtattgattgtacacggatttcagcatctgacggacgattcggaactgacgctaaaatagcagataacttacgctcaactttagctaattcagacttaccaccactgatacgagttctcaatgcattaataagttctaaatctgccgaggttgcagttccattcttttctttttgcacaaattgagaaagatgattttcgcgattacgtaagttagttttaattgatgttatagttttttcatactcacgaatcttttccaaacgagaagcttctttatcacttgttggcttaacagaatctgaagaacgaactatgcgtgctgcgatttcattcgcttttcgttcaaggccttcaatcgtattatttccgcgcaaagtattatacttttgcttaacaggaataacattccccattacataacccaagtcattattccaacgctcgagcgtcatgctatcaggatgatttcctttaacagttccaaacttttcgcctgagtatgcgcaatgtgtctgctgcatgatgttaaacagatattctggggtgagattgaactccttgtgccgacgttgagcagaacctaaagttgtaattaaacgagtataaactttagcggtttcagcagtaaatttcatcatgttttcctcaaaaatgctttcgtcttacggacggtataatgggtctaggtccctagttctagataatcactagttgactaagctatagtaacactaaagtagtccataagtaaaccagatttttcaactttgttatgacccaccactttgaacttagttcccatcggtagcatcctttcttgttctttatcaatcatctcgatgtcagcgcttctgcgctgagcaatgttatcaatcacatcatttggtcgcatgaattcagaatctggtgcagtaattaaaagcgatttcatgttggtatgataatcaaatgattgctgacaattattgacttcaatgactacaaaggtcgagtaatgccatttgcctgcaaattctcgggcaatcgtttcatctgttgtgaatgatgctacctttccgaagtcaaatttctctcctttaataagagcgtcataaaaggctttagcctcgcggcatgatagacctctatagagaatgtcactgttatcaatttgatgacgtctaacgatagagtcaagtttcttatgaaattcttcgccaatcttattgttcatgcactgccacagaattgactgttctttgcagtcaaaacgattggctaatgcttcccatacgcttaaatcatataaaggtaatcctttgctttctcgcgcgaagttaagaacatcaatggagcgaatgggttcttcgataggaataacctttgataattttactgaaatagatgggtttaatgaaatagccatgatattctccatttttggttacgagaggtatcatatcatggctttttagaagagtaaactactttgtgaaattattttgcccacggagaccagggcggcgggtcagaccagattgaagctagttcatctagaagagcttctggggctttaataccatacttctgtataattatacggtattcgtctttgatgtccttagaaatcactggatgaacctgaacctcttcctgaggctcttccatcatttcaaacaaatccatcacatgaaccactccatccgacgatattgactgttactattattatatgcatcagcagctttttgaagcaaatcgctcggagtaaatctggcgaaatcagcttgcataaatgaccatactaactgagtaaatactataaaagcgtcttcattgtcaatgacgatacttttgccgttaacgattttatcatttgcatattcaaacagatcggtctcatgatatgcattggtatatcctttaaggtgtaaagcacctaaaatattaattggacttcctggcatgtgtgaaacatcaaaagtatgggctgttttgacaagtccatatttactattaggacaccacccgcgtgcttcaaatttattgaccagttctttaaactcgtcataagaataattgtaaattgctacagtgaatactttatcagaatcaaaaccttcttttagtttgcgctgtaaacttactttatagatttttgcgtcggccacacatagctccttcagtcatgttgttgtcttcaaaccacttatcatttgctttaattaaagcaggcgcagcttttagtaataacgctgcagctcttacacctctgtaccaacaatcaaaatgagacttctttaatggtgattgataccagggcttagtataacatatcattttgttctcctcagttagtaggaataatatactattcccaatatagcataaaaggactcccgaaggagtccttaattttatacttcgctgtcagccggaacagcttcaaacattttcgcgttggtggttgcccaagttgcagcatcatcaactactgttgaataagcggctttttcggatgggaaaatctgatactgtgcattagcaatgcgatgtgagtcagaatataccttaaaagctacagatacttcagtacctttaacctcgccatcagcagtggtatggtcaaaagttttgatatttacgtaagccattttaatctcctatttagtttacaggagtatttatatagctgctgtaagcgtctttaatatttctttatcaatttctcgagtgatttcttctcgaagggccaatactaaggcccgttctttttgttttctgataatttttaaacgacgcttagatattcttttagccatcagtaaccactgtcttgacgagcaaagttctcggcgtttttcagataatacagcttaaagatttcttcagaatccagaccaagcgccataaacatattcagaacaaagtgcaggatatcaatcatttcaaatttgatttcaagctggtctttatcagacaggtctttgatataagtttcctgcatcttgacgtggtcagctttccatggtttccacacagcactagctgccttttcaccgttactcataccgccaagagacgtcagcaattcgcggaattcgtcatcaatgtaatctttttgattacgcagccactgtacgatatcaccagcttgagccaattcatcaggatgcatgttagtaccaggcttgtcatttgcaagacgaacctgaagagatttttgcatatcaagcattacttgcagagggtcaccaccaactttgcgtacgatacctgtgtatcgggcttcagctttatctgcaccagcgatcagttgactacattcgttgaaatgtggcatgttatttttcctttcttatgaagttttctatcatacgtctatagcagatattaggataacctgccttgacagctattttattaaattttgtgcgcttaggtctattattataaacccacaactcgtaaagcgaatcatacgagttccatatctcaccacgtcttggattcggtaaaccgtatctaggagaatttttaccactaaaccttccaatacgagcattgctcatgttagctttagcttcttccgaaataactttgcctttgtgagaagctcgcattttagccttagtttcttctggtgtttttaacccttttatccatgatggctttccaaaccttggattattttcacccgagaaaagaacagagttttggattttaagggtttctattaatctacttgttaatttaacacctttattatatcgcattaaatttacagcataatgcaatcctttcacatttggatatattttagttaataatctatgagctataaaatgctcgcgcgcagttaactcaacaagattgtttttgtcatctgctcctcccatacatctaggaattatatgatggcgttctttatatccatcaagatgccggcatttagcctttgtaactaaagctgagtaaattttttggtaattcacagatatcctttcaattagataaatattatatcacttaacataaatagcaggaggattcatgtctgaagtgaaacaagaatgtaaagacaaaggaggatttggaagatatctttacgtcggaatcgccactgctgctttagctgcatggaattatgtggtagttccattagctagcacacacggtctagttcttcctccaatgccgttagaaaaagttgtgtcgtttattatgaccggaggattgctttaatttaaggggctttggcccctatatcttcgcgtatttgtcaaggcgcaatttagccattaaaccttgcgatatattttgattaatataatccgttatttcagaagcagttgccccctctttcataatcatatcatttatatctttgcttttccaaggcgacttatcccagaaaactaccttttcacccgcgtctactaaacgcttcatacgcttaatcgtatcaggatgacgaggttcatggtccataatccatgctcggttatcatgacatggaacttgagctaaatctaaagacccaccggtaattgcaatagcattatcaatgaacagcgaatctattggtccttccatgacgaatacgagttttgactcatcaatagtgtcgagaccataaattttggtcgcgtgttcgtgggctttgattgtgatgtatttttgtggagcattctttcgtagtgctcgtccttgaaacgactcaatctctcctttcttgttgaagataggaataaccaaacgtggttcgttcgtctcattcttataggttcctggattaacggagttaacaagagaaggccattggttagtaaaccataaccttttccaagaagtgcttggaatacatctggcagtcacgtatttaactatcggatgttccttaggaagtctatctaatcgctcgcagaaattaagtttttctattacggggagttttgcattaattttctcagacggttctacagcctttggcttatcaaagacctgctcctttcttttctcaagaagatactctcgatagaggtcgggttcattatctttaagatactgcgatagccacttgttatactcgcagttgaagcaatgacagcgtaatccttgacctgcatcaaaaatccagaatcgtgctttattgatatctttctgtgagtcaccacaaattgggcaacggcagtttaacttgaatgttgaagatgtagtaacgtgtctaaatttaggtaggtgagatattgcgcgaattgcatactcgttatcaacccaagacataatatttcctctggccttaaactaataaggccattttatcactttttcttggcagcgtctttatccgcttttcgtttctttggaagagtttcgggtcctttattgacgatgtccccggaagttgtacctgatgcaatattctgtggattgccgcccgcatcacctgcgaccatctcagtaacaaactctttgtatgttttcatagagcctcctactatttattcatgcgtaatacgtaagcatttatatgtaggatacagcgtcggagacattgattttggattgtctttgataagcataaactgcttgcctgtatcttcacacttttgcttaatcacggcttcatctttaccagtgaatgccatcttttcagtagacattccacctgaaccagtagatagcgccattattaaaacgtatgtaatcatcctaaaatccacttaacaatgttgaagttatcaaactgggcatcacagtaaagaacataattcaacttaagtgctgcgccgtcgtctttaagttctgcttgcacttctgtttgtttgctcgggtctacgttttccacaatatgaccaacatctgcacgaatctgctgagctacttcagactcatcagcagtcattgaccactcgcataagtctttgtcatagttggccatggcaggaactgcagagcaacttgatactgcgaacactaaagcaagtacaatctttttcattttggtttcctcaagcagcttgtacgttaagagcagaaatcaggcgataatcaccgtttgcgtatactaacattgacacattgccatcagtgtttttgaatggctcaacaactactaaaactgtatcgccttcatctaatgcttttcgtactacgccatcacaacgcagattagcatgtggagatttaactactttgcttccaactaccataccgcaatgcggtacagtttccgctgattcatctttactcttaaagactacgtctaatgctttttcaattgtccacatgatgttttcctctactcgttttgtttcagtaaggccatagtatcatggcctttggagaaagtaaactaccttttgaacaattttttcaacaaaatgtcagaggtcagattcttggtaggtaggtatgtagcagagttaacccagatgccatcgctgttatacaccttgacctctccatagtcgcatacagataggtctgctttgttatatgcctcaatgcctcgatgaatggtatctgtggctgttacaacaaaagagtgacctgactggtcacggaccgcgctaaacacaaaaatcatagaattccttagaattttaactcttctgccagagcatcaagcttagaacgtgatactcgttcttgacgattagattcggctacacggttctgtgcaccggcaccttctcggacggtattgcttggattaggcttagttgggtcgttttgctgctcaatttctacccaacgctgattagccttatgtacacccatagagaacttattgttgatgttcttatcaccgtaacgtgatttaatctgcttaattaattgttgcttcatctgagcaagttcaggggtttcaatcacagccaacataaagtctgctgtagcaggtagaccagcagattctgcaatatcactcatgtccatatcagaagcatcccacgctgaacgacctacctgagctgcggtccaaagaacagtttcagattctacagccaatgcacgaagttcttctgcaatagctttaactaacgtgtaactgttttcagtatattgacgaatacggcaagaagcacaaataccaagatagtcaatgatgataacagtcggtttaaagttcttcttgagtttcaactcattcagaagagctcggaatgtattagcgttagcaccgccagtcggatactgtttaatgattaaacgaccaagagtactagaactacgccatttttccattttgcctttatattcggcgtatgatacacagccatcatcaatatcgtcaagtgatacatcaagcaaattagcgtcaatgcgtttagcacaaacttcttcggccatttccatggaaatataaaggacattatgccccatctgaagatagtctgcagccaatgaacacaatcctaacgatttaccaacgttgacgccagccatcaatacgttcagcgtaccagtctcggcaccacctttagtaattttgttcagaatgctaagtttaaacggaactttacgagctttattctggtatgataaccaacgagcttcataatcttccatccaatcatgaccaatatagctatcaaacgatactgataacgcttcgcgcatgatatcaggaatagctcccatatcaggaagacgcttatctcgcttatttggctcaagctgggcattagcctgaatttcaataattcgagacgtagcgttatacatagccttttcttgaacgtacttttcagtttccttaactaaccaattcaaatcttcaggagcatcagataacttatcaataagtttctttgcgccttcatgttccgtttcagttatagacgaattatccagtgctacacataacgcagtctttgaaggaattgctgtgtattcattaacgtgtttcttaattatgttaaacaccgtctgagcaggtccttgctcgaagtactctttgtccatatatggccaaaccttcgtaaagaaagcctggttgtaaatcagattagctaagattgtttctaccactttaacctcttaaaagattttccataatgattttttcttggtctttaatgcactctggatttgttgtttaacacaagcttccacatgaggataaagttcatccttatgagcttcagatggtgtactgaactcaatagttacttcccccgaaggagaaatatttaatttatgaacataaaccaagtgtgattgaccatttaattttatcacaatttcttggataacagtcttcatagcttcttggattatttcatggcttttcttgaacactcgttcttgacgctcgaagtctccctcttccgagggagattcttgttcaaatttctcgagttcagattctaaatcaaactcagtcttcattcatgaagttctctaattcatcttcaacttcagcagctgatactgaaccactctcaggaagtttaacaccatcaaccttagttgaaacttttgagttaatcatttctgctaccgcttcatcaaccgcagcgtttgaatcaatagcacccaactgataacgggctttgatagcgtcacggaatggctcgtgcttaaacagaggaccccaaaattccgtactgctcgtatcttttgcccgccaggatttttcttcacgaatcatctcaccggtttcaacatccaggaattctcgtgcataccatccgtttttcggtttaaccacaaatccgatatccagagccatatcaagcagaccactgtatggatcgataccaccatcgaatttaacatcaatgaagaacttacttttctctttgacagtacgtgatttctcggcgttcaggacaaactgatatccctcaagctcagtaccatctttaatttgacgtttaccgatgatgaacacagtatccgcagaatacataggacctgtaccaccagtcattaccgtcttactgaacatctcgatagtctcgattgtgtggttaaccgcgacacaaggaatgttcttaatagagaagtaaggagttacgatacggaagagagacttcagacttttcgcacgagtcatatctgcaacagatttctcgttcagtgcatcttcggtttcctttttagacgccatgttaccaatagagtcgataaacacgatgactttttcaccacgctcaatagcttcaagctggttaaccatatcgatttttaattgttcaaccgactgaaccggtgtatgaattacacggtcagggtcaacacccatagatttcagataagctggagtgataccaaattctgaatcatagaacaagcagactgcatcaggatacttattaagataagcactaaccattgtcagagacatgttagatttgaagtgtttagatggacctgcgaagatagtcaacccggactgcataccaccatccaacgctccactgattgcgatattaagcatcggaattttagttctaactacatctttctcgttaaagaattttgatttagtcagttctgctgtcattttagaagtggatgctttaatcaggcgagattttaagtcagacattcattatattccataagtctccattatatttttctcacaggttaaaggatagagtaattatattactttgttcttgaagctattatcagaagttccatttcttcttggtgttataaaccactgtttccatatctatttcatagtgtattttacatccaacgcacatgccatgccaccagcaatgcattccatctgagccagtagttccttcatgaacaaactcatcagatttacatacgaagcatctgaattcttcagccttgaatatattaccagctacgtcagatttatcatagatgttcataagaggtccttggagggctttcgccctcacagatatggttctaccttaccaaattcatggaaggcctgagatttcactcgagtgttaatacacatacgaattgatttcagaggttcattatcaccgaataacccacgtctttcgccgtctttagatttccaacgggcttgatttgggaaagcagcatgtagctgttcaagggctctattctgacgagcagtatcacgctgtgtagaacaaccaccaggagactgcactttgccggatttaacgagatacttaaacagagccagatgaggatgacccatgttaattaattttagaaaagcataagcatcttcgttaaggtcaataactccgtaaccaatatcttctgcggtaagtttagtcaaatcatagaaagtattggtgaacccaaaactattctcgcgataatgaccccagcttgatgtgattttgaaaatcggcaagcgagcatgaccgtgataataaccacaatccatagcagtctctacgtatttgaccatatcatcaaatacctcttgactcattgcctcgccggcaccaagtggaacacggcgatcgtcgcgttcacgaatttcagtcagatgaatggtcgtatcatcatcaagcatccaaattcgttgtcctgcatacatttcagtaatcagacggcgagttcctgcaattccatcaacatcatcggggacagtaacgattttagcagcatgaccgtgccaagtttcgtatgcttctttttctgattcacgtactacaagatgcggaacataaccttcaggaaacatagtcagggcagtaactgccccggcacgcttataacttggaattacaaactgaatcatttccactcacctttatagtctttctttgcaatatgagtttcaccagtataagcatagttatctacaagatagaaatgacgctcatacacgtgcaaagacccgacgttccaaataatgtcaccaactgaataatttttacctgatgcattcagaagtttggttaactgttccagaacatagagctgccacgcatagtcattacgatatccaaagacgacatcattagagcgcatgtttacaacagcatgaactttattatcacgaatcagatactgaacattgttagtacacatgaaatcactcatgccatcgcgctcaaaatcatactgcatttgaggtcgtgtataaatcataattccgcggcgagaatcaggattactgataagttcctttgcgcagttagcaaactgcgaatagttttgtgatgaccaaactgcccagccatagttagaattaatctcaccatgtttggatgcaattgctttccaaatagctggggtttcacctggaatatctttaacgaataaactttgagatttataccactcaagttcacgggcaatgtacccatcattaactgcaccaaaaatcaggggctcatctgcaataaatgatgcacctacgatttcaatagtcttcacacccgtcttatcaatcacaaattctttgttgagcaaagcatcagcgaattcttgacggatatcttgtactgtcattggagttacaatcatgagacctcttatttaacttgctggataataattgtattctgctgtgcgttagaagcagaccaaatcagcgcaattaaccaaccgataatggaccaaccgaatactagatttgtgataaagattccaccccgtgatttatgcttacgactgcaagctacaaaggtcggcaaaaaatagatgaagaaaagaatgattaaaccaaatactgcttccatgttaatctcctcagttagacatgcatttgttgtagatgtgattttggagagattttaactgctccatacgttgtttatgctcattataactcaatccgccgttagcaaaatcagttaaacgaatctggtcattcactgctgccgcttgagcagtgcatgtacgttctttttgagttttacgcagacgcttaatttcttccagctcatgcttattctgctcaatcatgtcgagttccatcgcagatagctgacgattaggattagctttttctttcgccaaccgacgctcaaccgcgagcgattcagcagagacctggttgctagcacgatagtatcctacagtaccgccaattgctcgcacctgtccaacagaagaagccgggacgatatcaccttgtggcatttgacaaccagtcagcgtgagagcaacgataacagcaagtaacgatttcattgtaatctcctcagtatgttatttcgagaacaatggtaccacatccttgtggcaaagtaaacaacttttttaaaaatcgaacatgtcaagaagagacgatttctcttcatagtctaaccctgccgcttcagacatacccgtcagaggtttaacaaacgatttttggaacagaacactgtggtcaagccacactagaacttcctgtcggatttcttgtggcagctcagtgcccgatggccatgccatgcatttctcaccgtacgggttaccttcacgcagcgggatgaccatcaccttctcgccttccatgattggtgttataccttcaaatcctgcggtagctcggttatacgctaaagcacctttaacatgatatggcgtacctttatctggatatcctgcaccatcatcatacttgccgatgttgttggcggtcttaacttctgctattactttatagtcaagttcacgatattcagactcaaactgcttataatattgttgtaaagattcttcaccttcctgcagcatacgccgaatagattcttccaacgcattctgaacagcagttggtgtagaactttgctgagtttccatacccatgattttcaggtgcggttctgcataacgagtaccttccatatcataaacgttcagagcatatcgtttcttcgctttccagaatccgccaatgccgtttgaccccaacggaggacaagaaatagcttcacggtccatgaacattaaatgttctttattgttcatgtattcacacatctcacgatatgattggtcaatccaaggttccattttcttcttgccgaattggttcaggaattcgaccaaatcgttagtttctttgaaacgctcaagacctaccttctcgataaccttatcaacacaaacgtaaattgagtcagtatcaccagctactacaaacgaatgtccttcagtaccacataccttgttgagatattcattaactttacgttcaatccattgaattgccatttgaccaaacaacgtgattgctgatgcgttacgcaaatcataataacggaagtaaatgttacccaatgcaccataaagtgagttgatcagaatcttacggtttaactgattagtattacccaagatttcagcatgtttacattcaaacatcagtttgtcaaggcactcttcggtatatgtcagcagttctgctttcatatcatcagagaaatcttcatagacattaacttctgcgaatttatcgatagttccaaacttcttatcattcagaacctttttaatcagttcttgatttcgtttggcacccatcattttatttttccactctttacgctgataaaataccttcgcgatttcaactggaatgacaccatctacatctttacgatacatccaaccattgggtgaacatgaatattcgtcagacggacgtggtgcagtcttgttaatgtactcacccaatggatgaagtttaaactgtccaacgatggtttctggtgaaatattaacttgtcggatgattgacggatacagagatgtcaagtcaaacgacatgatataacgatatgcagcaggaactggttccttaacatacgcaccaggatatgactgtttaacatgagaacgactttgcggaataaccttgtcctgttctttcagactgttaaagatgattgcgtcccatgttttaatcggactcattacaccttgatacggcatcttcgcataataagacatcgagatagccaggtcaataaatccgcgaacagcatcaatcgcttgtactgattcaacgtcgatgatgttatacgaaatataccgttggtggttagtttcacgcaatttattgattggaccgtcatatgctaatttacctttcttggtttcataataagcaatgaaatccaacttatacgtcggttggttcgtgaaactaaacttcttatacaaatccatgtaatcaagaatagtcacacccatgatagaataaatttctttatcaccatacatgtttgtgataatcttagatgaaactttattcagaggagagaaccgtttcatcgcacgctcaccaagaatctgtttcacacgattcatgatgtacggaatatcaaatccttcaatgttccagccagtaaagattgctgggcatttctgttcccaaagattgatgtactcaagcatcatttctttttctgaattgaatggcatatacaccacacgatcaagaatatgttgtggaacttcatcaccgccttcggaatctaaacgagcagcgagtttcttgtcccactcggaaacagaaccataaagagaatgcagtaaatcaaatacgtagaacttatcatcaaccgaatcgtaatgggtgatagcatcaatttcatattctgctttcatcgggtctgggaattgagatgcagtaacctcaatgtcacagtttgcaattcggatgaattttttattatagacgatttctgaaccgtaagtatcactgatataagcaagtttgaaatcatccatacccattgcttccattcccatatcttccatacgacgcatccaatcgcgtgcatctttcatagttgggaatgtattcttcttgcaatacttgccatagatgtctttgtactttgtttcttccatgcaatgactaaacataacaggagaatacggaacacgacgcatgcgttcctcaccagtagaatcgatataacgttctacaatgtcattgcctagagtttcaacgctgatataaaattctttcatgggtttcctttgtttatagaccgagttattagtctttaggtgggataattatactccgatttttataaagtaaaagggccgaagcccttttcttacgcaccgattgtgtacttagattttaaagtccattcatgtttctgtttgaatgtaattactcggaagttattctgcatctgtgcaagagtttgaccacgattaatactcagtagaccccagtcagagagcagttgtgcgattgagtctcgacgaatttcatcttctaagtcaatagtaacagggcgaccatcaagctttaacatctctttaaaatggacgatatagtaacgaccctgtttctgaagaatgtggcagctttgatatagtaccttatctttgttattagcaattcccatacgggtcagagtttctttaactttcaggaagtcttcaggctgtttcagtgtaatttcaatcatctttaccattccaatgctgttttcttaagatttttctgttctttcacgtttttcgtgattgtcttgaccaattcatcagtcacaagacctttcattttcttgagagcaggtttaagcttgtttttagcttccagggtctctctatacatcctagcatcaatcgcattgaccttgtaatatgtcattataacttgaagaatcaatgcatcctggatgttttctgttaacttagcccatttaccataccgacgacctctaggaacagaggccatcatatagttatagtgtgcttggtcagataacccttgaccaacaaggttcataacataaaccgcaggcatacagtcagcgtgctgagaaagagcgttttcaaccatgaattttgaataatccatcgtcgagatattcaaatgctcttgcttttcgttaatagacccaataattgtgaagaattgattttctgctttttctttatatgaatcagataattcctggactttcgtccagtctttacctaaccaagctatttggtgctcattatactgatcatcatcttcaaataaactcatcatttccactgcatctctacaacaagttgaataagcatataaaccaaatgtaattcaatcgaagctgctatgccatgatactggttattttcaccgatgatttcatacattctgataatgcttgggccagtaaccattgtatacagctcagaagaaagtttatctacaaaccaagtatagtctgctgcatattttggagcaagagcacggagttctttgatgttcttagttttaatagcttcgatgacatcttcaattgaaccacggtcattcagaacgatagacaagatacctgcatcaatcacacccttagaagaataatgatcaagcatgttaatggtcttacggaattctggaaaattctttttgaccaaagcagctacaactttcttatcttcaaccaccacgccttcattttcacaaattgcgagacaacgcttgagcatctcgatttgcattggcttaacatcagatggagatggtttaccaaaattaattacacggcaacgagactgaagaggtttaatgataccatcaaggttgtttgcagtaatgataatagtacagtttgtgctatacgcttccatgaatgaacgcagatgtcgttgagattctgcaagacctgcacgatcaaattcgtcaatcacgataattttctgcttgcctgcaatggatgcagaacttgcgaatgcagttaacggtccacgaacgaaatcaattttacaatcagaaccattcacgaacatcatttcagcattaatgtcattacataatgctttagctactgtggtcttaccggtgccaggagaagtactatggagaattaaatgaggaatttttcctttagctactaaagccgaaaaaatttctttatcttcagcaggcaatacacactcagaaatagtacctggacgatatttctgttcccacataaagtctgcttcgtttactgtcaatttcatttatatttcctcattcagattaaagatggggccgaagccccgaagttattactcaaagtcaaaggtactatctgcttccattgctaccacataagaggctgatgcaccttcaaattttgctgcagtctgtttcttggaaccgttcatttttgcccacagcatcagtttataatcaccgatggtcatcttcatattgctcatgttgatgataaagttaaagttaccttcgccatcataatcaccgagggtcagggaatacttcggacgggtcagtgcagcatcttctactttgttataaccgcgcagaacaattttaccatcaacattggtgatagcaattgtgtcaatctgcatgccacgagatactcgcatcagctgttgcaggtcttcacctttaaaatcgataattacgtttgccaccgggaatgggattggtttagtcgggaacacgattgtgctcgggtcagctgctggccagaagatagttgagcgagcatctttaattgccaggttaccatcttcctgcatgataatatctgcatcatcaccaaccagagacagaatgctcaggaaactgttcaggtcataaattgctacatcagtatcgatagtatcagagattgtggcttcagcataagtcgtaccattaacagcacgagtcatgataaaattgccaggtttcagcatgataccggagttgatggtggagaagtttttcagaatgttcagagtttctttagagaatttcatttcaataccttttaattaagttcaggataattatatcaagctgcgaatgtagcagttaattcttctgcaacaatctgacctgccgcaacgagttgctcatcagcatctacgcagtaatcattttctagacgttcgccaccatgacggtcagtaacaattttagcaccagccttgattgattcgttgtaatgcttacgcatcaattcaatccatttttctgcaacttcgtcgtcaatagatttatagaaagcaaagcgagcttcagaatctttaatcttatctttaatagctgctttagtttcttcagttagagccagaacccaagacttacgaatacgattttggttattcgggttggaatctgcacgtacgtttttaacctggatatctttcacatcaacaaaattaatcattatatttaccttaatcgtaataatcttcaaccatccaaccgggattcctgctggacatgactctattatattcatttcctgtaaaagcatctcgtaacatttcttctgttactaagtgtttttcatcagaaaacaaattagttaacacatatcgctttacttcaggaaaggccagcagatgctggccagttgtaaactcattcattccatcaccgtaaatcgtcctactttcttcatttgaagatgttggccatatgcctgcgggtcgtggtcacggtgagaaataataaacacattggcatctaccatcttattaagaatagcagttattgccttaacaccttctgcgtcggtggccgaatcgtagacttcatcaaggaacagacagtttattttaacaccagaaactttttcagcaatatcacgccatgtgaatagtaatgctatatcaattctggctttttcaccttgactaaacgaggcataactaaactcttctcgtccgcgagatttaatcgtttcagagaactcttcgttcaacgtgaacgaataatcagcttccataatttttaggtagctgttaatttgcttattgaacatcgggatgtacttcttgatgatagctcctttaataccggagtctttcagcatttcagttaaaataccacgacgatatttttccataaccaaattagttttgacgagaataattttatctaattcttcttgtagcagttcaatcttgtcagagttatcaatgaactcctgtgatgctttatcaattgctgctttaatacgacgtgctttatcaactgcagttaaagtcatctgtttcaaattactcatttgatttttgatgtctcttgcacgcgtacgaatagtattatactcgcgagctagttcatccagttcactctggcgcgtctttaactcgccaagaatggtattacattcttcaacatgatgattaatcttagtgattagagtgtcattagaatgcaaatcctgcaagcacgttgggcaatgaccgcctttatcatacaacccaagaacctttgagtatgattcaattttagaacgaatcttaaagattttaccttgaacttcttgaattgactctgctgggtcatcaccaatcacgagttcaagcagttcgctttgaagagtttctaattctgctttatatcctcgtgcctctttcacctgctcatcatacatcgcctgcaggcgagctacgttatcaccagaaagtttcttctgcttttctgcatactcatgatgagttttaatttcattagtcaatgcttcacgctgaacatcattaacctggatttgctgattgatttctcttatctgtgtcttgttcagtttgtccatatcagccaaaagagacacttcaagcaaatcttcaacgagctttcgtctattagcagttgataaccccatgaacggagtatatcctgccgttcctaatacgacaatctgcttaaacgatgtgtatgacatgccgatgagactttcaaagtaggattgaaaatcctttgaacttgcggcttcatcaagcttattgccatctcgtaaaatctcaaagacactcggtttttgcccacgtttaatgtagaaactatgaccgtcatactccatccacagttctactacagagtccttcttattgaaggagttaattaattgacctttcttaatatcacggaacggtttaccaaataaggcaaaagtaatagcttcaagcatagtacttttgccaccaccattcttacctgtgattaaggtcttttggcatttatcaagttgaatgtcaatggccgcttggccaactgacattatattcttatacttgacacgatttagtttaaaagtcttcactgattttgtgcctcaatgtataactgtttagacataacctttaaggctttgatatcatctgcggataggtcttcaagtgcttggatatattcttccattaaatccaataagcttttaacttctacttcttcgccatcttcagactcaaccgagttgtcaactttagaaacagttcttaattcatgtactaccttttcaagttctgattcaaacttaggaaggtcttcatcgaccgcagtgataataatgcgtactgcgagattacgaaactcttcaaagtcaatttttccagtaacaggataaatcagttttctatgccaagtgatttcattagggacgaaatcaaaggttgataattcagtgtcttgaacccagaagccacgtgggtcgttctcgtcacccgctgtaagcgtccaaggcgttccgatgtacttaacgtttgctgcgcttgatatggtgtggaagtgcccagaccatacttgtttgtactttttgaggaaatctggttccagcccatgagacttcattcctttataaaaataaaagccattaagctcccagtgaccaatacagtattcagcagacgattctttgatatgcttcatgatttctgacgtgttctcttcacacatccatggacacaagtcaatcaaagtcccatcaaaatccatagtcacgggcttttcaataacagtaatatgcttatacttaccaagaacttctgttgatgcattaggcgtcaacgtattcttgtagtgcatatcatgatttccgacgatcgtaattaagttaattccttctttctcaagagactccgcaatttcacgagcgaattccattgtcttatgagtgatagctttacgaacgtcaaaaatatcaccgtattgaatgatagttttaattccatgctttttggcataatcaatatgctgcttaattccgtgtcgttgtacatcctgtacccacgggtcatctgcgcggacacctaaatgccaatcgcctgagtgaataattttcatataacctctctagtagagtttaattttatattattccatgaatagcaaaaagggcccgaaggcccattacttattttgtcattaactcaaattgttctttaaagcaatgctcagaatcttggtgttctaccaggaattcaaatgctttatttcgctctttatcatagagcttctggtcagatgacagatgtttcattcgttcaaagacttcatttttattttcatcattcaaccacagaatgccagaatcatgagaagtcaacggctttccatcaacccggaatttcaaagcatcaccagtagctttatggaacacaggaatagttccacaagcgcctagttctaaatgcgtgtattccagcgaacgctcaaggaatttatctggaagacgtgacagctgataaccaaatccagactgagacatacgctcaagcatttcagagttaacatatcggtcaagaacttgaggattcagacctggtccagttttaacctgatgataatgacggcaataatcaatttcatagcgttctttgatgttaataaatgcaggactgcgttctaacccttccaagatagtcgttttgcctgcggggcgcagatgactttcatgaaagtcaaacatcaagaaatagcctttccacgtagtagtacgaccaatccaacgatgaatatcaaaatcaatagcagagaagtctttccaatacttatcacgaattgctttgatgttcatagcaggttgaaagttataaaccggaggagctgagtcagaatcatcaaagaaactcaacccgccgcttggaaaatattcttccattagcacggtattaaaatcgccgtttgagctatgactaaacagtacatcagcacgcttaacggtttcttcaagaccagcatttctacgaagtgacaatgctctatggtcatgttgatatacgactaccctaacttcaggtttaatgttctctatgagcttcttatagttatcaatcgctgcttctggagcattgatagcaggtactgagttaatgataagaatgtcacatgcgttaagcagagataaagtcttatcatagtcatctgcaagagacacaggaatagttacatctttatagctatgtgctctattacgagtaaacgctttatctttagcgtaaatgatatttacttcatggccatgttttactaaccactcacggtgctcgagactgaacttggttacgccgcatccctcaagtccgcgagccattaaaatattaatcttcatatattgacctttgttgttaattttggatattttaccattcccgtaataaagcaaaagggccgaagccctttaaattttcttgtatacaacataacccactgcttcacatatacgcttagcttcttcaaagcgtctaagcatatctaccttagcattatgaatcgcttcataatcgggagcaggtgcttctctccgagcagtatcacatttataacagaagtaactacgctttggtcctgtataacgttctgaacaattactgcaccggcacgtgtaatttccttccggccaatcatgtccaggattagaacccatcaaattcgtcatacatcccaattctcttcactagtaataaaatcagggtgttcatctaaatcaatgaatccccagttctcttcatttaccattcataccaccgtttaacttggaaggtgtcaacccagacaagagagttcttatcaattagcttacatccttcggtagagcctaacacgcgatattgattatctgctacctttactgccatcgtaccagtcgcagtgtttaaagtaaatcctgcgtctttacgaacacgtttaaattttacttgtaccagcatttagaatgtcccaaacagatttacgagaggtattccaacaagtcagaataatctcatcattaaaaggttgttttaaaatagtacgcagtttttcaatagcatacttgtaagcagggaaattattgtctaataccgcgtctccagcatgagctcgtaatcgctcaagttcacgacggtttttacgaacaactttgttggctcgagcaatagcttgttcttctgccgcttccattagtttctgttgcagctcgtcgcgctcttcctgggtaatattgttcatgttattcctttggatggtaatttatttcaaatgtgaattcagtatcagtccaattataactatgttcaattatagcagaatctgacctgaaatcagcgtcatgtggatttttcgggtcaatgtgaatatcaagatcaagcacctcccttaaatacatctttagcaaataagggatagcgtctaggtcttgcacatcttctaaaaacccgtcgaggttaatcttcagcctcatataaaaattccagattaggtccatcgcttgtaggttcgctctttttagcagaccctggcgccttataagcggtggattcatactgcgtcattttatcgtagatgtcctgaataaaggtttcatctgctaacgcaaccatatcatcgtcccgtgaatcatacacgttatggacaaaatagctgtatttctttgccatttctttgcgttcttttttgatacgctgaacgaatgcattgaaacaagcttgggttatatacgcatgcgggttatcatacttagtttcatcgaagttgattaagcctttaattgcggcttcaatcccgtctgaaatcatttcttgcttccaggattgggtgtatcctgaaaagttgaaacgcttactcagaccttccgcgatcagcataatagcaaggccgatcgtatcgttctgttttactactcgagggccgccagcagcttcagactcccggcacttctctttccatgcacagattgatttatacagttccttgttatttacataattactcatattgcctcttcgcttcaattaataatatctattatatcaaatttgggaagcgagaggattaaagcattacttaatcaattcagcgcatgcaattaatttcatcatgatacgatagaaatcgttatatgtaaactcagcagaaacattgaccgagcattcaaaatcttcgaagacacgttccattccgatgtctggaatgtcatctacatcagcgtaccagtacttgccttcctgcacgaatgttatttggtccttttccagatagaatacgccattcaatatttcgtgagtaagagttaactgaattttcataggtcacctttcatgatacgatagcactggaaaagtttttccataatacgtttgaactcaattaaactgatttcaaagtattcggattcatcttcttcatgcatcatgtttaagaatgaagtgtacagactttcataatgtttttcattcagcatagaagcatgagtttcccagtacattaattcgttggagaaccacacgcccatgtaagaatctattacgaattcacccataccttcaacagtgattgagatattatctatttcagccatttcttcaccgtatcgatagcatcttcaaatttagagaatgcatccacagaagtatattcattctcgccagaacgttcatagacccagaatgcatcaaaatcatcttcaataatgaattctccttctggagtttcaatcaagtttctgccgtctttagttttagacacgaaccatccgagtaaaccgatttctgcaatttgttcttctaccatttcagttctctcgctaatagaaaatattccattgaagttcctttattgatgcgatcaacacagaacttctttaatactgattctgatacagtatgaattaaagcagaatcagtaatgatatactcaatttttacaaatgctggtgattttccagcttcatcgtatgctaatcgttgagcgttacgaacatcttcttttgaagcgtttgaaattctgacgctgtcaaacacccaacggctggtaaaaatttctgtgtatagaataactttacgcatcaagatattcctcaagttcttgctcatttaaaccttcttgccacatctctgacggagacggaagttggctgtctagagtggatgaatcaattggaaatactctgataattacgctagtatcttcatcccattgatttgcgagtatccgtttagcttgactaatgtcaggctcagaatgagcccggatatacttaatccttctatgccatacaccggtaggaatagatgcgcacacgatatatgaaatcatttcgctgccttaaccgctttaacatcgcggaagcctttcttacgttgattcttcatcttacgaatagtgctttcagaaatttcaccgatacccggcgtgattggttctacaccaaaggctttaataccaaattcagacagaagataagcaaccactaattcacggatgcgggctttaccgattttttgaccttcttctttcatcgtaccgtgaagctcaacttcccactgatcaagcaaagacggagttacacaacgtccttcttccagcattgcagatactttatcataagcaaaagagttcagtacgtttttgattgcttgggacatattaatttcctcagtaacgattgttttgacagaggagattttaaatcaaatctcctgtagcaaatcaatctttgagagattttagctcttcgagcatatcgtagtattctttactagcaaccggagctacagtgcagttgtagctattgaattcatggtatttcacgaagcgttctaggtgccacttaatcagattgttaattcggtgaagtagaaccccatctgaaccaacgtagacaaccacttcaaattgaagcccatcccaaattctggtacggacgatatcacctacagcaaaagttttcatgcgatgtaccaatgttcgttttgccaagactcacccttgtaccagcgagtcatatcatatccattttcgtcacagatgactttgttcttcatcaagaagtattcgtcatcagtaaaatgcacatgctttactttacagcctttactcatagcttctagagcttcttgccaatttaaccagttcatattttcctctcgagttaaacggtatgctgttatccgttgatagggctatagtatcactcatcaactagcttgtaaacaactttgtgaaaggaatttaaaaataaaagagaggtcccataggaacctctaaatgaagggtatagaaatatacataaggtggtcaagatgaccttagaaaggaaccggttaatcttctatgatatctgggtcatgcccagcagcaataagattggttttgaatgttggaatgtcatactgcttaacgttatctataaaaatgacaggataccgaatagcaagcgatggatagcacccgatgcgtttagcaagtgactcaatcaacggacggtcataaaccggttgaccgtcaacctcgttgattacgttatagaactcatacggaagttgcagcttatcgagcaagtcacgaactgctttacatccagggcatctccaaacttcttcagggatgccatagatttctatcatttcatgacctgttggagtttagcagtcagagtgttaactcgtttctgaaattcttcattagataacttttcatctttcttggtaggattaatccaatctgcgatgataataaggacaatgaacggaattgctacgaaagcacctgccgttaatgcaaccaaagcgataacgttagaaataaatttacgaatagcattaatgaatttcataattttccttaaatagtaaagatgaacgctgtcatagccagaaattccggtccaaacagttcagtagccatgtggttcagggtaaacataattttgtaagtcagcatatctatttcctcaatcgtgtgtccaggtagaaccatttcttacccagagtctttggttgtcagaaccacgccagtttttagtagttggcagtgatttctcatatttcccatcaattataacatcgatgtgttgtagcaaatctaaatctttgatatcttcaaacttatatcctgtccacatccagatatctttctccggaaatcttgctttaacccaagaaactaaatttgaaatctcttcccgattctgtggataaagcgggtctccaccggttaaggtaagaccttgaatatacgatttgcttaaatgggatgcaagctctttaacagtattcatagtgaataactggccatttctagcattccaagtagatttattataacacccttcgcatttatgcaaacacccggtgacaaaaagaacgaccctgcatccagggccattcacaaagtcagaagggtagattctgtcgaaattcattgaaccttacctcattacgtgcttctacttctgcatcatatttccagggctcatcagtttgaatagccccagccgataatccactttcggggtcacgggttatagcaattccaagcgggtgcagaacctctttgttgattttccaaatcaatccccattcgctaagttggttccaatcaacttgcttcattggtttctctaacatgttttaccctatgcataatttctttgttcttaccaagattgaacccacgctcagaaggattaccaagatagccacaagtcctacggattgtattcattttctttggatcagtttcaccacaaattgaacacgtgaatccgttttcagtaggtgtcatctcatgagtagaaccacaggaaagacatttatctactggcatgttaacaccaaaataatccaacttctcgatagcatagtcccataccgcttcaagaccttcaaggttgcgcttcatgtcaggaagttcaacataagaaatatgaccacctttagcaatggaatgatatggtgcttcacggtcaatcttttcaaaaggtgacaggttttcttctactgacacatggaagctattagtgtaccagcctttatcagttacgccctttacatcgccaaacttggcttggtcaatcttacagaaacgatagcacagactttcagccggagttgagtacagactaaaggcatagccggtttcttccgtccacttgtttagcttagtgttgatgtacttcaggacgagtttaccgcttcctttaaaagtaagcatatcaaattcgtgaatgccaatatatcctaatgaaattgaactacgtccatttttgaatagctcaagaatttcatcatcaggtttcatacgcacaccaaaagcaccttcctggtaaagaataggagcaactgatgcagtaacgccttcaagggatttaattctagttaaaagggcttctttacaaatatcaaggcgttcatccaatagtttgaacagtttattactgtcatccgaacttttataatttgcatccagagctatcctagggaggttcagtgttactacccctagattattacggccatcaagaacgggtttgccagaagagtctctccaagcaccaaggaaacttctacagcccattggagatacaggagtttctgaaccggtaattgctctattatttcgagcactgatgatatcaggatacatgcgtttagctgcgcattctaatgcaagctgcttaatatcatagttcgggtcttctttacgtagattaatgccttcttctacaaacatcacaagctttggaaagattggagtaattccatcacgtcctaatccacgaatacgattatcaagaatagctcgttgaattaatttttcttcccatgacgtgcccataccaaatgtgatagtcacaaatggagtttggccgtttgaactgaacaaagtattcacttcatattcatatgcctggaaagcatcaaacacgtctttttctgtttttgaaatagcataatcttttactaatgctacttgatatttgcgagcatcacgtacgtgtttagcgaatgtcttctctacataaggagccaatactaaatcgacgttagcaaacgtagttccaccatattggtgagatgctacttgtgcagtgatttgcgccatgatagcagtagctactccaatactcttaggagtttcaatttgagcgttaccaagtttaaagccattctgcaacatacccttcaaatctaccaaacagcagttggtgaaaggcaaagctggactgtagtccatatcatgaaaatggataacaccttctttgtgtgcttccattacagaggcaggaatgacctgattggcgatatgtttagatacgataccagccatcaggtcacgttgggtaggaaaaacacgagaatctttgttagcattctcgtttaaaaggtccttgttggttttattaataagtccctggatttctaattcgatattcattttaaactcttacgaagctgcttcttgtattttgaagcaagttgtgattttccatcactttcctcgtatgtaaacccatgcaattccatttcagcaatcatctcaggcttaccaagacgtgaaaagcgtttagccatatcggcaacatattgcgggtgaatattactgtctttacgattctggcggagatagaccagcaaattctctaaccattcgaggtagtcaatatcttgaccttttaaaccagagcggttgaacttatgcttcatttggccttctgccgcattacacaggttacagagcaagcctctgacctttcctgcattgtcaccttctaacgcatggtcatggtcgaggtgattcttttgaatatcctcatctaaaggacgtttgcagcaaggacataatccgttctgtgcctgatatagtttttctttttcttctttatataacttaccggttaataacatactcttacctcagcgattagataagagtatttatagttaaattaacgagtaactactatagatgttatgattagactcttttatgcagaaagaagtacagaaagcatagatgccttcataatcatccgcattgaactcaatatatgaattagtttcttcatgaagaagactcattttagtccaagccattccattgatgtcatcgtcgtaatagcctccactaaattctactacatcgccaacttcataccaatgactgcgtaaaatttctcttgtaacacgatgaatatcagcgaaatcgagaatttttactgtaatagttttagtaatgcacgatttagacatggcgaactccaagacgttgttcaagtgcgacgatataatctgctgctttttgcattaaagcatactcttctgaatcgcaattttcctgtccagcaaaggcataaagagctctggtaattggaacgattgcaccttggaaatggttaagtttaatttcagaaatcagaggaacatcttcaccttgaccaatttctttaatttggtgcatcgtatcttcgctgtagaaacaccagaaccaagattcgccgtgtggagttgggtcgttaatagtaatgattttgtttgtcagcaaatcaattacggcagtaattccacacatttcaaggtcatcttcattaactgcattgataacctgaaatttaaatccaggaacaaactggggaaattgttcagttaattcatcatcattttctataacttcaaactgcttaccaataagttccattcactttgtcctcataatcaagtagttcgttaatggtaggttcagaagtattataatcttcttcaggaatagcatcttcctctggctcgacagtttcccaccgagccgcataccaaggttttatgcctttgctgctttgcatggtgccggagcggaatcattaacagaatcgtattcaatacgccattcaacttcagtacgagtaactactttctcgtgacgagtgacgatatctacttcaggaggattataataccaatcggtatgatatgaacctgaacgagactctgataccatgaaatggacgccgcgtgctggataataccaaatctgagaacggctttgatacttatggtcctgtgtccaatctccatcttctactaaaacaaagatttcttcctcttcatcatcaccgttcggtggatattcgaaatcatagttgtcgtcccattcgccagtgacaccagcaatatgtttgatttctttaagcaattcagcgttagtcattttagcctcgcagtttttgtaagtcttcatcgtcaatccagctttctaaaccagatggaagtgagcattcaatttcccataacagttcttcaatagcatggagacgatcaatctcttcagctggaactgttaccattcgtggagtttttaaatcatcaatatcataactcataactcttcctcatgccaagaacaatcaacttcaaaatctggtccgagctcttcatcttcccaacgccaagaccctaatggattaccagcatcgtaatcaacttcaagaccaatataactccactgaacaccatgaatggtatttccttgctttacaaagaattcaccccattggtgcatgaaagcatactgcggatcagatatagctctttcaatcattgctttacgaagattacgttctaaatctacttggtcgccttcaggaaaaacaaactcaattgggtatttcataatttcaccatacactcgccgtatttccatttagacataaccttaactccattagagtaagttacctctacctttgctcggtgattcttaatctgcttaatttcaccggtttctaatccgccatagccgtaataaagagctacaatatcaccctcccgaaggagggttccgcgataatcatgcattgaatttgaatttacggagttcatcaaaaccgccgatatgtgtgccatcaggagcaaaaatctgaggcatagttaatccaacctgcgattcgcgacctagacgacgaagcaaatcactgataactacttcatcaaatacacctttttctggcattacattgatgaatgcatactcttgtttcttaacatcgagcagacgctttgcattatcgcaaaacacacacttatgaatgttgctgtcgtaaccaaaaaccgtgaacatcttcttctatttccttaaatacttgagcttgaacttggttccaatctggatggcatactgctttaacgtaatttgtcataccaagacgcttcattacttcgccatcaattgcagcttgggcaaaatttcttccacgagtcatagctcctttgagtttagaactatcaactatttgaccagtctcattataataaaccgaatacatgagtagcattactcgttcggcttcttccatatatcgtttacgagccattttcagccttagtagttataactaatgttttaccatctaacgcatcgagaatatctttgatgcaattatctggcattggttgaacgctagctaattgcttggcaatatcatcaggaattcccatgcgaggaatatttaatttgctaaaatcaattttatccattagcagttaccgggaagtgttctgccaatttagcggcgatggcagcgttaatttgatcagcgaaattcttattcattgcattaacaatgatttcttgaattcggcggttagcgctttcaatagacagcttaatacgaccttctgcttgctcaatagcatcatcaatagtctggtgaaccatatcatcaatagcatttttagcgcatgattgggcagcgttacgcatcatctgcgacatttcttctttggcagacatatcattccaaccacgagtatggaacatctgctgaagctgtttcttaacttcagctcgtacatctggaatagttactgttgcaatattaacttcagattgtactgcttgttttagtttattctgggaatcttttaacaccatttctttaacgatgttattgattactgactgctgcagttgagcacgggcttctgtaccttctgggaataactggcgtactgcataagtatctaatttaatgtcaatcattttacctttttcactccaggaatattagagatagtttcaaatacttcgtcaaagttatctttatcaacggtgactacaatagtgcgagcggtctgtttctttttccaacgtttaaagaaagtggcaagactcaaatcatgggaagtgaagaaatcatcggttttgtaaacatatccgctttcaatttttactaccgcatcaggcgaagggtcttcatattcttctacttcaacatcatcaaagagtattaaagtgtcatcatgataatagccttcccagaaggcttcatcgttataaaattctttccaaagcgcgccagtggttttcatttaatcaccttcttccaagcttcgtgagcagcacacgctaatacttcgtcatcagtcaaattgaacttgccttcattacgacgagcaatcatttcattgaattcagtatcagttctaagcatcatgttaagaactgtaaaatccattgtcgctcgaagatattctttaagctgcatagggtcgatgccactttcgtatgcgtcaagaatcatatctgcaatgatgttatcaaagtttttgtcttttatgaggttattagcatactcgacaaaaaacttagtattagcaccagtaatagttttagtaatcattttaattttctctcaaatttatgcttacaagtccggcatttcattttcagaatatcggttgtccaatcaacaagctgtacttgaatactaccacatttttcacaaggcacaacttgtttagctgcagcttctcgacggtctaccatttcaagacaggcatcccaatcaattttaaattcaggtacaggtggatactcaaactcaatttcaaggtcgttatcatcaacgaccatgtcttcttttaattgatttttcacagtaagctccgggcatactcgagagattcataccgctctttgtactcattaagcgatttgactaaatccgccatcatcaattcatgcttacttaattcagcttcttttgtatcaataaaccgcttaactgattccatttcagctgtaatactgtttttggcaatttcaacatgatttactggtgttaacggaagaggcttaacaacattgagatacatatgcgctacatcttcatcaataacctgtgtgctcaatgttttaggaaaaatcttaaatgggtccaaatgtacttcaagaacagatgagttttcaccctgctgtttacagcatgattttttaactacatccatatggtctaaagcagtacgaacttgcgctaaaagcgcccgggccggatactttccgctggacaaatggctgttaatatgaattcgtacagttacattgtcaagttcttcggcacgaataaatgaaacacccttaggatttctagaactagtagaagatacctggtatttcacacggtcatcgcctttaagtaagcaaattgaacgattaagaatacgacgcaggtttgcattaaattcagagcagaagatttgggcagcgctgcggtcgtgtctttcttcagttttaaacgcccctgccgcaaagctataacgctgaccataaattttagcattgccgatagcaaactttttgagctgcttctctgctgacattgcacctaaccagcgagaacgacgaatgttttctacaacaaaactgacatagtttgcttcgtgtgctgccatgctatttagcacacgacgagctacgttaccagcaattgctacgttataagcagctggatttaaatcatgtaaagctgccaaaacctttacgtgcttctcacgctttgacaagccctttccattatgcttatcaaattcaccggctacaaacatctttaattcattcttattcattatcttttcctctattttggactgggctcaaagagtatctcaaaatctccctgaacccattatacaacaattattcctcaagcattataactttgcttgggcgcttatagaaagcatgagttttatcatctttcgctaattcaaatgtagcagtaaactgtactttgcctctgtattcaaacggaatactttttggaagggagccgtaaaccgtagctccattctcaagtacaaccatcatcttacattgtacgccgtaatagtcttcataaacttttactgacgttacggtaccggagacagtcactcgtccttctggtgcatcccctttattcttattcagctcattgaatatattatcaaagacctcttttgaatgttcctggatagcctctaagatgctcttatgggctctaacttctgccataacaacatccgttccgtcttgcaatttccactctttatatggaacgcgtacttcaagaggataaccatactcacgaagttctttatactcttcttgagttaagcggagtttccaccaaccgtggtcacctgtatactcaggcttatccagtgaatcaaattctgtaacatacggcaagtaactgcctgcgtgataagcttcaacttcacctaattcattttcccaaagataaccatcaaagggagcatgaggacgatcatctttgccccaagtaggagctacaactttatcaaagtattcacgaccgaaacgggtcttcgcccatccagcattcaactcctcggcgcgtttttcaactttcgctcggtgtgcttggcgggctacacgattttcttcaacaagtgcagagataatctcggttaaagttttcattttattctccagtttggttgacgagaccatcttatcaacagcctcgccgaaagtaaactactttgtgaaaaattttctccaaagcagaactgcatctctacgagatacttctactgctcctagagcaactgcttgcttgcgacgaacatcgcgcaaatcatagtgtggaactcgcttatcctggaaccaagaacgtttcattccgatggcttctgccatagcgtgtaactcatcaaggttgtcgctaaacatatgacagttctttacttgatgacctctcattttccaaccatgattcatcaagacatctacgtatactgtcatttctgattctcgatgtaggtttcaatgatgaactgtgctaaacacagaagattatcttctgaaggagaatctactaaattctcaaccatttcagaaatagttccaaaagcttcttcagtattgaacatttcttgaagttcgttccaagtaggtgctttcatttcaatctcctcattagttaacgaagctatcttatcatggcttttctaagatgtaaacaacaaaagggcccgaaggcccttaaaaagatcggaaatcactgttaaaccatggcgactggtgctgtcgctgcttaagcaatttcacttgatgtttcctattgtcttctataagcatcttagaggcttttagctcttcagccaataataactgtttacggtccatcaggatgaggttctgggtcttctgagcaagtgtctgaatacctttgagaccttccacagattcctccatccctcgtttatacttggttcgggcagcatttaactgcccttcgtaatacgcatgtatagacactatagtactaaacacattttacctcaataacatctaagataatatcttcaacgtcttgctcagggaatgccacgccattggtctgcccatgctgaaatactgcttggtacgctgacggcgcagaaattcgggttgaacgttctttattgtcatagcatttgccatcaataaagcgtttaaatttaacttcataggtttttaacattattacaccttagcataattgacgatttgttcacgatcagcgggccaatttaaatcagaacgtttcttgtttgaccacgcaatattttcttcagcccaatgaagtttagccgatacgctcttttgtacgtctctgatggcttcttcaagataaatgcctaaatctctcgggttagttccttgagttttaaatgcattgagcaaaatatttcttacaacttctttaaattgattttcaacttccgggtgaataaattcacgatatccgctgcacggatatccaaaagcatctaccatacgagcagtactaaattctttgttcataatccgagcgcctcgcgttcatcaggatttaatttagccaaagcggcttctttaattttttccaaccgtttacgcttagcttcaggtgtttcttcctgaacactaatagcagcgcttttaggaaaagtccatgattcgccattttcatcggtgaatgtaattagttccgttggcttacgattaactgtaccatctgagccccaccaagactgccccttaactgcttcttcggcaacgcaatatgaaccataataaccaaacaactcactacggcgatcgtctggagagacatacgctgcataggcttcactttctgtcattacccatttcattttagcacctcataacgaataagttcaatacggtttttaagctcttggtatgatttacgccaaggcttataataggcatttaaatcttggtgttgtttatgcatttcgtctaaatgctttactgcatcctgcacatttgcaaggaaagtatcaaatactttattagcgtattctttcctgagctcaatgaacggaggagcacgaaatacgtttaccattacacgtagttcatgataagaagaatggacttcagctaatacatttttcttatcgccaaagttaaacttataaagtttttcacagattgcttcacaggctttctctgctttacccttgggtttacctgcaaagatatgaccaggcggatatactttaatatcgtttaaccaacattcaatatctttaatagctgctaaactcattgtacccacgctccattttcatcaatgtaattaatccactcgttaatagtccaggaagaggtatcacctttaggagtatcaacgatatacattccgcctttaaacaaaacacgttttacatcattagaaattaaagtagccattatattttcctcagttagggaggatttctcctcccattaaaattatttcagcattgttacttcagcaatttcacgccagtttttacggtcagtcgcgacgaaatcaccaatataaagagcagtacggagagatacgttacgcagacgatttacgttatctttcataaattccaaaacttcaataacttcagaatttcttaacccacggttctgtaacatagaagtagtcattattacatcttgaacacgaaccataatctcttcattagtgtgaacaccaaggtcaagataaactgaacgtgataccaaggcttgaagatgcggagcaagtttagaaccgcgctctaattcacggtcaatatcaacgttagtgataaagaccacagtaccttcaaactcaaactcattaggaattcctttatcttccaagaaagaagatgcagtgctccagcatactttacgtttctcccctgaatccaaagcagctttcagaaggttcaaaatatccatatcagagaatacatccacatcatcaatcagaagaactgaatttgcttcacgtgattcccaaagacggcagtataaaccaattcctgagattttgccgttcactgatttgtaatcaatagcgttagtatcatgagcatgttgtaatgctttatccaaagagtaagtcttaccgatacctgctgctccggagataatcagagaacgaatattcccgtggattaagccgttagtcattaatcccatgacgttaaagcgtttcttgatacgctctttcatttcatcaacggattcaacaacttcaattttagcagctactccgtcaattgtgatatcatctttgaatacccaaacaccgcgctttttgccattcagttcaacaaagactttaccatcaccctggcgagaatcttcagcacttaagctatccgggaaccactcaccgagtaactcataagtacctgaaatctctttgccgaagtaaatccctttcttgatggtgatagttgacattttattctccgttactctgttttgttttgatggagctatagtatcaccagctcgcgagcttgtaaactacttttttcattcttttgaaacaaaaagaggagcccgaaggctcctcagttatgcgtgcttgttgatagcattttctgctatacgttttggaagtttacctgcccagcggaagaacatgataatcgctccggcaataaacgcagggaaccaaaagatgagataaaaccaatactctcctgctttctcgatggttccatttttgattagatgcttacagacagaccaacccacgacaaagtaaattattgcaacaacgattggcactactacgctccacagtaaaatcatatttcagcccaataaagtgagaaccggagctcttctccggcccatgacataaatcggtggatttgttttcgagttggtcgagcagagaatttagcattttctctacgaccagtctctctgcaaactgcttccaaataccaccgtctacctttatgaggtcttccgtaattcaagaagaccttcattgtatcatttgtagtaagaattgtggttttcaagataaaccttctcgacgaaatcgtcccagaacttcatgtctactttcttaggcattccgttcttttcagcagtatgagctagaatttctacttcatctactacagactcgagaagctcctgtacttctttgaacggtaactcacctgctttgaccatcttgaccattttagcatgggtcagagggaattgaaggtcaccagtcatatagatttcctgaagctgcagacctgcacgaagagcatgactcagtgctttccagtcaacgccttcgttagcttctgccttacgagcacgttcaccatattcagcatcaagtttctcaagagaatacttcatctctttgatagtgatagtcgtctggaatttacgacccagaacgttataaaacttctgctcgcctgatttgtggtcaacgaaggtggtccatttgaggaattcacctagaggaagtttctctgcgatatcctgtactttccaacgctcattgatacccttctgctgaggacgatcgtcatatttccattcaggaacatctctgataacatccaggactttatgtaaatctgctaaacgagaacccttaacgccatacttacctgcttgcttacggacatatccaagataagccttcatgtcagtggtatagaaacgagctcggttgtcttgaatgaatttccatacttcaggaaggtcagatgcaactaccaattccggtggagtatgcagcatatccaacgcgacagtttcaccgtcagcagcgagcttgaagaaatactttaagctgaacaactcatggtcaatatcgtctttggtatttttggttgcgctgttgttagtattacgattggtgtggttcatcgcctgacacattagaatatcacgcggatgaggtacaaagatttctttaaaatccacatctgactcgggagttgaagtaccatacagatgtgaaccaaaataagattttacgattgttttcataagtaaatatgattccctttagcgaatttaactaatgcattagaacgcttggctgcttcttctgctcgagttttatctgtagttctttttgatgtacggtaaacattaccaattttttgactggtgtaataatacaccacttcgtgggtatggtactcttgtccatcaggatgctgttcacgacaggtttcttcacgcagtgtggtttcatacataggaactaatgcccaatcaattcctgtgctaatgattgccacctgaatgtcaagtctgttccagcgaaatgcattgatatatcctaggacccgtgattccgggtccatcattgcgaatttaatgttttcggctgaagctaacggcatctgtttcacaatgctcatactaagttttttcttagtagttacgatttcaatttccatgacccgccctcataatgtatgtctaaatcaatgttatctttgccgctgtacttgccagtcaaaggaataaatttaaccgtaaccttttcgccgtcatcaaaagtaaattcggcaatagggtatgtagaaattataccacgttcggttttagcacgaaatacggcccgaaggccgttcacaatataaacttgatcattcttcactaggttcacctactgtaacatcaagcatagatttaacgagcgagatgtcatttgtactaaacacgtgagcttttcctttatcgttctggcaaaacatgcttccatctgctgcaattgctagtacttcatagcagttattagttgtagagaatttatcacccactacaagaggaacattaactttacacttctcataaactgtgtatttaaggctgctgagattaattaccgacttggaaccaccgggtaaaagtttacagatataaaatccatcatctgaagactcttttaggtaatcatcgatatacattccacggtaaccatctttaggatatactacagtagttgtttctcggctaccataatcgtaatatactacgattttgctgtctttacttttaaagaaaatcgataccgtatgcgctgagctgcatttgaagatagaaataaattcaacttcaagctcaaatcgattgctttggttatcaaacccaatttctactttatcaccaacctttaagggtttttcaataaggctttcttcaaatttcgtgcgaataaaacgtttcatttatcaccttctacataatcaatcattgggcagactttccgcttacgggcttttaaatactggacaaataccgatggttcggcttctgcaggaagaccagcttttactcgagcaagttttttggtatactgtttctgattgcggtagtgtttaaatttttctaaaccaaaaataaatccaaacgctatagctgcaaataaaagcacaaatgctgctataactactgcgccaactggtactgctataacatttaaccaaagcgcagataaactaatacctatccaagcgagaattcctgtatccgccacaatcggccaaccgaacatccatgcaacagaaccgatgaatgtaataatcgccgaagaaaacacaacatgaagaactgtcgtccagaagtatccacatagagtttttggcattttccacatgctgccagatttaaaccacaggttcattttgaaatgccaagagtttttattaatattcattatcagtccttcatagttggaatcatagttacaagatatttgaccagttcaatagcgtcgcttttatcaatagctacacaatctccgtcacgttcaatttcgatgatagtattatgttcatacgtgtggaataccgtaagatacaaatcaataacatgcgggctttcatcttcaattactgcatcgcctttacgggattttccgtcccatactaatttactcgccatcttttgcctctatcaagaattgaattaatgaatcaatttgtttagtatcaagatgaattatatcattgccttgttttagcacgatacgactcaactttttagtgaaatatgaattcacaacctttacacgcacatcactgtacggattatctaaattggtactatcaagaatactttccataattacctcaattgtgaatcttttgaaccacgacgattataagcagaagtcattacaatgtcccactttccttgacattctacacaccgttgacagcctttaaccaacagacgacgagctactgggatttcctcatcacaatcaacacagaactcttcggattcccgctgttcttggagttgtttctgaagacgggcccattcaatcccgtctgctattgtagcttcgcgagttgcaaatccgtcatctgatgggccccatccattcatttcaaactctccagaatcatttgcaccaaattatatgtaaacatcggatgctggtattgtaccacaatgtagatgataagtaaaacgtttctcattcttcgccatcatcaaagtcgtagtaatcataatcacaactgtcaagataagaatccataaattcttgttgacggcggaaatcttcagaaggggtcagtctgtctgcatatgcttgatcatctggatcgctgaacttgtcttcctgaagttctttaatgaactgttcagcttcttcacgcgtccaaaacccacgattaagattatgaaccgaacgcttttcacctggcttgaatacgcccatatcatgagcagaacgctcagttgaataactttcagtttgaccagcatagttttcatattcacaaatcacccggaagaaaggagattttcgcgaatatacaccgcgaagaccgagttcaacatcatacgtgcctgaagcaacaatgtaacgcgttatttcgccgcttttagtttctgtgcgattaacaccacacacgtgataaaagatttttccaggttgaagctcggtggttaacttaatcataatgtttttctcgtttggttgttgatatgtctatagtatcatgtaatgaagggaagtaaacaactttttgaaaagaaaatgcctcccgaaggaggcggagggtattactgcaatgataacaaatacttagtcttgtagcatagacctgtaatgtcatccagaacactttggagggcggcaggaactgacttgtagataccatcggccttagccagaa

SEQ ID NO: 21 - DNA, 167337 bp, unidentified; identical to SEQ ID NO: 20
  source 1..167337: mol_type = genomic DNA

SEQ ID NO: 22 - DNA, 167337 bp, unidentified
  source 1..167337: mol_type = genomic DNA
ctgaaatttcaggaattccttcaatctcttcaagtttcttacctttacgaaccataatagaataagcatacttacctttgtagtaagccatatctttcattagattgaaacgaccgccggtgcgagtagtaatcaaccgagcaagaatgcgttgaatggctttatcctgtccttgcattttcttcggattaaagcggaacattaccgcatcagctttaatttgcttaactactttgttgacggtctcaaaaatggtattgatagcaccaatcgggtcttggcctaaaccacctttaagcgccccgatgttacctttttccgacacagagaaaacatagacctggatgaatttatcacccatcttgatgttcttaactgcatcaccttgacctgacccttgtactaaccgaatcattaaattgttattacccggcaccttaatcaaaaagacctgtggtaccttaagttttggcttaacgttctcgacgggatagattttactattctcttcatcgaaaacttcatttaaaagttccatgacatatcctcgtttgtttattctatttatacgaaaaaaggcccgaaggccttaattaattattgttactgtacgccaaacttgtagtccatttacagactcatactcttcaatgttttctttgaagtttcttaatgtgttaatgttattaaactcaataacttctgtgtgaacagaaataccaccacgtccgtcaagagatttagcaatcacttcgtataaagctttcattttattcctgttgcctcagtaaagttaacaccaaacgcggcttcgaatgtattagccacttctttatcatatctacgctgtttaatgataggtaagaataatcctactgtaccatcatcacgaccttcagcagttacccaaccattacattcaagttcccagatagttcctggaagagaatctctgtttttccatagatgagtacgatcaagttcatgtaattcttcgggcttatctttaagacctgacccagcgttaacacgaatacgaccacattctgatacgaacattaagccgcccattttaccaggttgttttctatgctcgtacgaaccgacacatttcaaatctacagtgataacctctttaaatttaacgaggttcttagaacgcttatcttcccaataagcaccgatattcttaaggataataccttcgagaccttggtctacgtatgtcttatagatagcccgagcttcatggatgttatgtacgacatggttttcaattagaataaccttgtcatagcctttgctcatcatttccaatgcacggaagcgtacatcataagcaaatccaggaactttaccttcggaatatactacatcaagcggaacataatcccaaacttggaatctcataccttccgcttcttcggcagatattgttcctttaatagccttattagccaatccgtttgattccgtgcgagccgtctgttggaattccttagctttacttaactcaggaagctcaggctctttaaacatatcaaacaggtcgttttcttcttctttcacttcgacatgatataccaactcgccgtcaatcatcacaccgttaggatggcgttctcgggcttctttggtcatctcgataagttgacgcttaagtttatctagacccaggtattcattaccggaacgagtaagaagagtcacatcatctaaatcatctccgcggatttcagcgaagcatcgggctccatcagctttaagttgtgcgaatgcagggaacttaatatatgacagcgctttctcagagtaggctgatgctaacatctgtggcatctcaggaattaatttcttccataccttattagcaatagaacctgaagcgccgcaacgcatatctttaagaagaacccgtaccagtacactagcatcaccctcattcatcttagagagcaaatctactagcccctggattgccatattaccagtaagtactcgtgctgccagaatgtcttggaggtaatctagaccatctgaaaacgtctttgaaggaacatttggatatttaacgggagtatattctggaactttcttaataaaaaatttaaatcgcccggaatacgccagcagataagctcgctttaaatcaacgttatctttattgtcaatgagaatttgggttttggctttagaacccttagcatcttcaattgctttgatgatatcaaaaatcattattcacctaattcttttgaaagttcgcttacgctacgatgataagttaatccatcgatataaacaaacccgttattgatgcattcattccaaatcgggcacgactttgcttcacgccaaattggattccaacgataaaactgattaacatggccataatcacatgataaccagcgtttaccaaccttagtatgaactacaaacatatttcctcctagggtatggcaattataccatacccagagtgttagcaattaatttggtgattatcacatgtaatacgaccattattccaccagtcgtttccaggaggaacatgcggaccaggactaaacggaatgataggttgtttccaccaatctcctggaacttgtcgtggaggccaattaaaaggatgttgctctttacgaatttggtctttgatagcttcttcccacaatccagaaagagacttctgcggtttcttaacgaatttcagagattccaggcaagttacaatttgatgccaatcttcaaccataattccaggagcagtcactgaaccttctcgctcaccacgaggcatataaaacacacgggtttcagtgtcttcaaagactttgctagctgcagcaatgtgtttaggcaaatcatctacatagcaaacgatgcgatcgccgtattttactttagccttttccagtaaagcatctttagattcatcataatcgcagaccatgatttctgtaaatgcatcagggaacaaagcattcagattgaaacgacgattaaggttagcatctactgagttgccaagagccgtgatagcgacaaaatcgtatttttctttgagcttattaactgtagctaaagcatcagcatacggagcaagataacgaataaaatcactgttgttgtacttcagaagcagcttaacagctagttcttcttcacaatcaaacagctcagcgggtttaatgaatttttcagtagtcatcatatcaaggatatgctctacaggaaggttatatttctgggcaaagtaaggcagaccactttgccatttaacgatgattccatcaacatcggtcgcaattacaggttttgacattcggggaaattcctcaatgcttgtttaaatttggcgacgctatttgcggcaccggtgaaattgaaccagattaaccctggagtgtccgagggttctatatcaattaattctatattataatactcaacagtctttagcatttccctggtgatacgtcgggcaaccatatgaccgaagtgaggattaatagacatcgtcgttagcagcccttaattgagtaattggataaagctcggattctgcatggattgaacgattgccatcaacccaattaacttcataccaaggttcaaccaagtaggctttaattgctggagccgtatcacatacaactccaggaattccatttgctaatcttactgtactgaagatatgatatttcatgcatcaagtctcactgcccattcgggcaattcaaagaaatccggagcatcaatttcatactcaacggtgtgttgtttaacatcagctgacatgatatcaaccattgggtggtttttcaaactgcaagaaaaaataccagctttaggtttaggcacggatacaatcatgttgatttcctcaaaatttagttatgaatttttctttcggcattttggcatttgagccatcactgtcagaatacccaattggcatagttgcattaatgaattcaattttagcatttataacattaatgctcagagaatctacaccatcaaccatacgaaattcaggagggcaatacttatcaatgtatgctttcacgccatttttattagcaggtgtaccatcgcgagtatcgctgataatggtttcaacttttttctttcgtgaatcatagaaagctgatacaatcatttcaatttcctcttaaaacgggcgaatattaacgtgaaccacagggacagcaaaaggttgcatgattacaacttttgtgtctttagttgcattcaggcgttgtacttttgcaagattaacagcttcttcctttgttaatccgccattgtaggtatcatttcctttatttgatgtccaaacaccccaatcattgcttccatcatcgtcggtcttcggttcaggttctttgtagatggtttcttcaaaataatgctgaaactcttgattagtaagaatacaccacatatgggaaaagcgaacttcatctacactaacgcgtttgcattctccatctggcttaatgatttcaaattcaactaatccggtattttccgcatatttaaaggttctggtaattttaatcggattattaccgatttgctcaaaaacacccttgataagagcgcctggagacaagattggagtctttttaagcttatagaatttacctttttccattatcatttcctcaatagtggggccgaagccccgagttagttaaaacttgatttcgtttgaaacgatatcccagattgcttcacgttgttcttcggttgttttacgaccgaggatgtggcgcagataaattttaacaagcagctgacgatttgtgttccaagacggatgtgaagataaatcacgtttacgaacttcatcatggaatccaactttgatttcagaaccgttgaactgaatatccagagtaggaccattttcaaagctgaagaatacgtagttatcttcccagtacatatcgatttgagctactgtgccattgttgtgttcccacagcaaagtagtagaaacgtcccaagcattgttctgtacgtatttgcggttgaagttagtgaagttcatttttattctccgtagtttgtttatctgtttgggtggtacaggtctatagtaacccagaccacccaagaagtaaacaacttttattcaaaaacttcagacatttttaacctctacagttttaacagtttttacttctgcaaatccggtgcttttaaacagttcatacttggtagtttcggggacgatatcggttagttcaaggatgatttcttttgcttcttttaaagtgaagacgctacgcccatctttaaccactggagtaggtttaacgaacgttgatgggatttcaaaaactgcatagcggtcatcagagctttgattttcaaacgctcctatttgcacaacacgtccttcttctaactcgtgagaagaaaataaacatgacagagaccggtcatattcatctcctatggtttttgccgaaatgattttaccggtttcggttttaatcttaacgacccgtcccagcgaatcaagttctaacggcgtccagccttgaactccgacaacggtggcaatgagatagttaattgtgttcttagcgtctttccatctacggtaagtttctggggaaatgcaatatactcggtttttgctgtaattcattttgatatcctcaaagatggggccgaagccccagtcaagattactgtttagtccaattatccatgtttaatttaccgacctttttcatttgctcaattaaagcatcggcacgattacgaccattttcataccaggttacatcttctgagtaaccgtcttcttcatctgtgtaagtttcagaacgaatacgaccaacaactggagtgttcagaacatatacagaacctgtgaaccaattggttagcgtgatatgccagcagaaatcatctgatggaccgtccggtgtcatgcatggaacgatatcaccttgaactttagacaaaatccacattttctcgtggacagtctgagctttataaccgtcatggtctttagtcttgatagttgcattcaggttgatggtattcattttattctccgttgtatctgtttgggtggtacaggtctatagtaaccttgttgagcctagaagtaaacaacttttttcattctgcggaaaataaaaaagggactcccgaaggagtccctgaacttatgctttcggcttaccaaaacgagaagcatcatcgcgaagaaccgcacgagcccgacgcatgattttctcaaccgtctgattgatacgcttgttcgacccacgcttgtagccagcgcgtttagaggtaccaacaacttcttttactgcagtttttgctttagcttgtttagccattttatcatcttccattttggagaaatacatgggagcacgttcttccgaggttcaacttctttcgacagttctttcggttgtagctcccgcaagccctcaaagggtacgtttaaactcttatctgttgcacaccgttagcttaaaggttccgggtccgatttctcggggataagatatacaccgatggatgtataggccttgaggcgtactcccgattggccatcgcctcggggtagcatgcacttgccgtttattttctagctgcactttggtagcaaatcaccgatggtttcggatgttttacgtggggataaccaacaacgtccacatcatacgttacccatgcgtacacatggtgggcgtacaaattacttcagcgttaccacaaagtggcgaacagctttgcgagcagcagaaccaagatgcttagcatacttcagttcatccatcgcttctaaagtatcacgaaattcagcttgagctgggttcagatgtttaaaacctttcagaacttccagtgcttctgcatagatatcgattgaagcaccgtagttttcgtgaccggaattccatgcattacgttggagttccagagctttagtaagttgtttgttcattgaatcgttcctcaaatgaggttaaaatttggtggacggtaaccgaggtttagctcgggcatccaccgcgtagaattgctcgggtaactaattgtccgacgcccaattcatattattatttatatacgcatgcaagggacttataatgacaagtcacaaacttctgccgaatttctttaggtttcttcacacctgctgctactaacggatgaggtacatttctgatattaccaacaggcagtggagtcaaatcaccgacttcaacaaatcctttcggtacatcatcaccgatagaatagatttcacacatatccggcagttgtccttgttcttcttttccaagaataataccggaaggagaaacaatttcatcaccttgctgtgcaggttcagatacgagaattacatactcgcctagagctttaattggaagttccatgtgttacctttattgtttgaccatgtagttatattaacatggtcagtttaaagcaaattacttaccgatcatctgcagcagatgctcaactttcataccatttaccgagataagtttatcaaaggcaaatgagcgccaaccttctttctcggtatcatatactggaagtgaagtagtgctttctgctcgagcagatttagtagtgctttctaccaaatcagatggaataatgtctttatcacgagtacagcgcagagtacgaatagtgccatcagctttttcaaacacaatctgggattcgcccatgctcagcacagccttcagagtttcacgaatatggatgttttgttcagtagtcagtttcattttgatgtctctttaatagttttgataattacagatttgcgcttggataattcttttaataatcgaactgcttgatcttcaaatttaaatgttgctagtggtttccatttaaaccaataccggcgttctactgagtatgatataacaacatcaccacttaggttaagtttattaatttcaacaattctaagtttcattattcaattccacagaattctttaatgttataccaattcaacttatccaaattacgttttggaacattgaacacctcgattccagcagaacgaagaatatcgtcccagccgggttcgttcttgtcgtatgtttcgcagtatactaattttttaataccagactgagcgatggcttttgcacaatctggacatggagacagtgtgacatacattgttgctccatcaatactactgccgttccgggcagcaaaaagaatagcattaagctcagcatggatttcattgactttagaccatgcagagtgggctgctcgatgttctttgagcaatccgacttttttgacttgaaatccgtcttgacgcaatcccgtagatttgtaaggaatttcaccaatccaaccttgttctgctgcatggtcacaacagttcacgccgccagaaggtgaaccgttatagccagtagaaataattcgtccgttcttttcaattactgcgccgactttccacgagcagcattttgactcttgagatacgagatacgcaatttgtagtaccgtcgacgctttcatttaaatcaccagataagttgtgttatttgttttaaccaattttaactcgtcggtaggagaagcaaaactctctactcgagaagtacgaatgcctgtaccatctggaaacggatgatttcctcgttcaagaacatcggaaaagacataaccataaagaggttggccttccttaacatcaacgttactgtacaaaatagcatcatattcttcgcgcggaattgaccaaacgccttggtcagaaccaataacagcattaattagacgaataccattttggctaatttctgccctaattccacgagcatgttcaattaaaagagcttctacagcctcacgtaaagtcattagatatgtcctaaaatgttagtcatttcaacttggcctgttccggttaaagccaattgagtgtgttgattgctctttccattattaactgtaatgatataagcatcaacatagttaaaggatgactctcgtcggagagtcactttacttccaggaacccggtttgctacttcctgtgcgaagattttaaccttcgaaataaattcatcatgtgaaaatttagcgtcagacaacataagtcataacctgttgggtttcaaaattagcaataattccaacgataaaccaatcgtgttcaccttcgccacaagaaattttaacttcagatgaaccgcctgagcggtcaatagaaaatttaataacttcgccgtttggaataagtgcattcatggcagataaaaactctgcatgcattttggctacttcagatggagtaaactcatctgttaaatgattagcaacaacttgcgtaaatgatacttttactacttcggaatactttggaaacattatactttcctctaaaaatcaccgtgggctacttgccagcattcaacaccgatacgacgccacatttcaaccacctgcgccctgtcatctactgcaagttttacattataacgatcagcaattcggtcccagaagatttcttcttttaccacatcgtctttgcgtgaatcgccttgcttacgttggaagtgttcgcctgtttcgccaacatggtccaacaaccatttcttcgtaatgcgttgataaacagtagggtcttctttagtaccagactctctgccggaaacagtaagaattttatatcctttgttacgaagcattttaagaaattcaattaccatttcctttggatggtctttaccacatttggccaagtcataaggagaacgatgattgttatctgctaacgtgccgtcaagatcaaagataactgcttttggcaatgattcgtctggaatgtacaaatcatatggatgcatcttagaatagaagctacgaagcacttcaataggaactgcattcgcgccacgatagaggttacgattaagcaattcagtccaaggaacgtcaaagcgtttaatttcccacttgacaccatcaatttcgtatgccaactcttgccacttcttgatagtcgttggattaaggttagtatcagcaatgatgacacctttagtggtttccatctcgagtagagtcttcgccatagaaaactgacatacagatactgacttctcacgaagcttagaatatttgtaatcattacgtttatcaaggccaaagatgccttcacgcaaatcatcacgagacaaaacataccaacctggattagctgctacgtattcgttagcccaggttgttttaccagagcctggagccccttgtgtcaaaaccaattttttcattatacatccttaagagtgtcaataaaatcatgaagagccttagacttttcaccccaattagcacgatatttttctttaattgctcgcaatggcttattcattgacagtatatcatttttgtcataattttcagctgcgcgtccaaacacgatgcacgccaattcattttcagcaattaatcctttaagtgtttcatactgctctcggttcattataataccatcacttaacgcaacgaggttctttaaggtcagaacgataataacatatcattccattagcatctttagtatatcgtaaaatgtcattcatccagatacgatattcttgcgactcttcaaacggcataccaacccaggctttaccgtcaattacttttacttcccaatgtccttcccatttttgaattgggtctggccactcaggatgtaaaaccgggacatctggtgcactagaagagcatccagcaagtaagctgataatacccatggctaatagacttcgtttcatctggtagcctcctggatatcttctgcaaacttattgaagcttgcattaatctgtttttcaactaatccaggtttggctgcaactacgtttccacgcttagaatctttattcatcttagcgttagaagtatcacgagctgctcggttttcctgatagcctttatatgttgtctgcagattttttatagaaacaccaatgttttctatttcttttgcttgtcgatcagattcatcttggacgactttgaggtcagctttaagattttctacccgccacgaaagatatttcaatccaccggcggataacgctaacacaccaatcatcaaccaagttgtgtttattttgagcatagtttaaggataacctctacgatatcatcacgggataatcccgaaatgaggatgtgacgatcagaactttccgaaggagaacacttgaagcaagcttctacatattctgccatctcagaataattcagctcgcgatgcataatgccaagacgatgcttgccataaatcgggtcaacgattacatagcatttgcatccgttagcatgaacgtttggctgggtgatgttcttgaacacctctgcaccatacttcgcgagatgattatctaggaaatcaatcatttcatctacagcttcaggaagggcttcggcacgctgctcgttcacacgattagtgtactctttttgcttcttacgagcagcttccttgcgcgccatgtgcgtccgtaggtcagtgacgaagcccaccttcttggtaccattccacacaaaaatcccatcagaatgagtaccatatttgttaacaaccatatctaaagtaatcgcttgcatatccatttcaatatcctcatcagtttgtgtaagtctatagtatcacactctgatgaggatgtaaacaactattcttcagaaatttcaatttctttttcgtactcttttggaacatatcctgcccagtacttcaagaacaccctttcgaggtctttaagcagtttatccacatctacagttccttcgtacatgttcatgataacaccaaaaagatggcgctgattaaccgttgctttctgagcagcaatagcataatctttacgagcacgacctctgtattcatcgtagaacgactgacatagctcaagtgactttcctaggtaatctagataagcttgctcaaacgcagaaattttcttaattgcgtattcatctccagcaaaaagagaacgcaaatcgtcggaatttgcagatacgacagacgcaaacagtctttcatttgacgttattgagtctttagtgtgatgaagagcagaataccattcggttttaaccttaaatctctgcccagtgtttagaactgcaatgtacccttctacgccttcaagttcacgaacaccttcaacccaagttttggggtcagaaattccgtaagcattaattaaataaggacgaatcttagcattagcgtacaaatcatcatatttaatatactcgccagttgcgttattacggacgtttaacacaaacagctgtggctcctgatatgctaaaacaacacgattattaggtgaaacaaattccatgtttaccgtataaccatctagcgctagctcaagaataacctgatgaagcgaagaatattcttcactgttaagcaaagctgaagcttgtcttgcctggtcactgtaaagagaggtttttgatttaaggtatagatacccatcatcaacataagatgatactagagagccatcagccttatccataatgtattctacatcgctaatatcaattcccatcgttagtgggttttcattcaaattgaagaatttttccatcggacgcgaagcaattcgaattggggtatcgccatccatctcaaacatgataccgcggcactcaagagcatcgggttttaaccactcactgtaacttgcgtagtggtatgaaaacactctgaacttaccatccataggaccggtaaaatctttataaaagaattttgcaacttctgagctttcacacagattcattaaatttttatatagctctaacatttctttaccttatgtttgcaattatcgtagtgccatctgatagcaatggcctttgaagttattataccacaatgcgggcatgggctgtacaaaggctttttctttcctttttggctttctgaccgcttgagtttagtttcttcagattgtgttttaccggttaaagattttgatatcttttcgcgtgtttctttggcatgagtctttccttgagtgggacttactctgcctttcagtgctttagataaattctttctatgttcttccgttcgtttctttccggagaataagttagatgtataattagaatgctttattctagagctttcataaaatctggaatgaactttaaaattctttccagaagaattacacatcatccaaagagcataattcattttagaattattatgtatctttgataatagcaaatgggcaatgaaatgttcacgtccagtcaataaaactaaattagaaacatcgtcatttcctcctaatgattttggaatgatatgatgagcttcagtataatagtttaattttcctttatcattgcctcgtaatttaccctttgctattaggttatcatatactttaacatagttcatttagctttgttagtatgttgggtgttccatggaggattgaactttttaattagaagaggttcttccaagtccatagtggatattgacatctcgccaagttcattattaatcaaaagattaaaacactgacgagcatagaactctacttttttgccagccattagtgcttcaaaaatcttggcagatttagccgaatcagaggtttggtctttccgattaatagcagttctataataatttatacgtttacgaagatttttagtcttaccaatgtaaactagttcatcatcaactgcgatggcataaactacgtttaacttgtttgctatcagaattggtttgatggtaaaatctggttctaactcaagttgaacatattttataaaagaaaactcgttagcaatatcattcataataaagaggggccgaagcccctttccttataagtactttttaaatccaattagaacatcatcagtgacatcattgtcaatctgagctaccagataagaacttatctcaacttcctgcggagcagattggactgcatcagagttaagatattcgcgaatccaaggaataggatgacgagttggtgcatccgtgattgggcacggcagaccacagctacgcatgcgagatacagtcagatagtcaatgaagtcatgaagaattttaacgttcagacccggaagaccaccgttgcggaaaagatggatagcccaatctttttcttggcggttaacttccatgaagattttaattgcttcttgttcacactctttagcaatctcaacccattcttcgccatcagtgccagtttgaagttgacgcagaatgtactgcgtgcccttcaaatgaagttgttcatcacgagcaatgaacttcatgattttagcattaccttccatgatttccatatttttatggaagttgaaggtacacgcaaaactaacatagaaacgaatagcttctaatgcgttaataacatgtaagcaaagataaagagatttcattaaatcacgtttagcttctttaatttcgatattatcttgattaaagcagcgatttttggcattttcccatgcgcgagtcttcgctataacatcatcatagtaaacaccaattgactcagcgcgtttcatgattgcttcgtcaagaacgatttcatcaaagattttagctgggtctacatataggttacgcatgatatgcgtgtatgaacggctgtgaatagtttcactgaacgtccaagtctggttccaagtatctaggcttgggtcagaaataagcgcagataaaactgctgctggagcccgtccttgaattgaatcaagaagagattggtacttcaagttatcagtgaagatattacgttggtgttctgggagtttttcaaactgaccacggtccatcataacgttaacttcttcaggacgccaaaagaagctcaattgcttctcaatgagttcctcgaatactttatgacgctgaatatcatagcgtgcaattcctagaccagaaccaaagaacattggttcggtcatgatatctacttgcttggtattaaaaactgtactcattctatttcctattctgtggtgttaaccatccgtggtctaattataattcccttttattaaagcttacaggccgcgcagtcagcagagtcttgaatcatatcatcgttaccggaaccatcacgggtgttatgatagtaaagagtcttaccaccaaagtaccagaaataaagcaagtcgtccatcattaccgacatttcaactttgcctttagggaaattcgccgggtcgtaataagtattagcagagatgctttggtctacaaatttctgcataatcagaacctggttcagataaggcttattaccctgtttcgcgagctgccaggcataatcataaagggaagcattgtgttcaacatttggaacgacttggttgaagcttccttcttttgattctttaactgacactggtccacgtggtggttcaataccgttggtagagtttgatacctggctagacgattcgcatggcataagcgcagataacgttgaatttcggataccgtatcgcttgaggtcttctcgcaggagttcccagtcacagacatagtttggagctgcgagttggtcaattctttcgttgtaccagtcaataggcagttcaccacgtccgtatcgagtttctttgtaaagcgtgcacggacctttttcgctagcaagtttaacagaggctttgatgagtgcatattgaatacgttccatcatttcgtgagtaatatcattagcatctgcgtatgaagcaaagttgcttgctaaccaagctgcatagttagtaatgccaacacctagtgctcgacggtctttagcttttaacgctttgtctacaggatagtcttggtaatccaaaaggttatccaaagcccttaccattacttctgcgatttcgttaacttcttcttggtcttgccagttgaagttgtcgagcacgaatgctgcgagtgtacacagcgcgatttcgccatcttcttggccaacatccgaagttggtaacgcaatttcgaggcagaggtttgattgcttaaccgtagccacatcacgaataaaaggaccatattcaccaacgttatctaccatgtacgggtaaattcgagcagtaccagcacgttcagtaaggaacaactcaaacagttcacgggctttaatacgtttctttcttacgtctgggttcttttccagctcttcgtataaagtacggaatgcttgtgcatcacggaagtattctgtatacaaagtaccaagacacacatcgggactaaacagagtgatgtaatcattcttaatcaaacgttcaatcatcaggttattaatctgaacaccataatccagatgacgaatacggttttcatctacacctttgttgttcttaagtacgaggaggttttcaacttccaagtgccagatttgatagtacaatgtcgccgcgccaccacggactccaccttgggagcaggatttaactgctgtctggaagtgtttccagaaaggaataactccagtatgtttgacttcaccgaatccaatttttgaaccctctgcgcgaatcattccagcattaataccaatacctgcacgcttactgatgtatttcgtaattgacgcagcagcttcgttaattgaattaagactatcaccaccttcaataaccacgcatgaactgaactggcgtgtcggagtacgaacaccagacataattggtgttggcaatgaaatctttttagtagaaactgcatcatagaaacgaataacgtttgctaaacggttttcgccatcatcttggtgcaagcacataccgatcaacataaaggcaaactgtggagtttcatacaattcaccagtgtgacggtcttttacgagatacttctcgataagctgcattgttccagcataagtcatagtgaaatcacgctcatgcttaatataagaatcaagcaaagtaatttcttctgcagaccacttacttagaatttctttatcgtacttatttgcgttaacacaacgtgaaatgtggtcaataaatgcaggcggttcaaactgtccataaacacgtttacggatttcaaacattgctgcattggatgctacatattgataatctggctcatcaatagaaatgctattcgctgctaccttaacgatagtcttctggatatctgcagtgctcatgccatcacgcagatgggatttaataatttcatacagctcgtatgggtctactttagttccttcgcacgcccattcgaggactttaatgattttctgcatgtcaaattcttgactaacacctgagctcttaattacttgcataagtcctctaattcaaatgtatctttaaaaagtttattcactacaagagctattatatcaccatggcaaggaagcggtttgcaggtgcatcctaatctcattcctcttaaagtttctaagtgctctcgctttatttctccgttccgaatcttagcaataaaatcgtccttaaacgctgcaatagcatcaggacgattatcgcaatctttaccgacgtaatttccccacattgttccacgttggatatttacatcgaagtcggaatggtatttattaaccacccgacatatcttcatgttatatcaacttcaaaccaacagattaattgtgttttgcctatagaccattcatatgatttaacaatagacagaaccctttgttcggtcccatcaaaaactatcttgtcattaacttcaggcaaatcgctagagaatgcatcacacatctcgcctaatactgttttagactggtgtcctttacgaacaaatcgaatattcatatcgccatctttcctgtaattgttgggtgagatttatacccaactagttcaaaatgatgaggacgtgcaaattgttctaaccaacgaacctgagaactagtctgccaagtttcatacgtatctgggaatgcaatttcaagctcacaaagttctttcggttctcgacgaagaatttctttacattgctcaatatgattcaggtaaatatgagtattaccaccagtgaataccaaatgcccaggtttaagatttgtcattttagcaatgatatgaactagtgctgcatatgacgcaatgttgaaggggaggccaaggaatacatctacagaacgctgataccattggaggtcaagatgcccctgacgaacgttaaattgatacagcaaatgacatggtggcaatgccatcttatccaaatcaaccgggttccatgcagtcacaatctgacgacggtcatatggaagttgcttgatacgatcaatgatcaatttcagttggtcaacacccatgaaatctcgccattgcttaccatacacaggtcccagttcacctccggaataccccatgtcttttgcctggttttcatagttgtcgtcccagacagttttaccttctagtaatgagtcatgctgaataagacgtaattcatgcacattagtagacccacgcatgaaccaaatcagttctgcaatacacgctttccacgcaagacgcttggtagttactgccggaaatccttcttgtaaatcaaaccggtgttgagtaccaaactttgcaatagtaccggtaccagtacggtcatcagtctcgtatccattttcaaaaatatctttaattaattcttggtattcacgcattaaatttttcctgaagaggagtaaagaaaagctggtctccacgcttttcaaatcgtccaataatagacactacatcatcgttaaccgtcacattaccgtgtgacattccgatgaacatcttcttataatcacgctcaatttcaataggtatatttccatttcggttatatactgtagttgaaccgttataagtgctaagaccattataactgaaaactagaagatgaataccatgcttaaatggaaatcttttccacttcttttggactttgtcttctgatagctgagtgatatcatagtttgcgctcatagaccacctctgaaatgttagtcacttcatcaatatgataccagtgattttctttagtaatgaatcctgattctggccaagtaggagctgctacaaattcagcaggtagagtgacatcagaattcactctatgactttttctgatggttgtttggataaccctatctgcatatggatatgccttctggatgattccggcaccacctatgatagaataattaaggtctctattaaaagtgatagtactgttgtaagaagtatgagcggccataatgtcaccacccaagaaaccgataaattctaattcacttacataagcatctgcaaagaagccatttttagcagttgccaacgcacgactcatgtcttggacaacgattgtcttacgaccaggaagaggtttaggaaaactcataaaagtctttgctccgcaaatcaagatagtatctcgagtacgattagcaaagtttttcatgtcctgggaaatatgtttccatggaagaccatcgcctaaaccgaaagcattttcgtttttgccgtctacagtttttgtaggagcaaatgcataaactatttgaatcatttaaacctcagcaaaatttagacatataaaaataatcctaatataatgccgctaataaaagcggcagtaacagaaattaacaaaactactaattcagcctcaatcatttcttggccttagcaagtttaaatgcttttttgaattcttcaacatcttcaacaggaatccagaagcctgagccatacccatcttcatagcatgggcagttatcacagtaatcattccaatagacagtttcaccacccatagtgaatggagcttccatctggcacagtacttcttcaacacgctctaattcttctgggtttttgtcgcaaatgcagaaattccatttaccacgatattcagaaccaagtttgatgctttgacgttgaagtttcatttttattctccagtagattatggagctatactatcacaagcatagctccttgtaaacaattattcttcaaaatcttccataaagtaatcaatgtcgtcccattccagagattcaagatatgcaataaccttttctctagaaccgcggaggtcaatatttggccaaccaccaccaggtccatgacgcataatcaagtcaaaatcaataccatggtcagtgtcataaaaacgtgtaccatctgcatactccaaatctacacaaataccgtctttgttgataataggagttgctacgatatcaatgtttaatttacccatgatgttttcctctactcgttttgtttcgatgtagatatagtatcactcatcaactggcttgtaaacaattttgtgaaatattttttggaggaataaagaaaaagggacccgaaggtccctttatattagaggtcgttcaaaatatcattcagatcgtcatcgccaacactgtcaccagcatcgcccatgatatcgtctgcggaacgagaagaggtcggtttggattcaaaatcagacaggtctttgtcaaaggaatccaggtcatcgccaattttatcggcttgagctgctgcttttgccgcggcaccaccaagagctgctgtacccataatctgtttaaatttggcttcgttaacttcaaacgatttaaactgagatggagcaacaatttcgctgaggtcagccatattttcggtcaggaatttctgagtttcttcatcattgatgtttgcaatctcggactgaccaaggaatttacattcatcatagttctggaaaccaccgactttcttaactttcatgacgaagtttgcaccttcatacacgcaagttacatcaaccggagtttcacccatatcaacatcaacttcaaccatcgcgttgattttgtccataattttctgaccgaaacggaatttgaatactttgccttcgttttctgggttagccgggtctttaataaccaggatgttagaccagaaagaggttttacgtttcagaagcttatattcagctgggttgctgttataagaatcgtttttactcagatgagcacaaaccgggcaagaatcaaaatcaccgtgggtagaagtacaattttcgatgtaccatttaccgccgtgtttgaaaccgtgattgatcagttttacaaacggtagagagttttcatctttaccaggcaggaagcgaattactgcttgaccattaccagcattatcggtcttcagtttccattcgtttttgtcttcgttagagaaagaagaaccacctttcagaccagccagttgttgttgaagttgagcaggatttttacgcttaaacatatgattacctttttaaatttaacagttgttgttgcaacatgggtccttgcaactggacgatagattaattatatactaatttctttacaagatttgattatgctaataaagagtttcttagcttcagcaccgtcaacgtttaaaagttttttataagcttttaatttagtggagtaattactccaaactaaattatccgttgcagtatcatgagtatttattatatctaaaaacgagtcaagcatgatgaatgtctcgaaagatataacgtttgactgaagaagtttgaacacataagatgttccgactttctcattatattcaaaaatatcatgaagcttatctacattaactttcttggcaaaatagtaaatgttctttacatcttccgagaacgttgttttaatctgcttcaatttacctatatattcacgataaaacacgagggcatcagcatcactgatatcgccaatccaagcatcttggttagctacgaggttactcatgaatatcagtgttaactcttttaatgtatatttctcagcgagtttctcaaagaaatatttgtctctacgcttttgataagctttatcagagacccgcataacccagttatacttaacaacgtcatatcgaccggcaaagtgttgtttgagcattaaatataaaagataaacgctcttaccgttaacgtatctgttattatttccaggcatgcggagacgaatcataataaaaaatccagactattcgttttatgtgtttgactaaatgatggtcgaagcatattttcttctaatgcttctgacataattttttctatgattgcaggtggaatatatctattgaagtttccctcaggaatagaattttcttctaaccactgagttgttgcttcaagataccccattccaagttctgttaccatagactcaatagtaaatccgttagcttgcttatctaacagctgattaatggattcagagggggatacctccccctcgtctttaagcgaaaatagagtcataagcttctaccacttcatctttttcagtttcaaaacgatcgcgtgtacctttatggaacagggcaagcagctgattaaataatttgccttctacaccaagctctttcttggcgcggtctttaatgtctttgttaagttcaagatagctttctgctttcaacttattacctgaggcttctttaatcatatctcgcagagcctgtccatgtaccgcttcatcaaatactacttgctctttttctttcttagccattatattcaccttaaaagttgttaatttctttcattaatttagacagaccggatttaacaaagtagctataaattttaccacgacccggtaattgatagttattataacaatctaaaatgttagcaacaatgtcttcgcggatgtaatcaaaatcgattaacacgcggttttccaagaaacgcttatactgttcttcagtaagcaaatctttaatgttttcgccagcatcaagacattcttcaacaaatgtcattttcgttgaaggagtacgctcaccatcaacatgggtgtaccaaaaatctgaacgaactttaatagaagctacgttatctttcttgtcacctttaataattttaaccatacaatctaaagcaggagaaccggttttagattttaccagtttcttctgcattggtgaccattgcttaacattaggatacttatgcaattgagtaaagtcaccatccgaagaaacaatcatgactggatggccttcgagactgaactttttggttaataccgcaatgctgtcatcagcttcagctttatcaatatcaatgacataataaggcatatactgcttaaattcatcaattacagtacgaagaccttcaaagtatccatcccagtcccaattggattcttcacgggctttagcacggttctttttatagtaatatgctacgtcccgacgccaatacccattaactgcgttatcaacgcagatgacaattttagtgtatccatctttcttccacttaaaagcattaaattttaaagtagaaagaataagatgacgaaccataggagttgttagtttgtcaccttctttatacgtatgaagaattgtcgccattgcaatttgtgacaagtcaattaaaatgacgccttcttttacttggtcttcttcggcgaataagcaatttaaatcagacatttgaacctcgttcaattagttagtacagccattataaatacttctataatgaagcataaccccataggagactctatgagcgatttactgaaacaacatttccgtgcaacgaacggcttggacgcaggcggaaataaagttataaatgtggcacttgctgaccgcaacgttaaaaccgacggcgtctccgtcgagtacgttattcaagaaaacactatccaaaaatatgacccgacacgtgggtatctcactgattttgctgtgacttatggacgtcgtatctggattgcaaataaagatattccaaagcctgctggagattttaaccaggcgaattggacttctttacgtgttgacccgaactggatttataccgtccgtaaaggagagtttgaaattcaatctggtcagttcatcaacgttgactctaacgctgcaggtaatgctacattactgcttccgttagcaccagatgaaggcgataccattgtagttcgtgatattggcgggcgtcctggctataacggaatcttaattaaagcacaagatactggtgcgtctatcgtatttggtgaatcgcgtctgcgtgaggtaagacttacacgtccgtattcacaaattatgcttacgtttagtaatggtgcatggcgtgcgagtttaacagattttggcgatactgccaagatggtagttccgaacgggattgttccgacgcaagttcaggcaggtgataacgtagttcgtcgttatacttccaactcagagatttttattactctgccgttgttcgctaattcaaacgatatcatcaattttactgaccttgacggtacatcgccaattaaccatatgactgtgcgtacgtttgacccaactatctcaattgggactcctgggcaaacagaggttcaagtacgtacttcaggcaccggatttttggtatatgactcgattgacaaaatctggcgtatttttgaaaatgatttacgcaccagagtaagaataattacttctgatgttactttaatgcctaatgagcatatttctgtatttggcacagataacaataccgttaaaacaattaacgttactttgcctacagacgtagctgttggggatactgtcacaatcgcaatgaattatatgcgcaaaggacagactgtagtaattaaagcttctggtggtgatactatcgctagcaatttgaatttactgcaatttccaaaacgttcagagtatccacctgatgcagcatgggtgcaatcaagctcaattacctttaacggaactacatcgtatgttcctgttcttgggcttgcatatattgaagataaagcatccggaaaaagctattggattgtaactgaatctgaccctaccgtagaacgagttgatgctaaagacaatacaactagagcccgattaggtgttattgctcttgctacgcaggctcaagctaatgcggagtcaaacccagaaaaagaattagcaattacgccagaaaccttaaatggacgtcgttctactgaaacccaaactggtatagcaagaattgcaacttccagcgaagttaatcagtcaacaactgcttcttacttggataatgtaatcgttactcctaaaaagcttaacgaaagagctgctactgaaactcgtagaggtttagcagagattgcgactaatgctaaaatggatgcaggaacagacgattttacaattgttactcctaagaagctgctttatcgtactacgtcggattcacggttaggtgttattcaattagtaaaaactggtggtgctcctaacacaactgctgatcgttcttctgctggcaccggtatattcgatcattctgattacaaaaatgcagttactccaaaaactcttcgtgagtataaagctactgtaaaccaatcaggaatagtctggttagcaactgatagcgaagttagaaacggaactcctgcttcttcaaatattcctacggttgttacaccagaatctttgcataaaaaagttgctactgatggagcaattggtttaatccaaatagctacacaaactgaagttaatgctggcggcgtgactaataaagcagttacacctaaaacattaaatgaccgtacagcaactaacaatcgtactggtattgctcgcttcgcgacacctggtgcccagggtgaatttgaagctggtacttcaagtacagtaatggtaaaccctaaattactgttcgataaatttgctaataccgatcgtatccaagttaatactagttctggcttaactattactgggaacctctgggaccattataccatcaacatacaggaagcaagtacttctcaaagaggtacaaccactcttgctactgctgctgaggttagaactggaaccgacgctaagaaaatagttactgctgccgcgttacatgctaaaacagcaaccgaaggagctatcggtcttgctcagtatgctacacaggcacaagttgatgcaggcacattaagtgatagaattgttcctcctgcttacttgaaacagactattcaggtaacagagtcatggcaagctacagacagcgttagagggaccgtgaggctatctacaggcgatggaacgtggaaaggtaatgataccaatggctcaactcttccggataacgggtatgcctctaagggcgtcgcagtgtctccgtatgaattgaaccttacactgaaacattacttgcctcgtctcggtaaagcctatgacacaggaatgttaggtggtcaaacaccagacaaatatgctcgtcgcgatatagcgcagactatttctggagcttggacatttagtcaggacacttcatttagcaataatatttctgtcaagaatgttatatatgctaatggtggtgaagttaaaatttctccaactgctgacactggaattgtgcatgttcgttttcaaaatagagacggaagcgagcgtggtataatttatgctgagcctcaaacagcttcagccggaaacttaaaagttcgcgtaaaaaacggaacaggaactactgctgcaagccagacctacacatttggcggtaacggtacgttagaagttcctaacgaagtgtcaactaaaactctgaggtcttctggaaatgcaatagttggcggaactgttatggttaaggacgttcagatgcttgctgtcgagggattgaattcaatattcggtgcccaatcacagtccgcatttattcgttcccgtgacgctgatacacaaatttttgcacaggattcaactggatcgtatccaattttaactaccaaaaactacgcaagattagctgatggccgttatgtcaagaaagctggtgataccatgaccggcaatcttaacataaatagttctgctatcgtcattacgggttctgaatcctggtatgtgccaacgaatgaaactgtaataagacaaggttcttggactgctgaaatcaaagacgctactaaattgaaaggtcttcgtggttatatggttccaatcagaacaccgattgaccctggtaacccaagcactttagtagtgactgggtatgaagaaaaaactgcagctggtggtgttttaactcaggttggtgtaactacaaacaatacttatcagctttggacgccttatcctccgacaaccgaaactgctgataagcgtttcgcgcatactgtgtggatgaggatttataatccaaaccttaataagtttgatgattggatgcgagtatttacatctgctactcctccaactgcagctgatatcggagctccgagctcagtatcaactcaggttaaaacccttgaagttttggaatggattaagcttggtccagttaaaatctggccagaccgtccaaatcaaactctcaaatttgaatgggtaggtgattaatggctgaaccaattttaatggcagccttcggcgaggatttcgtggaaacacgaatcctctctgaggcaaactctgtgaagtattggctaaaagcttatgctacgcattctaatgctgttccgaataagccagaattgaatattaacggtgcctttgatatgacctcctccttacggagggggattaatgttgttcaagttaatggtgacaggtttattaactttaaaacatttgacgttaccactgatgataacaacgctaataacaaagcgtttgtagaatatgcaaatggattaacttcgggattgtatattataatgacacatgaacgatttcaatccagcccgctaatagacaggtggtttaaaaataagtggtctgcttcttggccaggttctgatttttccaaatcatttccaaactctgcttatgtaggagtgctcggagcagcaaaaggacgcatattaattgagtcattttacggaaatgatggaaaggttaaagaagattccagagctaaagtcgatactgtatatgataacgttggcgatgtaggatatacaggctgcccttatcgttccattgaagacactaatgagtactcggattctactggatatgaatataagcgatatccagttcaaaatgaatctataagcaaaatagctgattatggactatctcctggggattctgtatttttagtatgtgatatgtatgcatctaaaagtcttcttgatgctggttctactactagagctagcctgcgatggttcaaaggctcatctttattatcttcaaacgtatcattagaagttccaaaaaatggagctgatagatggttaagatttgaaagatttaccgctgttcctacagacgctgatggatttactattgtggtatcaagatatccaaaaacgtctgtagttggtgactctaaaatcaaaaaccttgtatttgttcaaacctctcatagcgaaaaactgaatagtgttgttcaagaatttggtgtgaatggtataagaatgaataaaggcgttgaaggaggaaccactatgattatggaacttccaaattcaaaagtcgatccgagcggtgttattccagttcaatcgttcagagaaacatcagactaaggaagccttcgggcttccttttttcgtataaatagaaaatatataagaggataaactatggccgatttaaaagcaggttcaacagttggcggaaatcctatttggcacgcgggtacttttcctcttgtgccggcaggaaactccctaacttatagaggtaagaaggtttatactgagatagataaacctcaagcaaatgataacgacttcgtgtccaaatcccgtggtggtacgtatacaggcgaagtaaaaatagcatatggcgactctggcaagttaagcatgggtccgttggcaaatgttggtattagagtcggtggtagtaatggtgaagttcttatcatcggagggaattcaaaaattcaattgcgcggcggcggaacggaagattccagcggcatagttgaaattgctaaaaatggtaacttaactgcacagactggtagaattaccgctaacgtatttacttctaaacaacagccatctggcgtagacgatttaactcgtaaagattatgttgatggacgaataaatactgttagcaacgtagctaacgcagcagtcaagaaagctggtgataccatgaccggtgtacttagggctaacgctggcgtagttatagtaaataaagcaacatccggtgaatatgctcctagattagatcaggttatttcacgcggggtaacaatagattttggcacatactaagaggtagccatggccgatcaaaacttaaaacaaatacaatttaaaagaactagcacagagaataaagcaccaggtgcagatatcgtagcccgtggcgaaatcgcgttgaatacccatgggcgtactctcgctatctacaccaaagatgaagccgataacgttgttcagcttgcaggtaaaggtgttcctttcttagatactgcaggtaatcttaatgttgatggaactactacgttaaaagacaatgtaaccatttctccgaataaagcgatcaattttgaagcttctgatttaagtggagcattagtacgtcatatcaccggtaagtgtgctaataacgatggctggtacattggagctggtggcgcatctgaccagggatttcttgaaatcggtacgtatgataacggaaatgaacctatctattttgttcaaagaactggtggatcggcgcaagctgaagttcgtcgtttagcattattagatgggtttggcgatacctctatacctggggaccttcgtttaactaataaaacggtaaaaatttcaaacggaagcactcttactttggaaatgggtgtaggcgctaatgacgcgtacattaaaaacctgagaggaaccggtgttcttcaattaactaatgacagcaatttaacgttcagaaattcccaggtttattatgccatgaacggaagaggtcctggtaaatccggtactcttctgacgaatgtagaaaacaatcgtcaagcctggcaatatactatttctgctgcaactgctggaactccacgttgggttaaagtagctacaattaaacacccaggagatgcgtcttcacagttagatttaatgattactggtggcattgattctgggcacggaagacattatgttgattttatcacgttatcaggacgaaatttaacatcttggagcactaacaatttagataactgggttgaatggcgtcgagttggttctcctgataaaggaaagattccagagtattacgttgttaaaaatgatgctgctacagattcagaggcttcatttgatttttacgctaaagttcctcgatacggcaatgggctttatgttacagtgctaaacactgctggatacaacggccaagatagcggtaaagtaattatctatgaaaccaaccaagacactggtggatatggaccagctggaagtattcttgtttcaatgaaacagatttttgacagttacgcaaaaccagatttcggcgatactacgggtactcttccagttaaccgtggtggtacaggtgctactagcgcaggagcagctcgtaataacttaggtcttggtactgctgctgttcgcgacgttggtgaatctaacggaaacgtgatggaagttggtgcttatggcttaggcggtaatggcggtaaatcaatcgaaaacattacctctaatgctgatatgttgacccgtttaaaagcatatggtggtactttctggcgtggtgttactaaatctggtgttagtgttcaaaatggtctttatagccatggctccggtatttttatgaatgctggcgataccatgtcagctattaatatcgactacgccagcgctaaagttcgcgtatacgcagctaacgacagaagtcttgctgagggaaatgttagatacaacgaactttatggtacagcaaataagccatctaaggctgatgtcggacttggtaatctgacaaacgatacccaagttaagaaagctggcgacaccatgaccggtgatttagctgcacctaatttacatgcttccggcaccggtactgcatcagtgtatgttaatgcaggaagcggaaatgctcatgtatggtttagaacaaacgccaatgaacgcggtgtaatttgggcaactccaaatacagcggatttaggacaaattaatattcgcgcaaaaactactggaggtgtttctgctggtgattttagcttccgttctgacggtcgatttgatgttcctgtagcagttaaagtcggtggagcagcaatgctgactaaagacgggaatattacctctggttcgatgtttggtggtaaccttaacaactatttgacttccattaaaaacgacatcactgctggcgataataagcaagtaagtaaaactggcgacacaatgaccggtaacttgactattaacgctaacttaaaagtcgaaaaccctaatggaacaatggctgattttggttcagagaattcggataagtatagcagaataactcttgctcgcaaagttggtagcggtgctgccgtagcaatgcttaaagttactcctgaaggacacgtgcaatttggttatcaaactgcagtttctactccagctcctagtaaatatattctagttaaatccagcggtcttgaggtagaaggggatttagtttttaatcagacatatagcggcgctgaagaggcagttgatatttccgataagactatcgaccttaatagtctgattattagacgatcagatttaggtactcgtcagttatataaatgcgtatcttctggcggtggttctaagataacaaacaaacctacatctgatggtaactttgttcttgaagttctgtctttacgcaaggtttctgataccgattggtcatgtaagcagacctttactacaaagaacggcggtgttgaaggcacatatatccgctacggacaaaatggttcatggtctgcatggaaagaagttgtttctggtgttcagccaattaatttaggtggtactggagcaacttctgcagcttctgctcgtaacaacctcggtgttggtgaaggacaaactgtaaaattcggtaatttagttacaaccgatttaaccgcaaacggaaacgctagattagtcggaagactgaaccttggttctacttccgcaaccggtgtattacgggctaatgaatctggcgcagttgttttaggttcttctagtggtcaaaacatccacatcagagcaggaagcccagatacttcttctggtgaaacccgctttgagccaaatggaaacgttttagttggcggagttctgacgtcttcaggaagcttacaagtaaatggcgaagctgcgatgagcagaagcttgatcgtttctcaaaacataaagaatactaacgataacagttttattctgatggggaaagattctgatttaggtttcgttaaaaaatctaactcaggcgctaagctggtatttgcttcaggaaaatcatttgttgttgctaaatcatcagcaactgccatagctaatccagcttcggaaacttacactgatgtgtttaaagttgacgcagatggaaaccaaacagtttatggaaactcagcagtttctagagctttgactgtatcaagtacagcaactattaatggggttattaatgccaacggcggtattattgttcctactaccaagtatgtgcaaattgccgatgctcctacacagaataaccaagctgccaacaagaaatatgttgatgataaggttgcttctgctattagtaacgctggcgatacttatcttccattagccggtggtactgtaactggtaaccttgacgtaactggcaccagattaaaaacatggcagttagaagttgatggcaaaagtactctaagaggcgggttagatgttagtagcagtcttaaagtttctagcggaaacttagtcgccgctgacacaaccaatgctggtggtctttttgctaaaaacggtaatgtttactgtgatgcaggttcagctggtacaaactctaactactggttccgtgattctgctggaaatgtcagaggtgttatttggtcaaatggtcaaaacggtgacatgattatccgtaaccaaagtggccgagagcttgtattcagaaatgatggatatctgcaattagcccacttagcaccaggaaacacagataatgcaaacaccgtaaatggaatacgtttacagcgcggtgatacgattttcgatagctttaacgcatggcagtcgggtgaatatgttcgcgctggatggcatttctataacgccgctggagttgaccagtggttagcacttacagatactggtgtaaaaatctggggtagtgctgctaatctacgcgttgaaggtgttggtaatttctgggacgttgaaattcgttctgaccgtcgtgtgaaatcaaatattgctaagattgataacgctcttgataaagtgtcgaagctatctggtaatgtttatgatttacagcttccaaatggtgatactaaaccatcggctggccttatcgcacaagaagtgcaggaagttcttcctgaagcagttacaactgataacgataaagatgcattacttcgtttaaactataatgcagtaattgcgttattagtcgaatctgttaaagagcttaaagcagaaattgaagaacttaaatctaaataatgttatggggcttcggccccatctttgaggagatatcatggcagtaacaggtcctaatgtaggaagctcagctaaggctgtaacaggagaatcttcaatgattgcagctggagcaaaattaaggctgggaacacccttttggatgtccaacatgataggaagaaacgtttggaatgctagtataactatttcaggtaacaaccctgcgacaggacctaaggttcgtggcgcttggaatgataagaacagtgcttcgtggaacgtattacttgattctcgtgggtccttatcaggtatatgggaaacaggctttaatttggttgtttttgggctagcagagcctagtaaatgggacggttataatgatgccatcgttttagaaggcagtgggaattttaatgtaaattggcgcgttgatattgaagatggaagtcagttccattttaacagctctagagattatagaggaagacgatgctataattgtacagacccaaatgctttttggaattggctttacgccaatgatggacgaactttccaactgtcgtttacagcatattaagcatatgctagagcaataaatagctctgtaaggagagcaatatggcaagcaaacaatcaataccgttttttgatatgtttcttgggttgctcgagctattattcaaagatggagccacgggaagagttctcttttcccgtgttttcgttgtcgtacttttagcactattggcgtttgctggatataagtctgatagtcttattacagcttacgtcgacagtacttatgacaagtatgataaactggttcaaaaggatagagattcccgatttgataatacagcactcgaacaactccagatagtacatatctcaagcggtgcagacttttctgcggtctttacgttcagacctaaaaacttgaactacttcgtagacttaattgcttatgaggggactttacctagcacggtagattctaaaaacttgggaggatatccaatcgacaaaacaactgctgaatatagcacgcatttatcgggtagatatttttggacggataaggaatttgttttcttaccaacaaaaagaaaaccgcctgaaatatcgtatatgtttagctgtccgtatttcaatttagacaatgtttatgctggaactgttgaaatgtactggtacaattccaaacctgcattatctaacgaaagactaacatcgatatgtggtcaggcggttagagctcttggaagagctaagtgattacttattactatgcatagccattgttcgatagatagactcaaatccctcgttgtattcttcaacgagaattctcttctcttcgtcagttaactcagaaaccattttacgaaagttgctctgatttaactgacgcccctgctcattcttgattccaatttcattcaagaacgcaataaattcatctcgcttctccatgatatgttcagcattgaacttggtcagaatagaagcaacagtaacaatttcttggacaatttcaaacttagtcattatttttcctacaacataatggattatgtgattatagtatcatcttgataccgcgttgtaaaccagtttatgccaattcccaacgagaattcaaatcttccttggtagtgatatactcagcaccagaggacatccagagcccgtagcgaccatcttttactctagccgttaaataccattcctttccaattggacgaaccctacgattcatccagtgacatacgtcaattgcctcttgaaaggacaagtcaatcagacttccaagcgcgattttattcattaacgcttcaagatatctttgtgattcaacgacagattctaggttatgactcatgctaaaaccacctctccgcgattacctaaaatgctttcgatatactcaactccacttataatgtcacctctatcctttgctttaatagtaataattccatacgtgtggaaatctgctgatagactaaacggtttagaagtttcctgagtaaacgtaaacattactgcttgctctaaatgttttacttctaagtcattagcccaagagttaagaactttaagcctaacttgtaaggtgtattctactttaattgctgaaagcaattcaacgcgtttatgatatgccttggcttcatcttctctgcgtaaagtttcagtattcatagataatctccaatatcataagcatcaacgcatttctgaaattgttcaataacttcttcaggttcaacattagcgataatagctacagtaaaggtaccattattccaatcgtgtaccatccagtctccatagccagcattctgtaggtcttccattagttcagaatggatatcttctactaatccggaatggtcccctaatttcttatggagagcttctaggtcatcacaaataatggttaaagtagtacatttggaattattcagaatgcgcattttctttgcctttatgcttttgcttacgcttagattcctttgcggaacgctttttatctttgtgtgctccgcctttattaaaatcatgtttagctactagattttgcactttcaatttccttgatgtaatagtcaatatctttaatcatttcttctgtcattactttgtacatttcagcaagaaacggtttagcgccgccattaaatggatgactaaacggacagatgtattctttatccatgagagttttcatgaatttgctatctgccattttaaacccggcttcattggtatatgtaccccaattatcgtccatcatttctaacgaacgctgaagcgatttacgctgaatttttaaaagcgtaatgttattctttaatgtactaatcattagtataaatcctctgagaataattcattggcgggtcctgatttaggacgaactgtattaacttggcctgcatgtgtagcgatgattaatgcttcttcgcgtgtgaagtactcaccccactggtcaacaaatccttgattgtctccatggacatggtcagaaactaatttgtcacggaacatatctagaacgttcgccatatcaacagaataatggcgagtgcctggaactacaattgttccaccagttttcaattcaaaacgatttgctgcacaaacgatacgacgttgaagtaatcgtccatcccaccaatcagctactttaaaacagatttcaggaatactaacttcttctggctcattaattagagtaccgtgacgagaagcatcaacaaatttattcatttgttcggaaaacttgctcatttaaagaatcctttaattttctgccataaacttttcttttcacgaataccaatctgacgaataacaggttcaccctgcattttctctaaccattccattgagttaacagcttccgccattggaacaaatttagcaagggccttttggtagttatctacatccatgatatgtttaccatctgcattgtagatagcatagcattttgtgaatttcttatcaatgtatccgataaagtgcccacggaaccatacatcccaacaatcagttgggatattagcattcaagttaactttttctacacaacgctgaagttcattcaatactttaaacttgttcattacagttccttaatagagcggatgatggtttcaatgttttcagcagtacgagcgatatctaagtaagtattgcctgttgcagctacacggcaagacattccgaggttagtgaagtgtttctgatgctcttcagaaatcttgtaaccgaagatacggaaagtacctttgttgttaacttcaagactacgaataccgaatgtgcgtttttccagaactgcgatatagttactacggtaaacagtaagttctttcagaggtaagatatcttccatctcaccgagaagtttcatcatcaggtctttgtgctcattcatatcttcagtcagaggacgagctttacgagtattgcgtttcttaagaagttcaggcttgttctcttctgcatagataactgccgctttagagatgatgtcctgtgcttcaccagtgatgattaaaccgtcaccagatttctcgatgagacctttcttaatcagaacaccgatgtttgagttaacagaacctgcgttcatggtttcttcaaggatttcacgcagttcagcagaagtgatgaaatcctttttagctacctgaaccaagatagcagcagttttttcgttcagagcatcttcggaagctttgatgatgtaagttactttagacattgtgattctccattctgttttgttcaatttgtttggtatgagactataataacatctgctaaccagcttgtaaacaactttgtgaaaataatttggggcattctaaggagggattttggagggatatagatttatatggaaggacctggagatgacctccaggttccctagattaactgaggagcaataaaactagacctaatactgcaattacagaacctataattaaataaaattctatcatagttcttccaggtctttcagatactcagcctcaggagttgtcttttcccagtacttaacctcttgggcaagacgttttgcttcctgagcgagtttctttgcttcatcatcagtgatgtgatagatgttcattgaaacaagtttttcagaatgttctttgaatagttcattctgttcaatttctttagtcaactgcttacgagttttgccttggataacgatgttacctgcgataacctctttgataaattgagcttttgcctgagcaagattaaatgcctgcttagtttcagcgattttatgctcgattcgtttggcagtgaatgtcttacggacttctacgaaatgacgaattaactcaccggaagttttgaacttatcgttcagcttaccattctcatcgatgaccacaatgtattgactcattttctcaatgagtttaaaatccttcatgattttagcatgacgctgctcagggtcttcgcttaaagcatagtctttacggaatttcaccttaaagccaaaaccagtcttagaacagtcatcatcataagtgatgtatcctgcatcttccagaggatcgagtactttctctacataagaagcacgctcaaacttgtatggaatttcgcttatatagattgagttccgtgaagtttctttatacacgccgtgcagctcaacagaaccgtcttctgtttgaacgatttttccgttaaatttaggaaactgtacttcaggttccatcatttcgccacgaagtgctgctttagtgcattccaaaacagattcaaaactatgcggaagaatagaagttgaatatcctgttgcaataccacgaacgccattcagaagaacagtcggaattaccggcagataatatgctggcggaacatgttctttatctttatgtgctggagcgatttctgtatctttgtagattttacggaagttgtcagaaatccggcagaaaatataacgacttgccgcagcagattgaaccagacgcgaaccgaagttgccttgcccatctaacagaggatagttgttattccatgtgtttgccatcaatgcaccagcatcttgggcagacgtttcaccatgatgatatcctaaatcagctacaccaccggcgacagacgcaagcttatggaatttttctttattaccgcgagctaaatcaagagcccgagcaataacaaaccgttgtacaggtttaaacccatcaatcaagttcggaatagcacggttttctacagtgtaaatcgcatactcttttgcttcattatcaatgatagatttcaaatcgcgatgacgaagatttgatgccttagccaaatcatcgatagaacctgcttgttttaatagagtgtcaaaaatatccattgtacctaccaaattagtgagccgatttgtactataacatcggaaatgaaaagcacaatataaatcattccgtaaatcattccatagtacaaaaccaaaagaatgatggaaataactacagcagaaactaggagtttcttaatcatttgtaaactcctgcaattttacaaatgcgctcaaacataataaatgctgcggtgaacgcaatgcttccaattactttagtggtaggcacgaggccataccacatgaatgttcctgagcaaatcattagggccatcagaaacacatagcccatcacgaagaaggttctcattagtatttctgcaaagtaaagatgaagttatcattcagaatacgattcagctcagagtaggtctgcgcgtcacttgaatgctgacgagtaaacgccaatgcaagctgacctttgccataaccagtggtgagtggtttcattttattagcaggaatccagaacacaccgtaggtcatgcaattcgagcgcagagtacgacccaactgagaacgtccagaacggatatgagaaagaacactttcaaatcctgcctttgaacgctgtttagctacaaagaaacgagcagatgcaccaatataacctgctttgccatcattgaacatcaaaaaataaaatccttcgcgctcagtaatttcacgagatggagcacctgctgcccaatcaccgttacgaatagaaccgatcagttctgcgccagcgttatcgagatcagcaaaagtcataatattacgcatgttaatttcctcagttgattaaagtttattctccgataaggggccgaagccccttctactaccaaaaatatactactgccgttacaccaccaacccaaaacacaagaagacctaaagcaagcagacgatacacgatgtgtcgtttcatttttgaccttcccatacggtttctactaaggatttaaggccatcagtttgaataatatcaatcgcattaatggcaaaataaattccgaatccgaacacggtgacaatccccagtgctaccgcaacaataacagacagaacaacagttctcattaagttaaagcgacgatcaaaactattacgaatcattatattttcctcagatgaaagcattaatccaaacgttaactaaatcccatgcgaaaacaccaatgaaagtaacgataaggcagaatactacaaagatgttcttcagaatcgtaagtaactttttcattttgttctccagtttagctaacaagattatagtatcaccgaagaacaggaaagtaaaccgttaaatgcacaaattacgaattttttcttccagagctttgactttatctatgtgttcatcgcgagctgcagcggctccattgggatacaatccgccgtaagttgaatcgccattatcacaagcaatgatagtataatgccaattcatagattcgagaatcctatactctttcaaaagttcagctttaatagaagcatttccgcgtttagctcgaagcgattttagttctaagtaactcatgttttactcccgttcagtttgtaaggccatagtatcatggccaatcccggaagtaaacaactttttaaaatttgtgcatgatatacccgccagcaccaactcgtgaaggttttactacttccatgaggtgttcgataccgccactgaacatcggtgtgtaccgtatgacattctgggacacttcttctgcaacgaatataattatacagtctgcaactttatgtttaaacatgggccctagatttattccacttccatctgggaatggaccgtctttaccagttgtaacattaatccatggcttatgatttgctcggtcatgaacaaagtgtgttttaacttcaactctaacaccttggtagtagggatgagctaatacgtcccaggcccattcatacggatcgttgttattatggtcaacaacttgatcgtttacgtatccatcaagaaaatccgctaccacatactctgccggtatagcaattctacatcttttaagaacatcaattctgtcttgagatgggtcgatatctaaactatatcttgcagtatcaatgatttttacttttgcttcaccccttagcttattcaaatctagggtaaatgtccgcaactggttcaatctctgcagggctttgttcatcaatgccataaattcctctgatatgtaattcaccaaaataaacacgatcgtcgtggttacaagtgtctggttccacaacaaaatcatcaccaagttctacaagttcatcacagtgcaaccaagcatagtgaacatcaccttcatgtttaactacatgatgacaaaacactgtagcagcatgatgagtaccacgaagattaacaactttagaatgagatacattaaatggattaatcatgtttcacccataataaaagaggagcccgaaggctccttataattagcgaagttctgaaccccaacgatcagttacatcttctaatactacataaccacatgtacgcattttagcatcgttgtaatcaaccgggatagatactacatcacgcggatgaactttaactgaaacaatacggtcagaaccactaccgaagtgaccgatgtaagatttagagcagacatgcagacctgcggaacaagtacgctgatcgtcttcatctacctggttacgcggcattgtaacagttttaccaggagagttatcaaacgtgtttgaagcacagtccatataagtggaacgaactactttccaaccaatgaagtgaccatcatcagtgatgtcgatatcgtttgcattcaggaaatcaaacagacgataaactgcacgacgagacgggttcagcatcaggttttccaggaaaggcagataacgtttaaagtcttcgccatcttccatagctcgaacgatacgctcagtcagaccagatttcagctcgatatctttatagaacaaagtgccatcttcaattcggacgttaccctgaacgaatttcttgatgccttgttccaggttaatgtggtcaatagcaccagcgatatcaccatctacaagtttctgcagcgcagatttaaacccaggatgttggctatcagcgttataagtagtacggccttcagtaattgaaatgaatttggaacttgctgcccatttaaattcacgctcaactggagcttctactttagcaggaacagctgccgcggcagctcgagcttcacgctctttaaacacacgccgaatagtgtcacgggaaacaccataattctcggcgagctctttcttagtgtacagaccgtttttgaagtttttaacgattgcatctttttggatttcagacagacaggtaacagccatttattcacctttattttcagaattttgagtagaagctccgtcaaggagctccatgatttttacaatatcatcgacgagtttgctgtcagtccgccaagtatccaagacacttgcgatgacaggataatcatctttaaactgttcaatctttttatagaagattgtctcagcatcaccagacagtttattataaattttattacataaagctaaatcatcgttttcatctttaattttacttgtacgacaaaccttagcgattttgtttaattttgtcaggaacggatttttcattccagacgcagtaaacttactcgacaagaaattcaatttatcgtaatgcgcaatatttccacagatacgatttccagtagcatttgatggcatgtactggtcataatctaccttatcaatacacttgatgtattggtcaataataaaccggtcaaatgaaagcaatccatcagcttttgccgcggctttcatagcacccggacgaattgcatagaatttcttaattccacacgcttctgccagagaccgcatgctcgcgatattcatattccaccaccaaacattatctgggaaagtgtggatttcatcacgattgcgaccgattgcataaccttcaagctcagcaatttcagatgatactaaagtctgacggtcttcttcccaatacccgtctttatcaatccaatgcagagaaacattaggagatttcggacgtttctcttttggaccagtatcataatcaggaagagcttttctctgggcttcaagttcagacacacggaatactacaacttcatcagtatccatgattttcttcagctcatcaatgacatgcaattcatcttcattgtctttgattacggtaatgtgtgcccagattggaactaacccagatttacacagagcacgaaccgtagcaatacgcttacccgctttatcgtcaataagaacaaacgctttagttctatcaaccccgcaaatatcagaaatgtttacttggttatgacgatgccaagaactgcttgacactttacgacgagcaggttcatcgcatgaaacataaactgatacttcgttatctacataatatgaacgaattttatcaagattatacttcgcaactacttgtttaatatcgcggttcccaatggtaataccacggctctgaagaatagaacgttccttagaactcagcttattgaactcacgcaagaattcacggtcagattcatacgcttcaaacgctttaatatctgcggtaattacctcttcttcaagagcattcacacgcttctggatattagcaattgtttcttcgtcaagagaaagctcttcacgagatggagtaatgtctaattcgccaagagggaaatgaacataaaccttgccataacgattaagcagccaatctgccttaacatctacaccgctaatcggatatacgatttttccataaactgcatacagaccataactttcgtaagagctattaacgctgaaccagtcggtcttatctaccgggaaatattcaatttcgcgacgaagagaatctaccttcggaggaacagcaccaaacgtacgcaaaatatatgcgatttcatagtgccaggtatcaatatcttctactttaaccggaactgtaatttcaagaccagtttcttcgtcttctttcatatcatcgacaaacatcggacgaatagtaggttcacctcggtttttcatgacagtataacctgtagctttaccatcatgataagacactacgttaaatgtactcgtatagcttaatggtgatttagaaccaagaccaagagcaccgatgaaatcattactattattctttgtggattcaaagaacgttttgtacatcgtcatcatgtcattatgattaagacctggaccataatcacgaattacaaatcgtgggtcaagacgagttggtgctttgatgtaaaatggacgattttcattaccattcagtttatgagcatcatcgcagttagtagaaagttcacgaacaacagcacgaactttatacttatagagtttgtttgacaagatgtcaaaagctttacccgaggccttaatagtaaacgttgaatcatcagcgtcagaagaaccaatgattacttcatcatcacatttaattttcattttattcctatcaattatgtcgtttaatgatttctgctacttcaaggagctcttcagcagtagcggtgttagttgtaaaaattttattatggatttctttgaagcgttctttgaattcctcagctgcttggatgtcaaagaaccgctggatgatacgatattcacgatatatagcatcgttgaataattcttctgatgggatgtaactgcgtttcataatattttcctcagtgatttagggaaattatatcactataactttaagcaagaatcctagaatcatctccaagcacttcttgattaaagccatataaatccattcttataaagaaaaagggacccggaggtcccttagattaccacaccctactaactcgaccataaacctcatgtttagaaccatcaatgttttccacccagatagtaacccaagttccgggcagaggtttcttttcagcgaacagatatccatagtcgcctgagatcaaagtaatccaataacgttgcatgttaattccttctaagtaagggcaatagtacccttactatttattctttattcactcatccatgtcttacgtggtgcagcatcattacccataattaattcaaacagttctttccagttttcaggaagagtgactacatcataaaccgggtcttgaataacacgttcgtattcatcttcttcaagagaaccaagacctttaatataacgaagtttccaacctttgaaatcatctttatggtcttcatattcaccaagagaatagaaccaacgttgttctttacctttggtgagaataataaccggagttttcacaaagcggattctaccctgttcaaacagttcaggccaattactgaaaaacgctaaaagacttgggaaaattgaaccaacaccatcaacgtctgcatcagtcatgatggcaatatttcgatagttagtattttcagcgggttcaccgatagtcaaaccagtgattgcacaaatgtcaaatacttccttgttcttcatagcatctgcagcagacattccccatgtattcatgaacttaccacgtagaggatatccgccatgaagttcacggtcacgagttgtgagcagataaccaatcgcagaatcaccctcggttaagaataaagtggtgtcagcatctttgccatatttgttggctttgatgtgcttagctactttagctttctgcgctttcttggcagctttagtttctgcagctttctctgcagcaagtttacgagctaacatcgcctcaataatcggcatatgaatatcttcggatttcataatagcgttagcaagtttcttataatcaatatcaatatggctacgaatttctccccaaggagaagtcagacgctctttagtctgagaatcaaatcgcatgttagacatatcacgaataaacatgatgacagtcagacattctttaattcgcgctttattaacttctagtttgtacttacgctttaatgctggaataagttcattgctcagttcatcaagaactaggtcaacgtgagtaccaccgtttttggtgtgaatgttattaacatatgaaagttgacggaacccgtcatccgaacgaccaatggcaatagcacaagtatcagaatcctgcactacagcattttcgtcatacatgtgggcgtaagctttaaacttgccttgaacccgtttacccatgaatttaaattcaatatcaggataaactactgctaacgtcatcagacgatcgtgaatgattgattggtcaacatcagttaagccatcagattcaaagtgggtgaaatctgggataaatgacacgacagtaccagtcttgtctttaataaattctttatctttagctggatgttcttcccaagaaacattctctgcgccatttgaacagcggacaacgatttcattttttccatcacaggttgcacccacaaatgtcacagaaaaaatattcgttaacgcagaaccaacaccgttcataccaccggttttacgctcagcatcatcaccaaagttaccacccgcacgaggacgagtccatgcagctactggtcctggaatagtttctccttcaggtgttactacaggagcctgcggaagaccacgaccattatctgttacaataattttgttgcctttgacatcaactgaaatcttattcgcgtgtttgaaattagtacgaatagcttcatcaacagagttatcaatgatttcatcaatcagtttgataataccaggaacatactttactgattggaatttaccaaaaagaaaacggtcatgcgcttcaaacgcagaactaccaatgtacattccgctacgcttaatgatatgttctcggtcactcagaattttaatttcgttcttaatcattacatttcctcggttagtgaaggaattatatcaactattaattatagcaagtaattcttctttgatatacatcaatttaccaagaacctcatggcctcctttaaccgctttatactcgggatatcgtggccgctgtcgttcaaacatagtccattgagcatcactaacgttagcgtatgcatatcgagaatttccgtagtactgttcaatccggtactcgttgttttcattaagtgaaatccactcttcacagacttcataatatttctgcatccaaatagtacgaccattcacgtcattaattggccaccaagcaaacctgtattttccaatagcccgctctaccatttttaactgtcgtttagcacgcctttgcgcagttgtcattccaataatcataatattctcctctggccaacaagactataataccaaaacacggtgtccatgtaaacaactaaatgacccgaaggtcatttattcataacgaattgtgctgttcttaagaaaaagccctgagcacactgttccgttaacaggttttcctgttggcccaatagccgtaaagcctgtgtgctgaaaatcatcctctgagcaagaaaagaacttatatccagtgattttgatatcagtaaatcccgcgttatctaacacgcgagttgcgttatcagcgtcagtgcatccaatcatcatgaaggcaagcgctgtaattaaaatctttttcattttaatttaaccctataagttatattacctactttaataacccggatttctccgggtttcatggtaatgcgtgctttagttcccatcaataatcaccactctttaatccatcgtagtgaactgccggagcagaaaccacccgcttcatttgaccttcacacttagggttaaagcagttaacagtatagtcacgatgggaaattttacgcataatttctatcttttttccacagacttcacacttgtaatcatacattggcattaacagcatccttccatttttgtgttttgaccatgatttgctcattcagtgcacgagtaaccatcatggagatttcatcatctgatacatgggtatcatttttatggcgatttctgaaatgcagccaaagtgcatccactacacagttaataacatctgcgcactcgccttcaaattcttctttctgccgccatggacgattaatccaatcacacatttctccagtttctgaagaaagttgcagcatgacattcccaatgctacggttgggaataggataagataattttgatgcttcaaaaataggagctaaatttaacattgatatgcactctgcagtgctgcaatagcagcgattgcttgaccacgattatgaatagaaagattcataaccaaatcggttggaattacattcgcggaagttccaacttcagtaaagtatttgaattcgctatcaaaaattacaaggtcttcaccaccaacttcatcacattctgtgccattagcccacgtaattccggatactctgttattttggtggtcaactttagtaacagtaaaactcccgccattttcatggagttcatacacaaagtcttcattaaactcataacgtgaagaaaattcttcttccgcttcatcattgacgaatttgtactgtacgccttctttaaaattcattacacaatctccatgtattctgggccatcaactgtgattacacgagcaaaggtacgaactgggacgatatcaccatggttcgcgaatacatacaaccaggtccaatgctcttctttaccgaaggttttctctttctgaacgacaattaagtcaggattgaacagaatgtcttcaaaagcttcggcagtaatttttacggtgttttcagttttcatgttattctcctcagtagttgataagataatagtaccacatccttgtggcaaagtaaacaactttttatactaaaccttgacgctgtgattccgtcggctctacatcggctttaggcagaaccgcatagttaccttgaaatactacatttactaaagttttaccgtcttcttcccactcatcagtgacaagaacatttttatgcagcgacagattagtggctgaattagtagaactcaccgattgggtaataacattgtccagcgaattcacgtgtacccacttgcgcagatagctttcactagattcaacgaattttttcaagcagtggatgtaatcaccaaaatcttcacggtaaatcttatacccagatttaccgtcattacgattaactactttaacgattacaccattgtgaccaacccacttaccaccaattactttaacgttttcacctacaactaaacctttcatcgtgtttctctcagtttgttaatgtagagccattatataacggctctttcataaagtaaatagttatcggtgagaaatttcacacccaacatctactccgaacatataccctgcatcccagcccttagccatcaaagccttggccaccagaaccatcgttggagagatttccgggaggatttcccggttgaaccactcttcgaagttttcatcgaactcaaactcttccattagccacgccccttaggtaaactcagtggatcggtatcttctggacttggtgcttcgcttaggcctagagcataacgttgagcatatttaagcattagaatatccttagcgcagtcatggatactatcatgcgcgataaacccgtcgagcgtaccctttggaagaggggtagttgtcagaccacgagtcagaagcagtgattcaatcgcggtacgaatatcacgctgattccagaacttacacggctcttctttaaatgtatcaatttcttcttcggaaattccttgggctcgttgaacatcgcgaagacaatcaacaaaaatcggaaagtcaaagctctgtccacgacaccagccaaaggaatcccatgggtgaattccattatcaatcagatattgctgagcttctttaattccagcaattactgataaatcgtctggcgttgaggccaggttagcccgagcttcagctgattgtttcttccaccactcaagagtagacttaccaaacaaccgatgacctttctgggatttaaggtcaaacttaatacgatgaccacgtttaaccaattcatcgaagctttccaaaacttcggggtcagaatcaaaggtgattagagcaaggtcaatcacagaagagcttgacacatttccgaatgtttcaaaatcaataataaagtctttagccattttgagcctctagcataaatttaatttcgcgtaactggcaaccaatatattcgctcagatacacctttgggtcatatcctgtgaaccaagtaatagcattagcattatctgctatatcacgaagctcattcagaactgtatcaattttaatgttaatagcacgcttaacattgtctggtgcttcaaacttagattcttgtaagccaacaatcattgtttgaaggtcttctaatttcaattcaaacatattacctcacacataaaacacatcatatcgaccacgagtagtaccaacatataataactgctgtgcgagagaagcatctgccatgtgaatgcatggagtataaatgaagcttctgtcaattgagatgccctgggccttatggaaagtcgaagccggtaatgctttcactttatggaacttacgcttagcatcccagaactcagaccagggtgctttaccgcctttattccagttcttatatgtatctgcagtttttgccaagaaaaattgaaacttattcatttcttcttcggatgagatgacacagattttctctctagcgtactcttcatcgtcgccataggtttcaatatctaatacccaatgacgaaccagatattcacctggaacacctctggcacctaaaaatgacgtggtttcagttgcatctaatatgcgaacaaactgaccattattgaaaagaatttcgctgaatttcttcccttcaaatttaagttccttggtaagaggttcttgcataacaacaatctcacctactacgaatggtcgttcagtttcatagattcttcgcctgattatttcattcagtttatccacagatttattagtgaacgcaagcattcggttttcaaataaatcttctggtgttttaactaaattaaaataatttagcataaaatctttaagggcagttccttttgtaaaaccacggactccatgaccatcaactacacagtcacgaatccatccaccatttctgatttcagtagcgacttcaatgattggggcattactccgcatcacctcggtcaaatgaagttgtaagaaatctttatgagtgaagaatggactcagtgcaggttcattacttccaggttctaccggacgtatctgagccttatcaccaatggcaatgacaatacaccaggcaggaatagttgccatcaaaatcttaaacagtttacggtcatacattgaagcttcatcacagataagaactcgaatagatgccatatccggaactttcttttgttcaaacagaacgttttcttcatatgtcgtcgggttgattttcagaagactatgaatagtactggcctgcattccgctgagcttagataaaacctttttggccccatgcgtaggtgctgccaacgcaatgccagagataccctgagaaatcaaagcgtcaatgataaatttggttaaagttgttttacctgtaccagcaggtccattaatcgtaatgtgttgacctttggctccttgtttgaccatttcaatgactttattaaaaatcgctttttgactttcttttaattggtcaaacgtaatcatgccacttttaccctcactacatgtagatttttaatttttgctttgagtttttcgcgctcaacatcgctaagtggttcatacactagctcagttgttttccaccaaagcattcctttggttttgctttttccagtaaaattcccttttgctaatttgtctgttaaaaccgacattgtacgaatccgtgctttattagccgattcttcattagtgaagaccacacatcgttctccatcgtacatatcagttgtgactggatggtcaaatccgtctttatccttatacgctactacatatccatagtgttgcattacattttacctctcaaaagttggaagaaggacgcagtcaatggaagaccttttttcaattttaacttatctagcattgagcatttttctaaccgacgaagtgagctaacaattagccgtattgattgtacacggatttcagcatctgacggacgattcggaactgacgctaaaatagcagataacttacgctcaactttagctaattcagacttaccaccactgatacgagttctcaatgcattaataagttctaaatctgccgaggttgcagttccattcttttctttttgcacaaattgagaaagatgattttcgcgattacgtaagttagttttaattgatgttatagttttttcatactcacgaatcttttccaaacgagaagcttctttatcacttgttggcttaacagaatctgaagaacgaactatgcgtgctgcgatttcattcgcttttcgttcaaggccttcaatcgtattatttccgcgcaaagtattatacttttgcttaacaggaataacattccccattacataacccaagtcattattccaacgctcgagcgtcatgctatcaggatgatttcctttaacagttccaaacttttcgcctgagtatgcgcaatgtgtctgctgcatgatgttaaacagatattctggggtgagattgaactccttgtgccgacgttgagcagaacctaaagttgtaattaaacgagtataaactttagcggtttcagcagtaaatttcatcatgttttcctcaaaaatgctttcgtcttacggacggtataatgggtctaggtccctagttctagataatcactagttgactaagctatagtaacactaaagtagtccataagtaaaccagatttttcaactttgttatgacccaccactttgaacttagttcccatcggtagcatcctttcttgttctttatcaatcatctcgatgtcagcgcttctgcgctgagcaatgttatcaatcacatcatttggtcgcatgaattcagaatctggtgcagtaattaaaagcgatttcatgttggtatgataatcaaatgattgctgacaattattgacttcaatgactacaaaggtcgagtaatgccatttgcctgcaaattctcgggcaatcgtttcatctgttgtgaatgatgctacctttccgaagtcaaatttctctcctttaataagagcgtcataaaaggctttagcctcgcggcatgatagacctctatagagaatgtcactgttatcaatttgatgacgtctaacgatagagtcaagtttcttatgaaattcttcgccaatcttattgttcatgcactgccacagaattgactgttctttgcagtcaaaacgattggctaatgcttcccatacgcttaaatcatataaaggtaatcctttgctttctcgcgcgaagttaagaacatcaatggagcgaatgggttcttcgataggaataacctttgataattttactgaaatagatgggtttaatgaaatagccatgatattctccatttttggttacgagaggtatcatatcatggctttttagaagagtaaactactttgtgaaattattttgcccacggagaccagggcggcgggtcagaccagattgaagctagttcatctagaagagcttctggggctttaataccatacttctgtataattatacggtattcgtctttgatgtccttagaaatcactggatgaacctgaacctcttcctgaggctcttccatcatttcaaacaaatccatcacatgaaccactccatccgacgatattgactgttactattattatatgcatcagcagctttttgaagcaaatcgctcggagtaaatctggcgaaatcagcttgcataaatgaccatactaactgagtaaatactataaaagcgtcttcattgtcaatgacgatacttttgccgttaacgattttatcatttgcatattcaaacagatcggtctcatgatatgcattggtatatcctttaaggtgtaaagcacctaaaatattaattggacttcctggcatgtgtgaaacatcaaaagtatgggctgttttgacaagtccatatttactattaggacaccacccgcgtgcttcaaatttattgaccagttctttaaactcgtcataagaataattgtaaattgctacagtgaatactttatcagaatcaaaaccttcttttagtttgcgctgtaaacttactttatagatttttgcgtcggccacacatagctccttcagtcatgttgttgtcttcaaaccacttatcatttgctttaattaaagcaggcgcagcttttagtaataacgctgcagctcttacacctctgtaccaacaatcaaaatgagacttctttaatggtgattgataccagggcttagtataacatatcattttgttctcctcagttagtaggaataatatactattcccaatatagcataaaaggactcccgaaggagtccttaattttatacttcgctgtcagccggaacagcttcaaacattttcgcgttggtggttgcccaagttgcagcatcatcaactactgttgaataagcggctttttcggatgggaaaatctgatactgtgcattagcaatgcgatgtgagtcagaatataccttaaaagctacagatacttcagtacctttaacctcgccatcagcagtggtatggtcaaaagttttgatatttacgtaagccattttaatctcctatttagtttacaggagtatttatatagctgctgtaagcgtctttaatatttctttatcaatttctcgagtgatttcttctcgaagggccaatactaaggcccgttctttttgttttctgataatttttaaacgacgcttagatattcttttagccatcagtaaccactgtcttgacgagcaaagttctcggcgtttttcagataatacagcttaaagatttcttcagaatccagaccaagcgccataaacatattcagaacaaagtgcaggatatcaatcatttcaaatttgatttcaagctggtctttatcagacaggtctttgatataagtttcctgcatcttgacgtggtcagctttccatggtttccacacagcactagctgccttttcaccgttactcataccgccaagagacgtcagcaattcgcggaattcgtcatcaatgtaatctttttgattacgcagccactgtacgatatcaccagcttgagccaattcatcaggatgcatgttagtaccaggcttgtcatttgcaagacgaacctgaagagatttttgcatatcaagcattacttgcagagggtcaccaccaactttgcgtacgatacctgtgtatcgggcttcagctttatctgcaccagcgatcagttgactacattcgttgaaatgtggcatgttatttttcctttcttatgaagttttctatcatacgtctatagcagatattaggataacctgccttgacagctattttattaaattttgtgcgcttaggtctattattataaacccacaactcgtaaagcgaatcatacgagttccatatctcaccacgtcttggattcggtaaaccgtatctaggagaatttttaccactaaaccttccaatacgagcattgctcatgttagctttagcttcttccgaaataactttgcctttgtgagaagctcgcattttagccttagtttcttctggtgtttttaacccttttatccatgatggctttccaaaccttggattattttcacccgagaaaagaacagagttttggattttaagggtttctattaatctacttgttaatttaacacctttattatatcgcattaaatttacagcataatgcaatcctttcacatttggatatattttagttaataatctatgagctataaaatgctcgcgcgcagttaactcaacaagattgtttttgtcatctgctcctcccatacatctaggaattatatgatggcgttctttatatccatcaagatgccggcatttagcctttgtaactaaagctgagtaaattttttggtaattcacagatatcctttcaattagataaatattatatcacttaacataaatagcaggaggattcatgtctgaagtgaaacaagaatgtaaagacaaaggaggatttggaagatatctttacgtcggaatcgccactgctgctttagctgcatggaattatgtggtagttccattagctagcacacacggtctagttcttcctccaatgccgttagaaaaagttgtgtcgtttattatgaccggaggattgctttaatttaaggggctttggcccctatatcttcgcgtatttgtcaaggcgcaatttagccattaaaccttgcgatatattttgattaatataatccgttatttcagaagcagttgccccctctttcataatcatatcatttatatctttgcttttccaaggcgacttatcccagaaaactaccttttcacccgcgtctactaaacgcttcatacgcttaatcgtatcaggatgacgaggttcatggtccataatccatgctcggttatcatgacatggaacttgagctaaatctaaagacccaccggtaattgcaatagcattatcaatgaacagcgaatctattggtccttccatgacgaatacgagttttgactcatcaatagtgtcgagaccataaattttggtcgcgtgttcgtgggctttgattgtgatgtatttttgtggagcattctttcgtagtgctcgtccttgaaacgactcaatctctcctttcttgttgaagataggaataaccaaacgtggttcgttcgtctcattcttataggttcctggattaacggagttaacaagagaaggccattggttagtaaaccataaccttttccaagaagtgcttggaatacatctggcagtcacgtatttaactatcggatgttccttaggaagtctatctaatcgctcgcagaaattaagtttttctattacggggagttttgcattaattttctcagacggttctacagcctttggcttatcaaagacctgctcctttcttttctcaagaagatactctcgatagaggtcgggttcattatctttaagatactgcgatagccacttgttatactcgcagttgaagcaatgacagcgtaatccttgacctgcatcaaaaatccagaatcgtgctttattgatatctttctgtgagtcaccacaaattgggcaacggcagtttaacttgaatgttgaagatgtagtaacgtgtctaaatttaggtaggtgagatattgcgcgaattgcatactcgttatcaacccaagacataatatttcctctggccttaaactaataaggccattttatcactttttcttggcagcgtctttatccgcttttcgtttctttggaagagtttcgggtcctttattgacgatgtccccggaagttgtacctgatgcaatattctgtggattgccgcccgcatcacctgcgaccatctcagtaacaaactctttgtatgttttcatagagcctcctactatttattcatgcgtaatacgtaagcatttatatgtaggatacagcgtcggagacattgattttggattgtctttgataagcataaactgcttgcctgtatcttcacacttttgcttaatcacggcttcatctttaccagtgaatgccatcttttcagtagacattccacctgaaccagtagatagcgccattattaaaacgtatgtaatcatcctaaaatccacttaacaatgttgaagttatcaaactgggcatcacagtaaagaacataattcaacttaagtgctgcgccgtcgtctttaagttctgcttgcacttctgtttgtttgctcgggtctacgttttccacaatatgaccaacatctgcacgaatctgctgagctacttcagactcatcagcagtcattgaccactcgcataagtctttgtcatagttggccatggcaggaactgcagagcaacttgatactgcgaacactaaagcaagtacaatctttttcattttggtttcctcaagcagcttgtacgttaagagcagaaatcaggcgataatcaccgtttgcgtatactaacattgacacattgccatcagtgtttttgaatggctcaacaactactaaaactgtatcgccttcatctaatgcttttcgtactacgccatcacaacgcagattagcatgtggagatttaactactttgcttccaactaccataccgcaatgcggtacagtttccgctgattcatctttactcttaaagactacgtctaatgctttttcaattgtccacatgatgttttcctctactcgttttgtttcagtaaggccatagtatcatggcctttggagaaagtaaactaccttttgaacaattttttcaacaaaatgtcagaggtcagattcttggtaggtaggtatgtagcagagttaacccagatgccatcgctgttatacaccttgacctctccatagtcgcatacagataggtctgctttgttatatgcctcaatgcctcgatgaatggtatctgtggctgttacaacaaaagagtgacctgactggtcacggaccgcgctaaacacaaaaatcatagaattccttagaattttaactcttctgccagagcatcaagcttagaacgtgatactcgttcttgacgattagattcggctacacggttctgtgcaccggcaccttctcggacggtattgcttggattaggcttagttgggtcgttttgctgctcaatttctacccaacgctgattagccttatgtacacccatagagaacttattgttgatgttcttatcaccgtaacgtgatttaatctgcttaattaattgttgcttcatctgagcaagttcaggggtttcaatcacagccaacataaagtctgctgtagcaggtagaccagcagattctgcaatatcactcatgtccatatcagaagcatcccacgctgaacgacctacctgagctgcggtccaaagaacagtttcagattctacagccaatgcacgaagttcttctgcaatagctttaactaacgtgtaactgttttcagtatattgacgaatacggcaagaagcacaaataccaagatagtcaatgatgataacagtcggtttaaagttcttcttgagtttcaactcattcagaagagctcggaatgtattagcgttagcaccgccagtcggatactgtttaatgattaaacgaccaagagtactagaactacgccatttttccattttgcctttatattcggcgtatgatacacagccatcatcaatatcgtcaagtgatacatcaagcaaattagcgtcaatgcgtttagcacaaacttcttcggccatttccatggaaatataaaggacattatgccccatctgaagatagtctgcagccaatgaacacaatcctaacgatttaccaacgttgacgccagccatcaatacgttcagcgtaccagtctcggcaccacctttagtaattttgttcagaatgctaagtttaaacggaactttacgagctttattctggtatgataaccaacgagcttcataatcttccatccaatcatgaccaatatagctatcaaacgatactgataacgcttcgcgcatgatatcaggaatagctcccatatcaggaagacgcttatctcgcttatttggctcaagctgggcattagcctgaatttcaataattcgagacgtagcgttatacatagccttttcttgaacgtacttttcagtttccttaactaaccaattcaaatcttcaggagcatcagataacttatcaataagtttctttgcgccttcatgttccgtttcagttatagacgaattatccagtgctacacataacgcagtctttgaaggaattgctgtgtattcattaacgtgtttcttaattatgttaaacaccgtctgagcaggtccttgctcgaagtactctttgtccatatatggccaaaccttcgtaaagaaagcctggttgtaaatcagattagctaagattgtttctaccactttaacctcttaaaagattttccataatgattttttcttggtctttaatgcactctggatttgttgtttaacacaagcttccacatgaggataaagttcatccttatgagcttcagatggtgtactgaactcaatagttacttcccccgaaggagaaatatttaatttatgaacataaaccaagtgtgattgaccatttaattttatcacaatttcttggataacagtcttcatagcttcttggattatttcatggcttttcttgaacactcgttcttgacgctcgaagtctccctcttccgagggagattcttgttcaaatttctcgagttcagattctaaatcaaactcagtcttcattcatgaagttctctaattcatcttcaacttcagcagctgatactgaaccactctcaggaagtttaacaccatcaaccttagttgaaacttttgagttaatcatttctgctaccgcttcatcaaccgcagcgtttgaatcaatagcacccaactgataacgggctttgatagcgtcacggaatggctcgtgcttaaacagaggaccccaaaattccgtactgctcgtatcttttgcccgccaggatttttcttcacgaatcatctcaccggtttcaacatccaggaattctcgtgcataccatccgtttttcggtttaaccacaaatccgatatccagagccatatcaagcagaccactgtatggatcgataccaccatcgaatttaacatcaatgaagaacttacttttctctttgacagtacgtgatttctcggcgttcaggacaaactgatatccctcaagctcagtaccatctttaatttgacgtttaccgatgatgaacacagtatccgcagaatacataggacctgtaccaccagtcattaccgtcttactgaacatctcgatagtctcgattgtgtggttaaccgcgacacaaggaatgttcttaatagagaagtaaggagttacgatacggaagagagacttcagacttttcgcacgagtcatatctgcaacagatttctcgttcagtgcatcttcggtttcctttttagacgccatgttaccaatagagtcgataaacacgatgactttttcaccacgctcaatagcttcaagctggttaaccatatcgatttttaattgttcaaccgactgaaccggtgtatgaattacacggtcagggtcaacacccatagatttcagataagctggagtgataccaaattctgaatcatagaacaagcagactgcatcaggatacttattaagataagcactaaccattgtcagagacatgttagatttgaagtgtttagatggacctgcgaagatagtcaacccggactgcataccaccatccaacgctccactgattgcgatattaagcatcggaattttagttctaactacatctttctcgttaaagaattttgatttagtcagttctgctgtcattttagaagtggatgctttaatcaggcgagattttaagtcagacattcattatattccataagtctccattatatttttctcacaggttaaaggatagagtaattatattactttgttcttgaagctattatcagaagttccatttcttcttggtgttataaaccactgtttccatatctatttcatagtgtattttacatccaacgcacatgccatgccaccagcaatgcattccatctgagccagtagttccttcatgaacaaactcatcagatttacatacgaagcatctgaattcttcagccttgaatatattaccagctacgtcagatttatcatagatgttcataagaggtccttggagggctttcgccctcacagatatggttctaccttaccaaattcatggaaggcctgagatttcactcgagtgttaatacacatacgaattgatttcagaggttcattatcaccgaataacccacgtctttcgccgtctttagatttccaacgggcttgatttgggaaagcagcatgtagctgttcaagggctctattctgacgagcagtatcacgctgtgtagaacaaccaccaggagactgcactttgccggatttaacgagatacttaaacagagccagatgaggatgacccatgttaattaattttagaaaagcataagcatcttcgttaaggtcaataactccgtaaccaatatcttctgcggtaagtttagtcaaatcatagaaagtattggtgaacccaaaactattctcgcgataatgaccccagcttgatgtgattttgaaaatcggcaagcgagcatgaccgtgataataaccacaatccatagcagtctctacgtatttgaccatatcatcaaatacctcttgactcattgcctcgccggcaccaagtggaacacggcgatcgtcgcgttcacgaatttcagtcagatgaatggtcgtatcatcatcaagcatccaaattcgttgtcctgcatacatttcagtaatcagacggcgagttcctgcaattccatcaacatcatcggggacagtaacgattttagcagcatgaccgtgccaagtttcgtatgcttctttttctgattcacgtactacaagatgcggaacataaccttcaggaaacatagtcagggcagtaactgccccggcacgcttataacttggaattacaaactgaatcatttccactcacctttatagtctttctttgcaatatgagtttcaccagtataagcatagttatctacaagatagaaatgacgctcatacacgtgcaaagacccgacgttccaaataatgtcaccaactgaataatttttacctgatgcattcagaagtttggttaactgttccagaacatagagctgccacgcatagtcattacgatatccaaagacgacatcattagagcgcatgtttacaacagcatgaactttattatcacgaatcagatactgaacattgttagtacacatgaaatcactcatgccatcgcgctcaaaatcatactgcatttgaggtcgtgtataaatcataattccgcggcgagaatcaggattactgataagttcctttgcgcagttagcaaactgcgaatagttttgtgatgaccaaactgcccagccatagttagaattaatctcaccatgtttggatgcaattgctttccaaatagctggggtttcacctggaatatctttaacgaataaactttgagatttataccactcaagttcacgggcaatgtacccatcattaactgcaccaaaaatcaggggctcatctgcaataaatgatgcacctacgatttcaatagtcttcacacccgtcttatcaatcacaaattctttgttgagcaaagcatcagcgaattcttgacggatatcttgtactgtcattggagttacaatcatgagacctcttatttaacttgctggataataattgtattctgctgtgcgttagaagcagaccaaatcagcgcaattaaccaaccgataatggaccaaccgaatactagatttgtgataaagattccaccccgtgatttatgcttacgactgcaagctacaaaggtcggcaaaaaatagatgaagaaaagaatgattaaaccaaatactgcttccatgttaatctcctcagttagacatgcatttgttgtagatgtgattttggagagattttaactgctccatacgttgtttatgctcattataactcaatccgccgttagcaaaatcagttaaacgaatctggtcattcactgctgccgcttgagcagtgcatgtacgttctttttgagttttacgcagacgcttaatttcttccagctcatgcttattctgctcaatcatgtcgagttccatcgcagatagctgacgattaggattagctttttctttcgccaaccgacgctcaaccgcgagcgattcagcagagacctggttgctagcacgatagtatcctacagtaccgccaattgctcgcacctgtccaacagaagaagccgggacgatatcaccttgtggcatttgacaaccagtcagcgtgagagcaacgataacagcaagtaacgatttcattgtaatctcctcagtatgttatttcgagaacaatggtaccacatccttgtggcaaagtaaacaacttttttaaaaatcgaacatgtcaagaagagacgatttctcttcatagtctaaccctgccgcttcagacatacccgtcagaggtttaacaaacgatttttggaacagaacactgtggtcaagccacactagaacttcctgtcggatttcttgtggcagctcagtgcccgatggccatgccatgcatttctcaccgtacgggttaccttcacgcagcgggatgaccatcaccttctcgccttccatgattggtgttataccttcaaatcctgcggtagctcggttatacgctaaagcacctttaacatgatatggcgtacctttatctggatatcctgcaccatcatcatacttgccgatgttgttggcggtcttaacttctgctattactttatagtcaagttcacgatattcagactcaaactgcttataatattgttgtaaagattcttcaccttcctgcagcatacgccgaatagattcttccaacgcattctgaacagcagttggtgtagaactttgctgagtttccatacccatgattttcaggtgcggttctgcataacgagtaccttccatatcataaacgttcagagcatatcgtttcttcgctttccagaatccgccaatgccgtttgaccccaacggaggacaagaaatagcttcacggtccatgaacattaaatgttctttattgttcatgtattcacacatctcacgatatgattggtcaatccaaggttccattttcttcttgccgaattggttcaggaattcgaccaaatcgttagtttctttgaaacgctcaagacctaccttctcgataaccttatcaacacaaacgtaaattgagtcagtatcaccagctactacaaacgaatgtccttcagtaccacataccttgttgagatattcattaactttacgttcaatccattgaattgccatttgaccaaacaacgtgattgctgatgcgttacgcaaatcataataacggaagtaaatgttacccaatgcaccataaagtgagttgatcagaatcttacggtttaactgattagtattacccaagatttcagcatgtttacattcaaacatcagtttgtcaaggcactcttcggtatatgtcagcagttctgctttcatatcatcagagaaatcttcatagacattaacttctgcgaatttatcgatagttccaaacttcttatcattcagaacctttttaatcagttcttgatttcgtttggcacccatcattttatttttccactctttacgctgataaaataccttcgcgatttcaactggaatgacaccatctacatctttacgatacatccaaccattgggtgaacatgaatattcgtcagacggacgtggtgcagtcttgttaatgtactcacccaatggatgaagtttaaactgtccaacgatggtttctggtgaaatattaacttgtcggatgattgacggatacagagatgtcaagtcaaacgacatgatataacgatatgcagcaggaactggttccttaacatacgcaccaggatatgactgtttaacatgagaacgactttgcggaataaccttgtcctgttctttcagactgttaaagatgattgcgtcccatgttttaatcggactcattacaccttgatacggcatcttcgcataataagacatcgagatagccaggtcaataaatccgcgaacagcatcaatcgcttgtactgattcaacgtcgatgatgttatacgaaatataccgttggtggttagtttcacgcaatttattgattggaccgtcatatgctaatttacctttcttggtttcataataagcaatgaaatccaacttatacgtcggttggttcgtgaaactaaacttcttatacaaatccatgtaatcaagaatagtcacacccatgatagaataaatttctttatcaccatacatgtttgtgataatcttagatgaaactttattcagaggagagaaccgtttcatcgcacgctcaccaagaatctgtttcacacgattcatgatgtacggaatatcaaatccttcaatgttccagccagtaaagattgctgggcatttctgttcccaaagattgatgtactcaagcatcatttctttttctgaattgaatggcatatacaccacacgatcaagaatatgttgtggaacttcatcaccgccttcggaatctaaacgagcagcgagtttcttgtcccactcggaaacagaaccataaagagaatgcagtaaatcaaatacgtagaacttatcatcaaccgaatcgtaatgggtgatagcatcaatttcatattctgctttcatcgggtctgggaattgagatgcagtaacctcaatgtcacagtttgcaattcggatgaattttttattatagacgatttctgaaccgtaagtatcactgatataagcaagtttgaaatcatccatacccattgcttccattcccatatcttccatacgacgcatccaatcgcgtgcatctttcatagttgggaatgtattcttcttgcaatacttgccatagatgtctttgtactttgtttcttccatgcaatgactaaacataacaggagaatacggaacacgacgcatgcgttcctcaccagtagaatcgatataacgttctacaatgtcattgcctagagtttcaacgctgatataaaattctttcatgggtttcctttgtttatagaccgagttattagtctttaggtgggataattatactccgatttttataaagtaaaagggccgaagcccttttcttacgcaccgattgtgtacttagattttaaagtccattcatgtttctgtttgaatgtaattactcggaagttattctgcatctgtgcaagagtttgaccacgattaatactcagtagaccccagtcagagagcagttgtgcgattgagtctcgacgaatttcatcttctaagtcaatagtaacagggcgaccatcaagctttaacatctctttaaaatggacgatatagtaacgaccctgtttctgaagaatgtggcagctttgatatagtaccttatctttgttattagcaattcccatacgggtcagagtttctttaactttcaggaagtcttcaggctgtttcagtgtaatttcaatcatctttaccattccaatgctgttttcttaagatttttctgttctttcacgtttttcgtgattgtcttgaccaattcatcagtcacaagacctttcattttcttgagagcaggtttaagcttgtttttagcttccagggtctctctatacatcctagcatcaatcgcattgaccttgtaatatgtcattataacttgaagaatcaatgcatcctggatgttttctgttaacttagcccatttaccataccgacgacctctaggaacagaggccatcatatagttatagtgtgcttggtcagataacccttgaccaacaaggttcataacataaaccgcaggcatacagtcagcgtgctgagaaagagcgttttcaaccatgaattttgaataatccatcgtcgagatattcaaatgctcttgcttttcgttaatagacccaataattgtgaagaattgattttctgctttttctttatatgaatcagataattcctggactttcgtccagtctttacctaaccaagctatttggtgctcattatactgatcatcatcttcaaataaactcatcatttccactgcatctctacaacaagttgaataagcatataaaccaaatgtaattcaatcgaagctgctatgccatgatactggttattttcaccgatgatttcatacattctgataatgcttgggccagtaaccattgtatacagctcagaagaaagtttatctacaaaccaagtatagtctgctgcatattttggagcaagagcacggagttctttgatgttcttagttttaatagcttcgatgacatcttcaattgaaccacggtcattcagaacgatagacaagatacctgcatcaatcacacccttagaagaataatgatcaagcatgttaatggtcttacggaattctggaaaattctttttgaccaaagcagctacaactttcttatcttcaaccaccacgccttcattttcacaaattgcgagacaacgcttgagcatctcgatttgcattggcttaacatcagatggagatggtttaccaaaattaattacacggcaacgagactgaagaggtttaatgataccatcaaggttgtttgcagtaatgataatagtacagtttgtgctatacgcttccatgaatgaacgcagatgtcgttgagattctgcaagacctgcacgatcaaattcgtcaatcacgataattttctgcttgcctgcaatggatgcagaacttgcgaatgcagttaacggtccacgaacgaaatcaattttacaatcagaaccattcacgaacatcatttcagcattaatgtcattacataatgctttagctactgtggtcttaccggtgccaggagaagtactatggagaattaaatgaggaatttttcctttagctactaaagccgaaaaaatttctttatcttcagcaggcaatacacactcagaaatagtacctggacgatatttctgttcccacataaagtctgcttcgtttactgtcaatttcatttatatttcctcattcagattaaagatggggccgaagccccgaagttattactcaaagtcaaaggtactatctgcttccattgctaccacataagaggctgatgcaccttcaaattttgctgcagtctgtttcttggaaccgttcatttttgcccacagcatcagtttataatcaccgatggtcatcttcatattgctcatgttgatgataaagttaaagttaccttcgccatcataatcaccgagggtcagggaatacttcggacgggtcagtgcagcatcttctactttgttataaccgcgcagaacaattttaccatcaacattggtgatagcaattgtgtcaatctgcatgccacgagatactcgcatcagctgttgcaggtcttcacctttaaaatcgataattacgtttgccaccgggaatgggattggtttagtcgggaacacgattgtgctcgggtcagctgctggccagaagatagttgagcgagcatctttaattgccaggttaccatcttcctgcatgataatatctgcatcatcaccaaccagagacagaatgctcaggaaactgttcaggtcataaattgctacatcagtatcgatagtatcagagattgtggcttcagcataagtcgtaccattaacagcacgagtcatgataaaattgccaggtttcagcatgataccggagttgatggtggagaagtttttcagaatgttcagagtttctttagagaatttcatttcaataccttttaattaagttcaggataattatatcaagctgcgaatgtagcagttaattcttctgcaacaatctgacctgccgcaacgagttgctcatcagcatctacgcagtaatcattttctagacgttcgccaccatgacggtcagtaacaattttagcaccagccttgattgattcgttgtaatgcttacgcatcaattcaatccatttttctgcaacttcgtcgtcaatagatttatagaaagcaaagcgagcttcagaatctttaatcttatctttaatagctgctttagtttcttcagttagagccagaacccaagacttacgaatacgattttggttattcgggttggaatctgcacgtacgtttttaacctggatatctttcacatcaacaaaattaatcattatatttaccttaatcgtaataatcttcaaccatccaaccgggattcctgctggacatgactctattatattcatttcctgtaaaagcatctcgtaacatttcttctgttactaagtgtttttcatcagaaaacaaattagttaacacatatcgctttacttcaggaaaggccagcagatgctggccagttgtaaactcattcattccatcaccgtaaatcgtcctactttcttcatttgaagatgttggccatatgcctgcgggtcgtggtcacggtgagaaataataaacacattggcatctaccatcttattaagaatagcagttattgccttaacaccttctgcgtcggtggccgaatcgtagacttcatcaaggaacagacagtttattttaacaccagaaactttttcagcaatatcacgccatgtgaatagtaatgctatatcaattctggctttttcaccttgactaaacgaggcataactaaactcttctcgtccgcgagatttaatcgtttcagagaactcttcgttcaacgtgaacgaataatcagcttccataatttttaggtagctgttaatttgcttattgaacatcgggatgtacttcttgatgatagctcctttaataccggagtctttcagcatttcagttaaaataccacgacgatatttttccataaccaaattagttttgacgagaataattttatctaattcttcttgtagcagttcaatcttgtcagagttatcaatgaactcctgtgatgctttatcaattgctgctttaatacgacgtgctttatcaactgcagttaaagtcatctgtttcaaattactcatttgatttttgatgtctcttgcacgcgtacgaatagtattatactcgcgagctagttcatccagttcactctggcgcgtctttaactcgccaagaatggtattacattcttcaacatgatgattaatcttagtgattagagtgtcattagaatgcaaatcctgcaagcacgttgggcaatgaccgcctttatcatacaacccaagaacctttgagtatgattcaattttagaacgaatcttaaagattttaccttgaacttcttgaattgactctgctgggtcatcaccaatcacgagttcaagcagttcgctttgaagagtttctaattctgctttatatcctcgtgcctctttcacctgctcatcatacatcgcctgcaggcgagctacgttatcaccagaaagtttcttctgcttttctgcatactcatgatgagttttaatttcattagtcaatgcttcacgctgaacatcattaacctggatttgctgattgatttctcttatctgtgtcttgttcagtttgtccatatcagccaaaagagacacttcaagcaaatcttcaacgagctttcgtctattagcagttgataaccccatgaacggagtatatcctgccgttcctaatacgacaatctgcttaaacgatgtgtatgacatgccgatgagactttcaaagtaggattgaaaatcctttgaacttgcggcttcatcaagcttattgccatctcgtaaaatctcaaagacactcggtttttgcccacgtttaatgtagaaactatgaccgtcatactccatccacagttctactacagagtccttcttattgaaggagttaattaattgacctttcttaatatcacggaacggtttaccaaataaggcaaaagtaatagcttcaagcatagtacttttgccaccaccattcttacctgtgattaaggtcttttggcatttatcaagttgaatgtcaatggccgcttggccaactgacattatattcttatacttgacacgatttagtttaaaagtcttcactgattttgtgcctcaatgtataactgtttagacataacctttaaggctttgatatcatctgcggataggtcttcaagtgcttggatatattcttccattaaatccaataagcttttaacttctacttcttcgccatcttcagactcaaccgagttgtcaactttagaaacagttcttaattcatgtactaccttttcaagttctgattcaaacttaggaaggtcttcatcgaccgcagtgataataatgcgtactgcgagattacgaaactcttcaaagtcaatttttccagtaacaggataaatcagttttctatgccaagtgatttcattagggacgaaatcaaaggttgataattcagtgtcttgaacccagaagccacgtgggtcgttctcgtcacccgctgtaagcgtccaaggcgttccgatgtacttaacgtttgctgcgcttgatatggtgtggaagtgcccagaccatacttgtttgtactttttgaggaaatctggttccagcccatgagacttcattcctttataaaaataaaagccattaagctcccagtgaccaatacagtattcagcagacgattctttgatatgcttcatgatttctgacgtgttctcttcacacatccatggacacaagtcaatcaaagtcccatcaaaatccatagtcacgggcttttcaataacagtaatatgcttatacttaccaagaacttctgttgatgcattaggcgtcaacgtattcttgtagtgcatatcatgatttccgacgatcgtaattaagttaattccttctttctcaagagactccgcaatttcacgagcgaattccattgtcttatgagtgatagctttacgaacgtcaaaaatatcaccgtattgaatgatagttttaattccatgctttttggcataatcaatatgctgcttaattccgtgtcgttgtacatcctgtacccacgggtcatctgcgcggacacctaaatgccaatcgcctgagtgaataattttcatataacctctctagtagagtttaattttatattattccatgaatagcaaaaagggcccgaaggcccattacttattttgtcattaactcaaattgttctttaaagcaatgctcagaatcttggtgttctaccaggaattcaaatgctttatttcgctctttatcatagagcttctggtcagatgacagatgtttcattcgttcaaagacttcatttttattttcatcattcaaccacagaatgccagaatcatgagaagtcaacggctttccatcaacccggaatttcaaagcatcaccagtagctttatggaacacaggaatagttccacaagcgcctagttctaaatgcgtgtattccagcgaacgctcaaggaatttatctggaagacgtgacagctgataaccaaatccagactgagacatacgctcaagcatttcagagttaacatatcggtcaagaacttgaggattcagacctggtccagttttaacctgatgataatgacggcaataatcaatttcatagcgttctttgatgttaataaatgcaggactgcgttctaacccttccaagatagtcgttttgcctgcggggcgcagatgactttcatgaaagtcaaacatcaagaaatagcctttccacgtagtagtacgaccaatccaacgatgaatatcaaaatcaatagcagagaagtctttccaatacttatcacgaattgctttgatgttcatagcaggttgaaagttataaaccggaggagctgagtcagaatcatcaaagaaactcaacccgccgcttggaaaatattcttccattagcacggtattaaaatcgccgtttgagctatgactaaacagtacatcagcacgcttaacggtttcttcaagaccagcatttctacgaagtgacaatgctctatggtcatgttgatatacgactaccctaacttcaggtttaatgttctctatgagcttcttatagttatcaatcgctgcttctggagcattgatagcaggtactgagttaatgataagaatgtcacatgcgttaagcagagataaagtcttatcatagtcatctgcaagagacacaggaatagttacatctttatagctatgtgctctattacgagtaaacgctttatctttagcgtaaatgatatttacttcatggccatgttttactaaccactcacggtgctcgagactgaacttggttacgccgcatccctcaagtccgcgagccattaaaatattaatcttcatatattgacctttgttgttaattttggatattttaccattcccgtaataaagcaaaagggccgaagccctttaaattttcttgtatacaacataacccactgcttcacatatacgcttagcttcttcaaagcgtctaagcatatctaccttagcattatgaatcgcttcataatcgggagcaggtgcttctctccgagcagtatcacatttataacagaagtaactacgctttggtcctgtataacgttctgaacaattactgcaccggcacgtgtaatttccttccggccaatcatgtccaggattagaacccatcaaattcgtcatacatcccaattctcttcactagtaataaaatcagggtgttcatctaaatcaatgaatccccagttctcttcatttaccattcataccaccgtttaacttggaaggtgtcaacccagacaagagagttcttatcaattagcttacatccttcggtagagcctaacacgcgatattgattatctgctacctttactgccatcgtaccagtcgcagtgtttaaagtaaatcctgcgtctttacgaacacgtttaaattttacttgtaccagcatttagaatgtcccaaacagatttacgagaggtattccaacaagtcagaataatctcatcattaaaaggttgttttaaaatagtacgcagtttttcaatagcatacttgtaagcagggaaattattgtctaataccgcgtctccagcatgagctcgtaatcgctcaagttcacgacggtttttacgaacaactttgttggctcgagcaatagcttgttcttctgccgcttccattagtttctgttgcagctcgtcgcgctcttcctgggtaatattgttcatgttattcctttggatggtaatttatttcaaatgtgaattcagtatcagtccaattataactatgttcaattatagcagaatctgacctgaaatcagcgtcatgtggatttttcgggtcaatgtgaatatcaagatcaagcacctcccttaaatacatctttagcaaataagggatagcgtctaggtcttgcacatcttctaaaaacccgtcgaggttaatcttcagcctcatataaaaattccagattaggtccatcgcttgtaggttcgctctttttagcagaccctggcgccttataagcggtggattcatactgcgtcattttatcgtagatgtcctgaataaaggtttcatctgctaacgcaaccatatcatcgtcccgtgaatcatacacgttatggacaaaatagctgtatttctttgccatttctttgcgttcttttttgatacgctgaacgaatgcattgaaacaagcttgggttatatacgcatgcgggttatcatacttagtttcatcgaagttgattaagcctttaattgcggcttcaatcccgtctgaaatcatttcttgcttccaggattgggtgtatcctgaaaagttgaaacgcttactcagaccttccgcgatcagcataatagcaaggccgatcgtatcgttctgttttactactcgagggccgccagcagcttcagactcccggcacttctctttccatgcacagattgatttatacagttccttgttatttacataattactcatattgcctcttcgcttcaattaataatatctattatatcaaatttgggaagcgagaggattaaagcattacttaatcaattcagcgcatgcaattaatttcatcatgatacgatagaaatcgttatatgtaaactcagcagaaacattgaccgagcattcaaaatcttcgaagacacgttccattccgatgtctggaatgtcatctacatcagcgtaccagtacttgccttcctgcacgaatgttatttggtccttttccagatagaatacgccattcaatatttcgtgagtaagagttaactgaattttcataggtcacctttcatgatacgatagcactggaaaagtttttccataatacgtttgaactcaattaaactgatttcaaagtattcggattcatcttcttcatgcatcatgtttaagaatgaagtgtacagactttcataatgtttttcattcagcatagaagcatgagtttcccagtacattaattcgttggagaaccacacgcccatgtaagaatctattacgaattcacccataccttcaacagtgattgagatattatctatttcagccatttcttcaccgtatcgatagcatcttcaaatttagagaatgcatccacagaagtatattcattctcgccagaacgttcatagacccagaatgcatcaaaatcatcttcaataatgaattctccttctggagtttcaatcaagtttctgccgtctttagttttagacacgaaccatccgagtaaaccgatttctgcaatttgttcttctaccatttcagttctctcgctaatagaaaatattccattgaagttcctttattgatgcgatcaacacagaacttctttaatactgattctgatacagtatgaattaaagcagaatcagtaatgatatactcaatttttacaaatgctggtgattttccagcttcatcgtatgctaatcgttgagcgttacgaacatcttcttttgaagcgtttgaaattctgacgctgtcaaacacccaacggctggtaaaaatttctgtgtatagaataactttacgcatcaagatattcctcaagttcttgctcatttaaaccttcttgccacatctctgacggagacggaagttggctgtctagagtggatgaatcaattggaaatactctgataattacgctagtatcttcatcccattgatttgcgagtatccgtttagcttgactaatgtcaggctcagaatgagcccggatatacttaatccttctatgccatacaccggtaggaatagatgcgcacacgatatatgaaatcatttcgctgccttaaccgctttaacatcgcggaagcctttcttacgttgattcttcatcttacgaatagtgctttcagaaatttcaccgatacccggcgtgattggttctacaccaaaggctttaataccaaattcagacagaagataagcaaccactaattcacggatgcgggctttaccgattttttgaccttcttctttcatcgtaccgtgaagctcaacttcccactgatcaagcaaagacggagttacacaacgtccttcttccagcattgcagatactttatcataagcaaaagagttcagtacgtttttgattgcttgggacatattaatttcctcagtaacgattgttttgacagaggagattttaaatcaaatctcctgtagcaaatcaatctttgagagattttagctcttcgagcatatcgtagtattctttactagcaaccggagctacagtgcagttgtagctattgaattcatggtatttcacgaagcgttctaggtgccacttaatcagattgttaattcggtgaagtagaaccccatctgaaccaacgtagacaaccacttcaaattgaagcccatcccaaattctggtacggacgatatcacctacagcaaaagttttcatgcgatgtaccaatgttcgttttgccaagactcacccttgtaccagcgagtcatatcatatccattttcgtcacagatgactttgttcttcatcaagaagtattcgtcatcagtaaaatgcacatgctttactttacagcctttactcatagcttctagagcttcttgccaatttaaccagttcatattttcctctcgagttaaacggtatgctgttatccgttgatagggctatagtatcactcatcaactagcttgtaaacaactttgtgaaaggaatttaaaaataaaagagaggtcccataggaacctctaaatgaagggtatagaaatatacataaggtggtcaagatgaccttagaaaggaaccggttaatcttctatgatatctgggtcatgcccagcagcaataagattggttttgaatgttggaatgtcatactgcttaacgttatctataaaaatgacaggataccgaatagcaagcgatggatagcacccgatgcgtttagcaagtgactcaatcaacggacggtcataaaccggttgaccgtcaacctcgttgattacgttatagaactcatacggaagttgcagcttatcgagcaagtcacgaactgctttacatccagggcatctccaaacttcttcagggatgccatagatttctatcatttcatgacctgttggagtttagcagtcagagtgttaactcgtttctgaaattcttcattagataacttttcatctttcttggtaggattaatccaatctgcgatgataataaggacaatgaacggaattgctacgaaagcacctgccgttaatgcaaccaaagcgataacgttagaaataaatttacgaatagcattaatgaatttcataattttccttaaatagtaaagatgaacgctgtcatagccagaaattccggtccaaacagttcagtagccatgtggttcagggtaaacataattttgtaagtcagcatatctatttcctcaatcgtgtgtccaggtagaaccatttcttacccagagtctttggttgtcagaaccacgccagtttttagtagttggcagtgatttctcatatttcccatcaattataacatcgatgtgttgtagcaaatctaaatctttgatatcttcaaacttatatcctgtccacatccagatatctttctccggaaatcttgctttaacccaagaaactaaatttgaaatctcttcccgattctgtggataaagcgggtctccaccggttaaggtaagaccttgaatatacgatttgcttaaatgggatgcaagctctttaacagtattcatagtgaataactggccatttctagcattccaagtagatttattataacacccttcgcatttatgcaaacacccggtgacaaaaagaacgaccctgcatccagggccattcacaaagtcagaagggtagattctgtcgaaattcattgaaccttacctcattacgtgcttctacttctgcatcatatttccagggctcatcagtttgaatagccccagccgataatccactttcggggtcacgggttatagcaattccaagcgggtgcagaacctctttgttgattttccaaatcaatccccattcgctaagttggttccaatcaacttgcttcattggtttctctaacatgttttaccctatgcataatttctttgttcttaccaagattgaacccacgctcagaaggattaccaagatagccacaagtcctacggattgtattcattttctttggatcagtttcaccacaaattgaacacgtgaatccgttttcagtaggtgtcatctcatgagtagaaccacaggaaagacatttatctactggcatgttaacaccaaaataatccaacttctcgatagcatagtcccataccgcttcaagaccttcaaggttgcgcttcatgtcaggaagttcaacataagaaatatgaccacctttagcaatggaatgatatggtgcttcacggtcaatcttttcaaaaggtgacaggttttcttctactgacacatggaagctattagtgtaccagcctttatcagttacgccctttacatcgccaaacttggcttggtcaatcttacagaaacgatagcacagactttcagccggagttgagtacagactaaaggcatagccggtttcttccgtccacttgtttagcttagtgttgatgtacttcaggacgagtttaccgcttcctttaaaagtaagcatatcaaattcgtgaatgccaatatatcctaatgaaattgaactacgtccatttttgaatagctcaagaatttcatcatcaggtttcatacgcacaccaaaagcaccttcctggtaaagaataggagcaactgatgcagtaacgccttcaagggatttaattctagttaaaagggcttctttacaaatatcaaggcgttcatccaatagtttgaacagtttattactgtcatccgaacttttataatttgcatccagagctatcctagggaggttcagtgttactacccctagattattacggccatcaagaacgggtttgccagaagagtctctccaagcaccaaggaaacttctacagcccattggagatacaggagtttctgaaccggtaattgctctattatttcgagcactgatgatatcaggatacatgcgtttagctgcgcattctaatgcaagctgcttaatatcatagttcgggtcttctttacgtagattaatgccttcttctacaaacatcacaagctttggaaagattggagtaattccatcacgtcctaatccacgaatacgattatcaagaatagctcgttgaattaatttttcttcccatgacgtgcccataccaaatgtgatagtcacaaatggagtttggccgtttgaactgaacaaagtattcacttcatattcatatgcctggaaagcatcaaacacgtctttttctgtttttgaaatagcataatcttttactaatgctacttgatatttgcgagcatcacgtacgtgtttagcgaatgtcttctctacataaggagccaatactaaatcgacgttagcaaacgtagttccaccatattggtgagatgctacttgtgcagtgatttgcgccatgatagcagtagctactccaatactcttaggagtttcaatttgagcgttaccaagtttaaagccattctgcaacatacccttcaaatctaccaaacagcagttggtgaaaggcaaagctggactgtagtccatatcatgaaaatggataacaccttctttgtgtgcttccattacagaggcaggaatgacctgattggcgatatgtttagatacgataccagccatcaggtcacgttgggtaggaaaaacacgagaatctttgttagcattctcgtttaaaaggtccttgttggttttattaataagtccctggatttctaattcgatattcattttaaactcttacgaagctgcttcttgtattttgaagcaagttgtgattttccatcactttcctcgtatgtaaacccatgcaattccatttcagcaatcatctcaggcttaccaagacgtgaaaagcgtttagccatatcggcaacatattgcgggtgaatattactgtctttacgattctggcggagatagaccagcaaattctctaaccattcgaggtagtcaatatcttgaccttttaaaccagagcggttgaacttatgcttcatttggccttctgccgcattacacaggttacagagcaagcctctgacctttcctgcattgtcaccttctaacgcatggtcatggtcgaggtgattcttttgaatatcctcatctaaaggacgtttgcagcaaggacataatccgttctgtgcctgatatagtttttctttttcttctttatataacttaccggttaataacatactcttacctcagcgattagataagagtatttatagttaaattaacgagtaactactatagatgttatgattagactcttttatgcagaaagaagtacagaaagcatagatgccttcataatcatccgcattgaactcaatatatgaattagtttcttcatgaagaagactcattttagtccaagccattccattgatgtcatcgtcgtaatagcctccactaaattctactacatcgccaacttcataccaatgactgcgtaaaatttctcttgtaacacgatgaatatcagcgaaatcgagaatttttactgtaatagttttagtaatgcacgatttagacatggcgaactccaagacgttgttcaagtgcgacgatataatctgctgctttttgcattaaagcatactcttctgaatcgcaattttcctgtccagcaaaggcataaagagctctggtaattggaacgattgcaccttggaaatggttaagtttaatttcagaaatcagaggaacatcttcaccttgaccaatttctttaatttggtgcatcgtatcttcgctgtagaaacaccagaaccaagattcgccgtgtggagttgggtcgttaatagtaatgattttgtttgtcagcaaatcaattacggcagtaattccacacatttcaaggtcatcttcattaactgcattgataacctgaaatttaaatccaggaacaaactggggaaattgttcagttaattcatcatcattttctataacttcaaactgcttaccaataagttccattcactttgtcctcataatcaagtagttcgttaatggtaggttcagaagtattataatcttcttcaggaatagcatcttcctctggctcgacagtttcccaccgagccgcataccaaggttttatgcctttgctgctttgcatggtgccggagcggaatcattaacagaatcgtattcaatacgccattcaacttcagtacgagtaactactttctcgtgacgagtgacgatatctacttcaggaggattataataccaatcggtatgatatgaacctgaacgagactctgataccatgaaatggacgccgcgtgctggataataccaaatctgagaacggctttgatacttatggtcctgtgtccaatctccatcttctactaaaacaaagatttcttcctcttcatcatcaccgttcggtggatattcgaaatcatagttgtcgtcccattcgccagtgacaccagcaatatgtttgatttctttaagcaattcagcgttagtcattttagcctcgcagtttttgtaagtcttcatcgtcaatccagctttctaaaccagatggaagtgagcattcaatttcccataacagttcttcaatagcatggagacgatcaatctcttcagctggaactgttaccattcgtggagtttttaaatcatcaatatcataactcataactcttcctcatgccaagaacaatcaacttcaaaatctggtccgagctcttcatcttcccaacgccaagaccctaatggattaccagcatcgtaatcaacttcaagaccaatataactccactgaacaccatgaatggtatttccttgctttacaaagaattcaccccattggtgcatgaaagcatactgcggatcagatatagctctttcaatcattgctttacgaagattacgttctaaatctacttggtcgccttcaggaaaaacaaactcaattgggtatttcataatttcaccatacactcgccgtatttccatttagacataaccttaactccattagagtaagttacctctacctttgctcggtgattcttaatctgcttaatttcaccggtttctaatccgccatagccgtaataaagagctacaatatcaccctcccgaaggagggttccgcgataatcatgcattgaatttgaatttacggagttcatcaaaaccgccgatatgtgtgccatcaggagcaaaaatctgaggcatagttaatccaacctgcgattcgcgacctagacgacgaagcaaatcactgataactacttcatcaaatacacctttttctggcattacattgatgaatgcatactcttgtttcttaacatcgagcagacgctttgcattatcgcaaaacacacacttatgaatgttgctgtcgtaaccaaaaaccgtgaacatcttcttctatttccttaaatacttgagcttgaacttggttccaatctggatggcatactgctttaacgtaatttgtcataccaagacgcttcattacttcgccatcaattgcagcttgggcaaaatttcttccacgagtcatagctcctttgagtttagaactatcaactatttgaccagtctcattataataaaccgaatacatgagtagcattactcgttcggcttcttccatatatcgtttacgagccattttcagccttagtagttataactaatgttttaccatctaacgcatcgagaatatctttgatgcaattatctggcattggttgaacgctagctaattgcttggcaatatcatcaggaattcccatgcgaggaatatttaatttgctaaaatcaattttatccattagcagttaccgggaagtgttctgccaatttagcggcgatggcagcgttaatttgatcagcgaaattcttattcattgcattaacaatgatttcttgaattcggcggttagcgctttcaatagacagcttaatacgaccttctgcttgctcaatagcatcatcaatagtctggtgaaccatatcatcaatagcatttttagcgcatgattgggcagcgttacgcatcatctgcgacatttcttctttggcagacatatcattccaaccacgagtatggaacatctgctgaagctgtttcttaacttcagctcgtacatctggaatagttactgttgcaatattaacttcagattgtactgcttgttttagtttattctgggaatcttttaacaccatttctttaacgatgttattgattactgactgctgcagttgagcacgggcttctgtaccttctgggaataactggcgtactgcataagtatctaatttaatgtcaatcattttacctttttcactccaggaatattagagatagtttcaaatacttcgtcaaagttatctttatcaacggtgactacaatagtgcgagcggtctgtttctttttccaacgtttaaagaaagtggcaagactcaaatcatgggaagtgaagaaatcatcggttttgtaaacatatccgctttcaatttttactaccgcatcaggcgaagggtcttcatattcttctacttcaacatcatcaaagagtattaaagtgtcatcatgataatagccttcccagaaggcttcatcgttataaaattctttccaaagcgcgccagtggttttcatttaatcaccttcttccaagcttcgtgagcagcacacgctaatacttcgtcatcagtcaaattgaacttgccttcattacgacgagcaatcatttcattgaattcagtatcagttctaagcatcatgttaagaactgtaaaatccattgtcgctcgaagatattctttaagctgcatagggtcgatgccactttcgtatgcgtcaagaatcatatctgcaatgatgttatcaaagtttttgtcttttatgaggttattagcatactcgacaaaaaacttagtattagcaccagtaatagttttagtaatcattttaattttctctcaaatttatgcttacaagtccggcatttcattttcagaatatcggttgtccaatcaacaagctgtacttgaatactaccacatttttcacaaggcacaacttgtttagctgcagcttctcgacggtctaccatttcaagacaggcatcccaatcaattttaaattcaggtacaggtggatactcaaactcaatttcaaggtcgttatcatcaacgaccatgtcttcttttaattgatttttcacagtaagctccgggcatactcgagagattcataccgctctttgtactcattaagcgatttgactaaatccgccatcatcaattcatgcttacttaattcagcttcttttgtatcaataaaccgcttaactgattccatttcagctgtaatactgtttttggcaatttcaacatgatttactggtgttaacggaagaggcttaacaacattgagatacatatgcgctacatcttcatcaataacctgtgtgctcaatgttttaggaaaaatcttaaatgggtccaaatgtacttcaagaacagatgagttttcaccctgctgtttacagcatgattttttaactacatccatatggtctaaagcagtacgaacttgcgctaaaagcgcccgggccggatactttccgctggacaaatggctgttaatatgaattcgtacagttacattgtcaagttcttcggcacgaataaatgaaacacccttaggatttctagaactagtagaagatacctggtatttcacacggtcatcgcctttaagtaagcaaattgaacgattaagaatacgacgcaggtttgcattaaattcagagcagaagatttgggcagcgctgcggtcgtgtctttcttcagttttaaacgcccctgccgcaaagctataacgctgaccataaattttagcattgccgatagcaaactttttgagctgcttctctgctgacattgcacctaaccagcgagaacgacgaatgttttctacaacaaaactgacatagtttgcttcgtgtgctgccatgctatttagcacacgacgagctacgttaccagcaattgctacgttataagcagctggatttaaatcatgtaaagctgccaaaacctttacgtgcttctcacgctttgacaagccctttccattatgcttatcaaattcaccggctacaaacatctttaattcattcttattcattatcttttcctctattttggactgggctcaaagagtatctcaaaatctccctgaacccattatacaacaattattcctcaagcattataactttgcttgggcgcttatagaaagcatgagttttatcatctttcgctaattcaaatgtagcagtaaactgtactttgcctctgtattcaaacggaatactttttggaagggagccgtaaaccgtagctccattctcaagtacaaccatcatcttacattgtacgccgtaatagtcttcataaacttttactgacgttacggtaccggagacagtcactcgtccttctggtgcatcccctttattcttattcagctcattgaatatattatcaaagacctcttttgaatgttcctggatagcctctaagatgctcttatgggctctaacttctgccataacaacatccgttccgtcttgcaatttccactctttatatggaacgcgtacttcaagaggataaccatactcacgaagttctttatactcttcttgagttaagcggagtttccaccaaccgtggtcacctgtatactcaggcttatccagtgaatcaaattctgtaacatacggcaagtaactgcctgcgtgataagcttcaacttcacctaattcattttcccaaagataaccatcaaagggagcatgaggacgatcatctttgccccaagtaggagctacaactttatcaaagtattcacgaccgaaacgggtcttcgcccatccagcattcaactcctcggcgcgtttttcaactttcgctcggtgtgcttggcgggctacacgattttcttcaacaagtgcagagataatctcggttaaagttttcattttattctccagtttggttgacgagaccatcttatcaacagcctcgccgaaagtaaactactttgtgaaaaattttctccaaagcagaactgcatctctacgagatacttctactgctcctagagcaactgcttgcttgcgacgaacatcgcgcaaatcatagtgtggaactcgcttatcctggaaccaagaacgtttcattccgatggcttctgccatagcgtgtaactcatcaaggttgtcgctaaacatatgacagttctttacttgatgacctctcattttccaaccatgattcatcaagacatctacgtatactgtcatttctgattctcgatgtaggtttcaatgatgaactgtgctaaacacagaagattatcttctgaaggagaatctactaaattctcaaccatttcagaaatagttccaaaagcttcttcagtattgaacatttcttgaagttcgttccaagtaggtgctttcatttcaatctcctcattagttaacgaagctatcttatcatggcttttctaagatgtaaacaacaaaagggcccgaaggcccttaaaaagatcggaaatcactgttaaaccatggcgactggtgctgtcgctgcttaagcaatttcacttgatgtttcctattgtcttctataagcatcttagaggcttttagctcttcagccaataataactgtttacggtccatcaggatgaggttctgggtcttctgagcaagtgtctgaatacctttgagaccttccacagattcctccatccctcgtttatacttggttcgggcagcatttaactgcccttcgtaatacgcatgtatagacactatagtactaaacacattttacctcaataacatctaagataatatcttcaacgtcttgctcagggaatgccacgccattggtctgcccatgctgaaatactgcttggtacgctgacggcgcagaaattcgggttgaacgttctttattgtcatagcatttgccatcaataaagcgtttaaatttaacttcataggtttttaacattattacaccttagcataattgacgatttgttcacgatcagcgggccaatttaaatcagaacgtttcttgtttgaccacgcaatattttcttcagcccaatgaagtttagccgatacgctcttttgtacgtctctgatggcttcttcaagataaatgcctaaatctctcgggttagttccttgagttttaaatgcattgagcaaaatatttcttacaacttctttaaattgattttcaacttccgggtgaataaattcacgatatccgctgcacggatatccaaaagcatctaccatacgagcagtactaaattctttgttcataatccgagcgcctcgcgttcatcaggatttaatttagccaaagcggcttctttaattttttccaaccgtttacgcttagcttcaggtgtttcttcctgaacactaatagcagcgcttttaggaaaagtccatgattcgccattttcatcggtgaatgtaattagttccgttggcttacgattaactgtaccatctgagccccaccaagactgccccttaactgcttcttcggcaacgcaatatgaaccataataaccaaacaactcactacggcgatcgtctggagagacatacgctgcataggcttcactttctgtcattacccatttcattttagcacctcataacgaataagttcaatacggtttttaagctcttggtatgatttacgccaaggcttataataggcatttaaatcttggtgttgtttatgcatttcgtctaaatgctttactgcatcctgcacatttgcaaggaaagtatcaaatactttattagcgtattctttcctgagctcaatgaacggaggagcacgaaatacgtttaccattacacgtagttcatgataagaagaatggacttcagctaatacatttttcttatcgccaaagttaaacttataaagtttttcacagattgcttcacaggctttctctgctttacccttgggtttacctgcaaagatatgaccaggcggatatactttaatatcgtttaaccaacattcaatatctttaatagctgctaaactcattgtacccacgctccattttcatcaatgtaattaatccactcgttaatagtccaggaagaggtatcacctttaggagtatcaacgatatacattccgcctttaaacaaaacacgttttacatcattagaaattaaagtagccattatattttcctcagttagggaggatttctcctcccattaaaattatttcagcattgttacttcagcaatttcacgccagtttttacggtcagtcgcgacgaaatcaccaatataaagagcagtacggagagatacgttacgcagacgatttacgttatctttcataaattccaaaacttcaataacttcagaatttcttaacccacggttctgtaacatagaagtagtcattattacatcttgaacacgaaccataatctcttcattagtgtgaacaccaaggtcaagataaactgaacgtgataccaaggcttgaagatgcggagcaagtttagaaccgcgctctaattcacggtcaatatcaacgttagtgataaagaccacagtaccttcaaactcaaactcattaggaattcctttatcttccaagaaagaagatgcagtgctccagcatactttacgtttctcccctgaatccaaagcagctttcagaaggttcaaaatatccatatcagagaatacatccacatcatcaatcagaagaactgaatttgcttcacgtgattcccaaagacggcagtataaaccaattcctgagattttgccgttcactgatttgtaatcaatagcgttagtatcatgagcatgttgtaatgctttatccaaagagtaagtcttaccgatacctgctgctccggagataatcagagaacgaatattcccgtggattaagccgttagtcattaatcccatgacgttaaagcgtttcttgatacgctctttcatttcatcaacggattcaacaacttcaattttagcagctactccgtcaattgtgatatcatctttgaatacccaaacaccgcgctttttgccattcagttcaacaaagactttaccatcaccctggcgagaatcttcagcacttaagctatccgggaaccactcaccgagtaactcataagtacctgaaatctctttgccgaagtaaatccctttcttgatggtgatagttgacattttattctccgttactctgttttgttttgatggagctatagtatcaccagctcgcgagcttgtaaactacttttttcattcttttgaaacaaaaagaggagcccgaaggctcctcagttatgcgtgcttgttgatagcattttctgctatacgttttggaagtttacctgcccagcggaagaacatgataatcgctccggcaataaacgcagggaaccaaaagatgagataaaaccaatactctcctgctttctcgatggttccatttttgattagatgcttacagacagaccaacccacgacaaagtaaattattgcaacaacgattggcactactacgctccacagtaaaatcatatttcagcccaataaagtgagaaccggagctcttctccggcccatgacataaatcggtggatttgttttcgagttggtcgagcagagaatttagcattttctctacgaccagtctctctgcaaactgcttccaaataccaccgtctacctttatgaggtcttccgtaattcaagaagaccttcattgtatcatttgtagtaagaattgtggttttcaagataaaccttctcgacgaaatcgtcccagaacttcatgtctactttcttaggcattccgttcttttcagcagtatgagctagaatttctacttcatctactacagactcgagaagctcctgtacttctttgaacggtaactcacctgctttgaccatcttgaccattttagcatgggtcagagggaattgaaggtcaccagtcatatagatttcctgaagctgcagacctgcacgaagagcatgactcagtgctttccagtcaacgccttcgttagcttctgccttacgagcacgttcaccatattcagcatcaagtttctcaagagaatacttcatctctttgatagtgatagtcgtctggaatttacgacccagaacgttataaaacttctgctcgcctgatttgtggtcaacgaaggtggtccatttgaggaattcacctagaggaagtttctctgcgatatcctgtactttccaacgctcattgatacccttctgctgaggacgatcgtcatatttccattcaggaacatctctgataacatccaggactttatgtaaatctgctaaacgagaacccttaacgccatacttacctgcttgcttacggacatatccaagataagccttcatgtcagtggtatagaaacgagctcggttgtcttgaatgaatttccatacttcaggaaggtcagatgcaactaccaattccggtggagtatgcagcatatccaacgcgacagtttcaccgtcagcagcgagcttgaagaaatactttaagctgaacaactcatggtcaatatcgtctttggtatttttggttgcgctgttgttagtattacgattggtgtggttcatcgcctgacacattagaatatcacgcggatgaggtacaaagatttctttaaaatccacatctgactcgggagttgaagtaccatacagatgtgaaccaaaataagattttacgattgttttcataagtaaatatgattccctttagcgaatttaactaatgcattagaacgcttggctgcttcttctgctcgagttttatctgtagttctttttgatgtacggtaaacattaccaattttttgactggtgtaataatacaccacttcgtgggtatggtactcttgtccatcaggatgctgttcacgacaggtttcttcacgcagtgtggtttcatacataggaactaatgcccaatcaattcctgtgctaatgattgccacctgaatgtcaagtctgttccagcgaaatgcattgatatatcctaggacccgtgattccgggtccatcattgcgaatttaatgttttcggctgaagctaacggcatctgtttcacaatgctcatactaagttttttcttagtagttacgatttcaatttccatgacccgccctcataatgtatgtctaaatcaatgttatctttgccgctgtacttgccagtcaaaggaataaatttaaccgtaaccttttcgccgtcatcaaaagtaaattcggcaatagggtatgtagaaattataccacgttcggttttagcacgaaatacggcccgaaggccgttcacaatataaacttgatcattcttcactaggttcacctactgtaacatcaagcatagatttaacgagcgagatgtcatttgtactaaacacgtgagcttttcctttatcgttctggcaaaacatgcttccatctgctgcaattgctagtacttcatagcagttattagttgtagagaatttatcacccactacaagaggaacattaactttacacttctcataaactgtgtatttaaggctgctgagattaattaccgacttggaaccaccgggtaaaagtttacagatataaaatccatcatctgaagactcttttaggtaatcatcgatatacattccacggtaaccatctttaggatatactacagtagttgtttctcggctaccataatcgtaatatactacgattttgctgtctttacttttaaagaaaatcgataccgtatgcgctgagctgcatttgaagatagaaataaattcaacttcaagctcaaatcgattgctttggttatcaaacccaatttctactttatcaccaacctttaagggtttttcaataaggctttcttcaaatttcgtgcgaataaaacgtttcatttatcaccttctacataatcaatcattgggcagactttccgcttacgggcttttaaatactggacaaataccgatggttcggcttctgcaggaagaccagcttttactcgagcaagttttttggtatactgtttctgattgcggtagtgtttaaatttttctaaaccaaaaataaatccaaacgctatagctgcaaataaaagcacaaatgctgctataactactgcgccaactggtactgctataacatttaaccaaagcgcagataaactaatacctatccaagcgagaattcctgtatccgccacaatcggccaaccgaacatccatgcaacagaaccgatgaatgtaataatcgccgaagaaaacacaacatgaagaactgtcgtccagaagtatccacatagagtttttggcattttccacatgctgccagatttaaaccacaggttcattttgaaatgccaagagtttttattaatattcattatcagtccttcatagttggaatcatagttacaagatatttgaccagttcaatagcgtcgcttttatcaatagctacacaatctccgtcacgttcaatttcgatgatagtattatgttcatacgtgtggaataccgtaagatacaaatcaataacatgcgggctttcatcttcaattactgcatcgcctttacgggattttccgtcccatactaatttactcgccatcttttgcctctatcaagaattgaattaatgaatcaatttgtttagtatcaagatgaattatatcattgccttgttttagcacgatacgactcaactttttagtgaaatatgaattcacaacctttacacgcacatcactgtacggattatctaaattggtactatcaagaatactttccataattacctcaattgtgaatcttttgaaccacgacgattataagcagaagtcattacaatgtcccactttccttgacattctacacaccgttgacagcctttaaccaacagacgacgagctactgggatttcctcatcacaatcaacacagaactcttcggattcccgctgttcttggagttgtttctgaagacgggcccattcaatcccgtctgctattgtagcttcgcgagttgcaaatccgtcatctgatgggccccatccattcatttcaaactctccagaatcatttgcaccaaattatatgtaaacatcggatgctggtattgtaccacaatgtagatgataagtaaaacgtttctcattcttcgccatcatcaaagtcgtagtaatcataatcacaactgtcaagataagaatccataaattcttgttgacggcggaaatcttcagaaggggtcagtctgtctgcatatgcttgatcatctggatcgctgaacttgtcttcctgaagttctttaatgaactgttcagcttcttcacgcgtccaaaacccacgattaagattatgaaccgaacgcttttcacctggcttgaatacgcccatatcatgagcagaacgctcagttgaataactttcagtttgaccagcatagttttcatattcacaaatcacccggaagaaaggagattttcgcgaatatacaccgcgaagaccgagttcaacatcatacgtgcctgaagcaacaatgtaacgcgttatttcgccgcttttagtttctgtgcgattaacaccacacacgtgataaaagatttttccaggttgaagctcggtggttaacttaatcataatgtttttctcgtttggttgttgatatgtctatagtatcatgtaatgaagggaagtaaacaactttttgaaaagaaaatgcctcccgaaggaggcggagggtattactgcaatgataacaaatacttagtcttgtagcatagacctgtaatgtcatccagaacactttggagggcggcaggaactgacttgtagataccatcggccttagccagaatgaggtctagcatttcaatggtgtcctttggcagctctttctgcgatggtaaagccggtgtataactcttacctgagaatcctaaccactgctcaccaaaagcatctatcaaatctggaatctcgttaaagaaaacttcatacgctttatgtctggcatacgatttggtatcaaaatgcgctgaatgaaaatacgcctgagacgccataagtaaaccgatgaattcatcttgtggagtaagtttaccgtcctttacaaaatcattgaatttcattatcgagttgtatcctcatgcggttagcatattcttcacctgctgaacgtcctaaagaatcgcaatctttagaacaagactcactcttccatttactttgtataaaagaatagaactgttcagactcttgcttactaggctccttaaatttagcataaacttgtagagctccctcaacatacgagttataatccgaaatgtcgttgtgtgatgcagctgggagtgaaatcccgcagcccaacaccagggctaagcaaatgtgattaaaggccatacggcctcctattatttttgtccagtattacgtttgtgctgaagtacagccttaacttctttgaggtatttgtccagcttacgtttacgggtataatctgcttttgaactgtgctgacgaatttcttcctgaaggtgcgaaataccatgcccaatctcacgacgaagttcgtccagttgttctacagtaagattacgaagttgcttttcacttaaatgctgcatatacacctcatcagttagtaatagtatttatataagtatgtgttacttaatcccaaagccattcgcagatgccttgctcaatggttctagcaccagcttcgtcccagttatattcttcgtcatacttcaatgcgcgtttaatttcggctttatgaaatagacgtgggatcggcatagcataacgggtccaacgtagagttttccagaatccatcgcgctttgatttagcaatcagtttcttggcctctagcggtctttcccgattttcagaaatacgcagttcaacatatttctgttgggtttctttatctttctgagttttaacgtattcgttatagcttttaatataagcaaattcgttattattctgatcgttccatttggaagattttactacatgccagcctttacggcgaattgttctagacattattacctcgttaagttaaagtacctcaacgatagtaaaatcctgatttaaaaaatttaatattcatgaatagatgaccttacatttacatttaggacattcaggttctttatttttaagacgcttggtagctgtctttggagcagtgttgtaatcatatacatgaagacaacggtagcacatcacatattttttcatattaaaccatcaacgaaagcaatattacgtacagcaagaatccaactacgaatcctagtactataccacccgctatagcaaataagctactcatgtttaatataacacccattcatattagcaataaagtctttaccctgtgccaatactttacattcggaatcaagacgattttgaagttcttctcgtctatcgctttgaatagatgctgctacacccatccaaatgaatagcatacttaaaactagcatcaggagagtattatacgttcttggcttcatcataagcacctaccagttcgcaccagtgtttacgacaaagagaaacgtatttgtcttcaccaccaagttctactacttcaccatcggtaatagcatttccgttttcgtcaatacgagctaccattgtagccttacgtccacagtggcaaacgcccttgagctcaacaagtttatcggctacagaaagaagagctttagaaccttcgaataactcgccgcgaaaatcagtgcgaagcccatatgccattactggaacatcatacaagtcaacgattttacatagctgaagaacatgttcagcagtcaagaattgtgcttcatctacaaatacacaatgaatatcacgttgtgtttgtgcccacttgaaaaactcaaggatatcaatagattcgtctactgtattagcttcatgacgaagaccaatacgagaagtaacttccgttgccgaatcccgagtatcaatagcaggtttcagaatgagagttcccatgccgcgttctttatagttatgggctgctgtaagaaggttagctgatttgcctgcattcatactcgcgtagttgaaataaagctgtgccattaaagtgtctccataaaatcagaaatagcattcttagaacgaatgagttcatcgtattcttctggtagaccatttccgtaaatggcactaatagctactacttgctcggcacctgcataatcgtcaatcaactgccacagtttatttttttgctctttagtaatcatctatttacctctaacaagacgtatttagcttttagcctcttcatattctaccactgtaatgtcaatatcaggggttgctaaattaataagtttctcaattagttcccaatcaccgccagcaataccagcaccaatctttggaatgtatagaggacgattataaacaatacgaccagaatttagttcatggaatgcattaaaaattgcgccgtaatcaacatttggacctggagcatactgagtatacaaattatagcaatatgcagtgccattcttgtgaatggctcgagtatgagttccaagcttggctaaattattgtcataataacggtcttcatcgatgtcaatatcgagaattggaggatatgctttagcaagttgtcctgctacaccagcacccattgtagtaaagcaattacatccatgagcaatatcgcattcatgcttcatgaataattctacaatattacccttaatatatccagtaatcatttattcacctatggaattttatatgttgcatattcattaagattattgtatactcttaaaaatatagcattgttacaattaaggatagggttcagcactccttgttctttaggatgcattactccgtcaatagaaacgccatcgctctgcattccacatccgcgagcattatattcgacaagtggaactattacctggtcatctttatcttggtaattataaaatgacattagcaattttctactgctaggcacaaatgctatttcaatattgttcttgaatggaccgttgctttctattttagtcccctgcgccgctagtacaggttcaggatagcctgggagcttttcccaggcattaactgaaaatgcgcagcataataaaatagctgcttttttcattttgatgatagtcctgacatataacgagccattaattggtcacgatacattaaacatatattttcgttaggagcattgacacataaatctttcatgctcttagccttacgatttattagtgttgtccactgggccgggctacgtgaatcttttactccatcgctgaatgctgaatctaattcaagcgctaatatatcaacacattcagagttcgtattgcaaaatgttttagcgatacgaagtgaatctgtcattgaattttcagcattagcagagaatgccagtaccaatccaagaagcgcggcgtactttaccattattccacctttatatgtagcattttatgtttctttaagaaattagctttctctaggacatctgacgcataagagtttccccttttgacattccatcctgcattataactagcaagagcttttcgcatattgccgttatgtatatttaaccaatatgaaagctcaatatatgcccattccgcggaattctgtctagatttaagcatttttcttatttcagaatcactaaggtttttgccttctaatttagctctggctttaaccgtaggcaagtaattttgaaataccccataagaatgatgcccctttcctgcttttaaattggctcctgccgaagattctttccatgatatagcagccattatatatcctaagccgttattatcatatcggttatgcggagatttttcctttccggatttttgatattgctcaccaaaattatatgcgtaatgtaagttgtcaagttgaacattactgaaagttggctcagacccaaaggccgttgaacataaggccattagaccgataagcgcttttttcatgtttacctcaattaatgtgtataacttttgtgctgattttacctttcaaacgtttatcattaacgaatgccatacgacactttatactaggtccttttcctggtcttggaatatccatggtaaaccctagccacagatttccatccgtaatttctaaccgcattggcttatactcgatgttttcatcaatgtcttttgggtcaattggaagccaaggcattgctaagaattcattaatttctttaagatgattaggaattttggaaagaacagagaatacatactcttcatcaatttcacgttgaatagcacggtccaacaaatgatcagagtacttagtgaagaaaggctctttaccctcggctttcgcccgggcacgaacagataaattcaaagagcgaaaagcttcctcaaacttacgacgcagtttagttctgcgaatgaatacttctgggttagttgacatagttcattctcctttgtttgtagggccatagtatcatggcccgtaaggaaagtaaactactttttaatatttttcttctggacagaacactgcccggcaagcccacatagaagcttccttcagtttctgttttgctgtacgaatctgggcaatacgttcgtatgcttcatcgagtacctgcttgggttcattggctgactcttggtagttgattaatgcctcttcttcaagagcagtaaagataagaccaagacgggtttcagcgtctttgatagcattcactttaccaattttttcattggtatgtggcttgtatcctttaatatcttcgattgacattatagtgcctctgtgaaagtacgagcgataacgtcgcgttgctgttccggagtcagagagttgaagcgtaccgcgtagccggaaacacgaatggtcagctgcggatatttttccggatgctcaaccgcgtccagcagggtttcgcgacgcagcacgttaacgttcaggtgctgaccgccttcaacttttaccgttggctggtattcaatttctacttcacgcgccttgtagccataaaaagtttcagcatccgtaatagtatcttctttaagaacttttgaaacgattactcgtgcgtcatcaccatcttcgatgtaaatggtgcctttaagttcaccttcaagaatttgatatgctttcatatttcctcttaattagattctttattccaaccacgcatgtacgcggtaattacgtccatagtattccactcagtagaatggaacttggatgcagcctgcaagtacgagattttaccttctggcattaattttacccgtgctaaacgttcagaaatagcagcgtctttccatgtagcaaaacccgttggtccttttaattcttctttaagacgaataacttctgcttctaattcagattctcgccataagcgttctctggcatcattagcataaagtatttcttcatcagtttctttatcgtactctacaatttcaataggctcatcaactccatatccacgagtgcctatatacgttgtagcttcttcccactgttttgtggcttcattccaagttccattctgatgagcttcataaaaatcttgctcaccagaattactgaaccaatcacagaagctttcaactaaatgtggaggacactttataacaatttcagccattgcattgttttctcttgaatgcgttggtcatatgtgattaagcttgaactaatcacgcctttgagcttgccagatataaactcaattctaaaattaggatagcgattcatccacttcgtgttaggagcattagaaatgaattctgcacctttaaacggaccagacagaaacttgtagcgcttgtactcaagcaggtttccagccgtaaccattgttattaattgcttcatatcggaaaatcctgtattttccattactgtaatcatatcaacaatttctgtctgtgtcatcattgcattcctatcacgaaaaataaaggtaaggtatcattaggcatagaccatctgatagcttcctggtacatatcatagaacttcatcatatcgggaactttcattggttcttcaatgataattaatgctcttccaaactttcttcctctaaacttataagaggaatcattggatagaaattccctgattgtcatcggaacaattgatttagctatctcgttagccggtaatttattaattaaatgcgatgaattatattctcgtagaataccttccatcagttcagatgattgtgtgtatcgagtagataagattataaccgaaccatcttcaagcaaccaatcggtagcgaattggcataaggctgcggtctttccggtttgtcttccaccgtctagacgaagggtaccgtactctcgcataaggcaagacggttcataaaaactgtagttgggattattcaatcgtctgtctgcagcgtctctgaaagcatgcatcagggtcaaataaatgggagttaagtgtttcattttagattccagttaaaggggccattccttggcacatgtttaatccatcgacacactatgtaaaccccttaccgcacttgggctcgaccttattacaggtaggaaaagctacttcactcagaggactcgacgttcatgaggagaggtcgtgttcggctttattaggaaattgcttacttaattgatttagcgtaacgaatagcgccgcgatcgtttacgaatgcaattttaccattacgcatgtacatggtaacagtacgttggtaaccgttagaagttttgccagactgataacctactaatgcaaagttatcttcaccaggtttgttctgcttagacttaatacgctcatgaccaaatgccattaaggagcgtgcatcgccagatgctactgctttgcgagaagactcatcttcaatagaagaggtgaaatcatcgaatgaatcaaacttagcatggctcttattatataacttgccgtctactacgtagttatatccaacaacgtccatttcaatttctgtaccatcttctagcgtggctgtcatcttctgaccttttttaaatttcagaagattacttccaacagattcagtcattacgccaactgttgctaaacgggattcatttaaaaattcttgataagttttcatttattttccttgataagcggcccaagttccggtccgcatagtttcaattacacgacgagcacgattaggtgtctgacgataccaacgtgaatttgccagttctttggcagcagcatcccattttttagcagctaagagcttcatggaagcagggaatccagcgacaccacctacacccatttggaataccatgttaattagagctgctctacgaacatcatctaatatattatataccgggcttaatgtagcattagccacaatgcccttaattgctttttcaacatcctttgcaaaaattacttctgcctcagcctgggtaatttggccaccagtagaacgacctacaagcttgtccaggttagaaatagccaaagattttgacgggtctttagtcagtaagtggccaataccaatagtccaatacccttcggtatctttataaattttgctatcgtatccttcatcaatacgcagcatgccaaaaatatccataaggacctcctattaattataggagtatttatttggccctgcacttggctatgaataattcaaggctacacttctcgtatggtgtccatttacctttccaccacacataatctcttctatcgtcctcgggcaattcactaaatcccggatatagctgttctgctatataatatgctgattttgtatactcgccgtcaccgaagacataccgtgacttcattagtgtacgtgacaacttatctcgaggatgaaatatgctaatccatcttccgtcacgaacaaatcgtagttcatgcttataaatgtgtggaatgcctaattcaacagcttcttccatagtaacctcactgggctgtgctatacatctgtgtcatgattttatacaaacttggtcccatcacatatttccattgagaaggtttaattaaagcaaatgcgtcgatttccgggaaagaaattccattttcatctttatggtaagctgtgcaacagcaattcttaaacacttctgggctcacagggagcatatatccaaacaaatggatatccttattgctggcataatcatgtcgtccgaggtcatataagaggtcctggtcaaacccagtaaaccctgtttcttcctggcattcgcgaatagcagcttcttttggtgtttcaccaggctcaacatgtcctttcggaatatcccatctagagcctctgccctggacatatgtatttgtcatacgacccatgaaaagccgtttgtcatcggtaaagaataagattcctgcactgagctctttcattggcattcattccaactttcttcaagaatatcttccatggcagtatagaccatagactctagtacaccatcacaattatatgaaccctctaccgagaaatcacagataggtccattaataccaagcagttcttctttaagtgaaatctcgataccgctcagtgattcattatcgctgtaacacagaaggcgagtatcaccattttcaaattttacatgcactgcaacagccattatttcatctccttaatccaggataaagtttcattacgagaatcatctttagatttttctttctttactttgggcttatcaaatacgccccgctgtcgctgggaaacgaattgcaaccaacgagcaagcattgcaaaccaggttccaacccctgacatccaacctagatagtacagcgtatcaccaaatactggtgaaaagaagtagaacccccagaatatcccaacaccaacaaatgttgagaaggaaaacaggataagcagaaataggaagaaatacaagaaatcatcatctttaatcattccacgataacaagttttaatcattttctgcagctcctaatccaggtgttgaaatcttctttttctttccacttcttgtatttcatacggtaagctaaaaatgtgcagcaattaatcaacgcgataattagcatccacatgaggctgaatgcgaaaacacctaaaaataaaagcataatcataaactctgagacgttcaatccaaagaatgtccctccaacaattacaaaagcacaatataaaatccatgtcacgattccaaaagctggcgccagcccatcttggttccaaaacccgtcaggtttacattcattcattttcttctcacctctttaataaactcaaacgactttttgcggttccattcaagagttaaattcttgcactgttctttccattcagctttacgcttataattattgcgagaccatttaacccatcgggaacattcaattaatcccatgatgagcaaactagttccccaccatgcaagcagaattccgaataacactgccggtgtaatatcagttaaatgcatgatatcaatcgcggcaaaggtacacattgcgccgacagttgcaccaataccaggaacaagggcataatcaatctgatcaaatttatagacataattataaacgggaggttcacttggcagatataagttactcatttctgcaccctctcacggcagtatttgataaattcatcaatgattaattgtttgcctaccatgttgttagagtcaaacatacccatgacttttggtggtaattcattaacacagtaatttaaataattgctataatcatcctgagatgtcacgtatttaaccagattaataccgagacgataactagttttattatagataatctcgataactactgtatatgttgtggagctagaagtaaaatatccatcggcattagtacgagctgatgttagatttgatggagaatcgttgaaagaataaattccgtaccgaagtgcaaagatatctacaagcttaactccgtcggaaatagacgaaatattagaaattaagtttttcagcttggaatagtctttaagaacgatagcccgcggtaaaactgtggtgttatacccgttatagcgagttttccaattttcaggccgagtatcagaataagcaaatttctcaagaatatcagtgatttcttttgggaatcctgctgcaattaattctttaatttgaggtgttgccattggaatatctccagcgcattcatataacattttattatccaagttaggggcccgaaggccccgataaaattacttcagactttccagatattcctggacatcagcagtggtggtttcaataccaggctgagtaccgctgaaggtttcaactttcatcatgatgtcttgtacatctactttagcgagttccgcgatttcaatcacgtcatcagcagaggtaatacccagagcagaagcattacgggtctcacggatgtattcgagtttcactgccaaatcaagacgttggtcatcaagcttaactacggtttcttcaatttgggctcgcatttctttatattcggcagctttatcacgtaaagccttagcagtacgacgatacagaagacctagtttagcatgggtttctacattcataccttctgccatcaagcgacgaatttcacgctctttggaagcacctgcctggtctttttcgtcagcaagtttcagcagacgcttttcttcatttaccgatttaacatgcgtggtacgcagtttagtgatttcatcaataatacgatttgccgcagtggtatactggtcttcaacagaagtgttctgtgcaacaaaggtaccgaatttagaacggatgaattcaacaagttttttcagaatagacattttatttcctttcaatagttatggtggttttattcgtacggattaatccaatcataaacatatggtttaatgattagaccctgttcatttttgctgcgctcgaatatctcgatgtaatcagtaacgtatgactctaacccgagaataagaacagtttctttgccttcttctactgttgccttaattaggcgctcgatagctattttagcttcaagacgtatatcagcaagagtttttggaactatatttgctgtatccattactatttcctcagtaggtggggagttcattataactccccaaaattattagcagttaattaccgcttcaattcgtttggttaaagcactagcagtttttgcgaatttaatttgaacagtttcggtagcagcttcttcatggtaaactcgaacgtagtactcttcaacagcaggccaatctttgcgaacatgcttaatcaaatctttcagttcacgagtttctgctacgttgaacactgcgtgttcatgttcacctttaatccaaatcgcgcgataacgatcaggagtaccgtaattgttataaccacgttcaatttggataaagttgaatttagacattttattctccgttactctgctttgttttgatggagctatagtaaccgagttgatagaggaagtaaacaactttgtgcaaaaattttagggcatctggaggaactttctggaagttagaatggatttatacagccggggatacaaaaatgccctagatgaattctagggctgtaggattacattttattatacattgtacgataattctgtctgacgactgagttcaacaaggtgatgattcagtttagctaaaagcgttttcacttcaccgatatgctgagtttcacgtgcagaaggtttagcaccttgggattcacgatacttccacagattatcgaaatagaattgaactgccttataaagaggaccattatctcttactagcggaagagctttatcgatagctttaaacagttcacctgaaccaatgatgtctccatggtctccactaattttaaggccaggaatatttttaggtttcgctttaaccggagccggttttgcggccggtgcttgtgccggagaagctccacgtgcaggtgtagtaacctttccgcctaaactttcaaaggcagctgctaccttagcatagtctttaggatcgctaatcccaataccataaatcttttccacagaagccgcaaatttgctaaaatcatggcgttcaccacgtggaaccaataccagagcgtcacgccatttcgatttagtcatgcggccaggagctgcttcaaaaagctcttcttcggttaaaaaatctttaaatttcattgcaaaaaaatccttagtgtcgattaaattactatttatactaaaaagccccgtccgaagacagggctctaataatcgacagcatcacccactggcagatgacctgcgaaattcatttctttggactcggaggcatcagtctcatccaaagaagtatagcgtcaggaggttatgcttgcgacagtgaacaaccgactagcggcaatggacgaaccattctcttctatctgacgactcaacgagggtatacgcaagtttcccttcgaattacattacatcgtattcttcaactagatactgataataggaatcgtttgcttcaagttcttccgcatatgatgttgcttcggatttagtgtgaaaaatcttaagaggcaaagaatattcttcatagccatattcacagttccagttattttttactacagcatatactttcatattttcctcattaatttttggtatgggtaggaatcgaacctacaagccattcagcaccagggcctcacgctctacctatttgagctatcacataccagaatttggtgccgattgcaggagtcgaacccgcggcatcttcattacaagtgaagcgctctaccaactgagctaaatcggcatatttggtgaagaattacctacgtcactaggttggctgttctgtccacttaaggcttgcagcaggaacaccatggcttttcaccattgatcctctcacgactgagacattcttcataatttggtgcaccgagagggattcgaaccctcaatcctcgcggcgggagattttaagtctcctgtgtataccagttccaccatcgatgcgaaatggtcgaggcagaaggattcgaaccttcgacctgcggattagaagtccgctgctctatccagctgagctatgccccgagattgttcaggcaggacttgaacctgcacgactgattccgtcagcgatttaccaccgtcgccagcatatgatgcaatatgcgagctcaaaaggtgtccgtcaccatgtctaccgatttcaacactgaacaagataattatattactgattatttatagcatttcttaaacgataaagttgattacagaattcgcgttcagtcaaaatcgtttcagaaattttatttttacccatactgtgagtgagcgtagcattccgggtagcagccaaagcttttctgaatccttcatttttactaagtgcatcgtatgctcctgttagtaaattctgatacgcttctgaggcacggtgaataggaacacctttccaataaagtgtttgagttggccaccaccgtttctttttacctttgaacttagccgatttaccaactaatgtacatacatgtgcttgcatttcaggcgaagaaaatttgagggactgcaagaatccctccattgaggcacattctacgccatcatagataaatttatgaggagcaaaattactcaaagcacatgatggatatgaactacctgaaccaatatccattacttttccttcacgtatttcaaccaatcaacttttaatgggctttctttctgcttatacgtaattccaatatggaatgcaaccggagcatcaggaatacgaatttcttctttaatgtcaaagatttctactttctcaaatactcgcatgaaatcatagtcatattcaattggattacctagccaagcctgaatagcatacataacttcatttgaacaagaataatgattatctaaataagcatcaaactcttcgtctgagcaatcatatgcaggaacatcaacaccaaagaatttcttggaaaattcaggagttacatacttctgttcagtatgaagcttttcaagaattgcttcatggttgtaatcattatttccaaggtattcaccgcggcgaccattagaagagaaccattcaagaacgtgaattacttgattaatctcttctttttctaagccataaaccatttgggtagaataccgatcggcatcattttcccaagtggtaattgccattgctaagcctttaggaataacttgtccaaatttaatatgcatttcaatttcctcagttgataatttggtgaccctggcaaagactcgaacatgcaaccaatcccttatgaggggaacgctctaccaattgagctacagggcctttatagaaatcttatgacttttataaaagccctccgaagagggcgccttgtcgggctatccacctgctaggcagaattactcacacataaaatcagctacttcccagaagtcattttcaactgctactttaactaccggagaaatttcagacgttttaatagaaacaattacatcacctgcgacagtttctaccagaccaacgattttctcgctgcgagcaacaaatttactcaccggatggaatttgccggtagcagcgaacatagcttcttggtcaacaatcagtgcgatacgtttcattctttttccttgtttgttttgatgtagtaataataacaggttattcttgtagcattaaatctcgaaaatcgttccgttttcccacattgttgcgaacataggagaaaccttaacgaatgatttgcttcgcattgcaacgtagtcgttatctactttagccaatcctgaagcaatatcagtaatacgaccgcagcgcatagaaccacgaccacctttattatatgtacgttctccgtagaaaacgatatcgccaacttgtacgtctcgacctttagaatctttcatcatatttcgcctgataaattcgtttaaaatcagtaattagctcttctacatttgaagcattagtaaacggaataacttgacgcagtttacttactttacagccagaatgataagcaataacttcttgaatatcacgctcactgaagtactcatatttgattaatgcttcgtatctgcatttaatccagacccacatacctttgcgttcatcaaaagtatatgcaaaatcagcatgaagcattaaatcacgttcagatttacataatcctaaagcaaaattagttggacgattccattgtaatttcaccgtaatagcatttactttattcgcaacaccaataaaaatattcattctatttccttcgcttgtttttggccttcttgtcgtgcacgagaacgtcctgctttatgcagtgattcgtaatatgctcggcgtctatcaatgttttctgtacgatatgctttcccgaaatgggatgttttgaagccgtaatatttcataatataattctcaatggcaagcgattggacggtatgcccggcctcgaaccgagtcacattgactttgcagaatccatgtgtttaatatatcacccatactcgatagcatatctgaacgagactgcaatcccgctactcagcttacgccatcttgtattgtgtcataccgttaatttggtctccatagaatgactcgaacattcgacctctccatcccaaatggagcgctctaccagactgagctatacggagtaatttggagcatccaaagggaatcgaacccttatcaagtgagtggaagtcacctataatagccgttatacgatggatgcaaatttggcaggccctgaaggaatcgaaccctcatcactgggtttggagcccagcataatagccgttatactaagaacctgttatttggtgggagtaactggactcgaaccagtcaccgctcgattatcggtcgagagctctaccaaatgagctatactcccatggaaagctaatcatctgattgttgatgtaccactgctatgggcagcgtttaactttcataaatttggcggagagtaaaggagttgaaccctcaccgtttccgatggcccggatttcaagtccggtttgctaccactagcgctactctccattaattggtgaaggaagtgtcatatagacacaattcgcttagcgacagccacagcgttttgcggaccgtgtatttttccaccattccttcattgttggggtgaccgatgggagttgaacccatgactacgagaatcacaatctcgagttctaccaactgaactacggccacatcaatattcactccatccatcatgaggacttcatacgaaattaagagaagaatgatcagttcaacccctgtagacgcgttgaatgaatattaatttggctggactatctggattcgaaccagagataccggagtcaaaggccggtgacttaaccgcttgtctatagtccaattatttatttactaattttcttcctttataccatccttctggtataggggaatcttttgaaatctttttagcttctattccattattaatccacattgtgccaaattgtgaattttttgaaccggattgagctagtttcagtttatcagaaatttttcgtttagtttcagaagagtgtgttttacctaaaaacggatttccatttttagctatattagctttaactgcgtctgcaatgcgggaacgtgcatctggtgtaattccagatttaatcttatccgaaaaattcagtttaaatttagaatcatttctaattttattactggttgaatttcctccaagtattcctcttgctttcatttttgacggagtccaatatgttgagttaacatagtcaaatccaccttcgccaccaagttttaaattatatacgtttcctaataaaaattctggtgtaactatttcagattcctttaaatacatctcctcagatgattcacaataatgaataacttccttggtaaagttctcaattccgtattttagaattgcctttttaattaatacacctgaacccatgtagccatcattgatgtcatcagttttatgggctccaacataatatttaccatttacgttattggttattttataaatcaaatagtacataaattattctccataccaactatgtgataattatatcacatggtacggataaagtaaacaaaagaggcggaggcaggactcgaacctgcgcgtgtcgggatatgagcccaacattctaccaactgaagttaccccgcatttatccgggttcttgaagtactaacaagtagcttgatgtagaacacgctaaagatataatcttacgaatatagagcttattccgtgggaacaaacagcttcgtcctcggcattatcttacaggactcaaactcatcttcaagaactgccacgttcttatttggcggacctaacggggatcgaacccgtgctctctcccgtgacaggggagtattttaaccaactaaactataggtccataattcgctttcagagatactctggcacgatgccgaagcaaaggggaacagaactctcatcaccttggtaccagatgaatcttgtttagcactctgttctaagatgtatccctgaaagcgaactttcaacgccgtaagaaattataagcacgtagttatcgttgagggaactcgtacacagggaattctatgccgacgatttatcagaacgtcttctgacttcttcatttggcgggccgtgcaggtatcgaacctgcctagtcatttctgacacggattaacagtccgtcgcttaccctctcagccaacgacccgaattggtgggacaccgaagatttgaacttcggacacccggattaaaagtccggtgctctaaccaactgagctagtatccctaaatttggtggggagtgatggagtcgaaccacccgagccttttgagcaacagatttacagtctgtcccgctacccctacggtctaacgccccaatggatatttttatttatactgccctgaaattaatcagagcagttgatagattaataataacaaagaaaacctaaagcatattacacaatcggtgagctctttgatttaaccaggaataccctatgcggtgaatccatatgagagagcaatacccggtgctcaggaattggacttgtatggaacggaaccacacgataacctttaggcgtaaatcctagcaaaataccaacgcttgctgcagaaagtgacccgccgcaatagtatgataccaaatcaccaggctggatttcattgtcaagagaatcagttttgacatgcttaggcgtaactaaatcattaggaattggaacgccttgtgcatcatagtattcatgggcaagaagcttataattctcttgatagaaagtattaaacgcagctctgatattcatcacaatttcctcacaattaatctttgtatgcttcagttgaacctttagcaacggtctcaaatcgggaattcagtatctcaaaatagtcttgatacgttccctggagggcttcatagcattcttctaccgtagagtagacacctctgatttggtcagagccaggagcaggataataattagaccaagttaaaagtgcgtacattacttacgtttccagctgtagtgagccaaaataagaagcactgcaatagcaagtagtgatgaatgcagtgctgccagtagtgcacctagtcctacacccaaagtaacataatcatacttagttacttcttcacggtttaaatcatagtttttgatgaaccactgcttaatctttttcatgtgctattttatccattatgaaagaaatgatacccattagaaatgcaacacttaacactgatactgtttcaggaagagacataaaggctgcacctataatgccaaaacctaatgctcccatgcagattgttgatgcaacatttctaattaattcacaacgtttcattttattctcctcaagttgatagggttatagtatcactactacaacccgttgtaaacaactttattcagcgccagcggcttttaaaagctttttaagattagcagaacctcgggctgaaaaagttaccttaccatctttttcaccgatgctgccagtcaatttagaaagtttatcactaggaacttttttaaaatcggctaatgtcccgtcaacggtttttgtaacaatcggcagttcatcatcctgtcttttagcttctgtaataaattcttggtacgttttcatgttgcttccgttttgttagtttgtttttgatggagctatagtatcaccactaggaccggttgtaaacaactttgtgaaataaatttctatttcaaatcttctgaccagttcagttttagtggctcttggtactctctatcaagcactacaggtacttgaacttcaccctcgaagtgagctggaccgacattgtagctgagagtaatgtgcggtgagtaatctgggaaatcgtgagttgctcccagagctcttgcatattggtgacggaattttaagtattctgaatctagtttaagaactagtgtacgtccgtcttgcgtgtcccatacttcaagtttacctgatgtagcaacttcaaaacttcctgaagcgcaaacgtatggaacatgaactcttgaatagcatatcgtcgtatgaatcttatgacgaggtacaggattagggaccttcaactcacgctgaaggtcctcaatagcatcaagagttttctcagagaatttagcagctacatatagaccagtgctaaaatcactgaagttcattaggcatcagcttcttcagtagtttcttctgcgaactgtgcttcgatttttgcaaccaggtcatcaagtttaacctgaccgtcttcactgatttcaacgccggacacagcaatcagtttctgtagtacttcttcatactgtgcacgcagagcggacagaccttggatggtttcagacaggtcaaatacacgaactttcaaagtatcgacttgggcttgcagttgttcagtagtcatttttgaattcctaatatagtgttgatttttgaataaagttcttctagagaaccgtcgttagttattacgatatcgccttcgcgaatcggaagtccacgctctgtgacgtgagtatcttttttagaaccttcttgctcaggacgaactacatgaataactgtagcacccatcgccctggctacatcaagttcatggtcttggcgggtatctgggacaatgaaataatcataatcaccaaaagtatcagccataaccaaagtgaatcgtttcacccaatacatgcgatcgagcttatcacagacaatgtcagtcccaagggtctgcatgagacgacgaattgaccatggctcaacaggtttatttattacaacttgacggatgacttccatcgtatcgccgtcaagaattttacgcttgctatcataaaccaccccaggtaaaggcaaatcatgatggacatattcaatagcattcgccataatacgaatcacgtctttagtagacagatttaaatcctgctcacgatcgtaatcaataccttcaatcattgaccgagtaatgcgaggaaactgacgtgatgtatcgcgataccactcagtaagcattgcatcagccaacgcatctttaattggacctgctaactgatgctttgttgcgttatagttatccataatgtagtcagcagttgtatctttgccactacgttttttaccaatcaaaaataaaagcttcaaattattacctcatagaaggatgcattcccataactttctgttgatactgggattcgcgagtatcattgacagaaggtctaccagtaattattataccatctttttcaacttcaatgtatttgtactgcaaagttgctacacataccattgctgggtcggattcttcggttaaagaatactcaatttcagataaatcactcacccaacctccgatgtagcggacagttaatactatatcatgtttatcgttatcaagaacatgcattaaaactgcaccaggaaatccttcaccgccgttattccatccagacttgtctcggtcaatgtagttttgacagcttaacatccatttgtacatttgtacccatgaatcaagattttcatctactaaaaatctaacaggaacagcgtcaaactcaaaagtagacccaggcaatttagcacgatgcatgccttgaggcgaacctacagtatcagtagcaggaatatgaattccaggaactacagctgtttgaagattagctttaaacgcttgggtgaggcccccatcagggacctctaatataaagttagttgtgttagtttgattaaacagtccagtagacattatgatttccatacagaagtagcagagtagcgtttgcctttcgacatgaactgctgcagtggtaacatgactacattcgcccaatcagccggttttatctcaattaaagcaccctttatattaccaggaatatatgctttaatcattttgtcagcgccagcaaatcctttaacttggctccagtttatctttaatctggtcttattagatatcactggcgtattagcatactgtttaagaagttcttctaaaaactgctgacgagcctttggcggaatgtagtgaaggtttaacccatacatcaatgtggttgtaccttgctttccaagaccaagataaactatcaaaggaaatttatcccagaatggaagagtgtctttgtgcttagcgtcatacatgtaagcatatagctttccaggttgaggcttggttacagaatgaccacgtatatttttctttatagtttctgcaaaccatttagcagatttattgtttactgctgcgccttcattacgaattttatctttgatagagcttcgaaatgaatttaccatcacaagagcacgctcttgtttggtcattttgttagcaggttttttctcaatttctgctactttaattgccgttttaattcttgatgcatgacgagccattgctttactgaacgtagcaggatttattcctttgctttcagcgaatgatttagacgtcatgccttttttacgagcagcagagtattcaactcctaatgctacccattgattttcactacgggatttagctttaggcgattctgcagcttcagtgataaattcaaatatagccatcagcctttccatcctaattttttaagtgaatcttcggtaattaacctaaattctatacccattttactggcagtagcttgagctgctttccacttatcaacgtttacagaccaagtgtaaatttcatcaatgtaccgtttcttcgctgatgtcgtcaactttgtgggtttgaccggaggtctagtttctttctttggcttaacttcaaaaaagaactgttgaccattagaaaacttagcccagaaatccatgaaataccggcgtttctttccatctgcattactaaagtatggaattaccacgcactctgaattccattggactacgtctgggtgattatctaaccaccgcatcatgaaattgctcccaagtagatcgatatgtgatcttacgagggtcccccttatatttacttatgttttttggtaaaaattttccgctataagccattaggcttctccttacatttatcaaaatgccagcacttcattccacgaggttttcctgatttaccacagtgaggacatgttactataggctgcaattctgaaacagctctaagctttgctcgtgtttcttctgatctcttctttccggtgttagctaaatttaatttagtttggtgctctttagttctatttttggctgcagtagacatatttttcttcatggtatcactttttgaaatacctgtcatagaaatactgcgcttttcatttgattctagcgtctgagactttccagtaagagctgcagacagtttagctgaccactcctttgaccttggacttcgcttctttcctgttaatacggcagagttagcaatagaaacccttttgcgaatccattcatatgatttgttatttcttcctgctaatttagaagacattatatgaactgcatatgataacttatgattatttggataaatcttagctaaaagctgatgcgccacataatgctcagctgctgttaagtccacaaggttatctttatcatcacttccacccatgcatcgtggcacaatgtgatgccgttctttgtacccttctaaattgcgggatttgcctcttgcaattagttggtcataaattttacggtaattcatgctattctcctaagtagttagtagggtaataatatcataaaccactcgtcatgtacactacaactttataaatactgttattaatatttataagaggataaactatgctcttctcattttttagtccgatagattattctgcaaagaccgtaaaaggtgctaaggcaaaagctatcccaaccgctgacatatttcgtaattatcgcaaatatttcgacactgtagcagaaaactatcttttacaaacatattacataagtggagctcctagaccagaagaattagcatatattctttatggaaatagtcagttgtactggattcttttaatgtgtaataacgtatatgacccgtttagagattggattaaaacccaggatgcatgctatcaatttgcacaacaaaaatatgcagatgtaggtggagaccaaatactctatcacgtggatgcaaacggcaatcgttattataacctcgagcaatatcctgaaaattcaggcatttggtatgataaaggggactttaatcatcagtaccctcaatatactggggctttagctggtgttgacatttatgaagactctattatagaaaatgaaaaactgcgccaaataaacattatcaatcctagtgatattgaagcatttctttctgatattatacgagaaatggaaaaggctcctgacagtgaatatgaatcaggtcgatataaatcccagaccacaattggagaagttgtatgattgaaatgaatgattcgttgaaatggtttaccggtgttgttgaagacagacaagacccgttgaaacaaggaagagtgcgagtacgtgtttatgggcttcacccatttgaaaaggtgcaaggagctataacaggtcttcctactgaagaccttccctggatgtcagtgattcagcctaccaactcagctgggatttctggagttggctcatctataaccggaatggtagaaggaacatcagtgtttgggttatggcttgatgaattcaaaacagcaggactagtaataggaacatattctgcgcatagaaaaacgaagccaaactacacggaaggcttttctgatcctacaggccaatatcctagacaggtcgggtcagataccaacccactagttcaaggcgatgaaactgggtatagtgctataccaaatatcattcaggacagaaatttagacattggcattaatcctgatgatgctgacttaagtgatattcctgaagacccaaatcctgcaattacaataacagatatgcttaatagggatgaaggtcttagattgaaggtctattgggacacagaaggatatcctactataggtattgggcatcttatcatggcgcaaaaagtacgtgatatgtctgtcattaataaaactttatctaatcaggttggtcgtactgttacgggaaatcccggtatcattacaatggacgaagcagtcgcgttatttaagcaagaccgcgataaaatgctttctgatattaaaacgaattcacgtgtaggacctgtatatgctaaagtcaacaaatcaaggcaaatggctttagaaaatatgagttttcaaatgggtgtaggtggtttagcaaaatttggtaaaatgcttgatgccatgctcattggtgattggaaaaccgcttatacagaagcaagaaactctgtttggtttaatcagacaaaaggtcgtgcttctcgtgtttccatgattattctaacgggtaatatggaatcatatggagttcctgctccaaagccagaaggaaaaaacctgtctgctgcttacgtagaaccaaagtctggaggtaatcctgaagacccatggactccggaagattcaagaattcttttcaaagaacctgagtcttcatataatggtcagtatccatatgttcacacaatggaaacagaatcaggtcatatccaagagtttgatgatacacctggctatgaacgctatcgtattgttcacccaacaggttcatacgaagaagtagctcccgatggacgccgtaccagaaaaactgtagccgatttatatgacatgactcagggtgatggaaatattttaatctctggggataagaaggttaacgttggagggaacgagacctattataacatgtataatcgtcgacagcaaattgatggcgataacacgctttatgtacgtggaaatgaaactaaaactattgaaggcgatggtactatttttgtcaagggtaacattaagatagtcgttgaaggaaatgctgatatccaagtcaacggtgatgccactactaaagtagatggcaaccacgacgtaaccgtcggtggtaacttaacttggcaagtagcaggtactgtgaattggaatgttggcggggcttggactgagacaatggcttctatgagctcaatcgcccaaggtcaatacactgttgatggttcacgaattgatgtaggttaatcatggctgatatacttcctattaataccacgttacgcgaagtaatagaaggtgaatacgttgagcagtactttactgctcaattatctaccaacgaaacattaaaatcaataaatattatcgactatcaaccagtatctgatatctctgtgtctgaaacctattataaaggtaattataactcagtttttacttttggaaacgatgtgcttaaataccgtgaaggcgatgagctgaagtccgcttcagcgtgggaggatttacctaatcccaaaactgctgatttatacctgtggaaagcccccagaacactagagaagacatttacctatacagttgagataatatatacagtgacagaagaatcgtctggaggttcatccggaggttctagtgctccaatcataacagaacataaaaagcaaaagatttactctcaaacagttaaaggcaactggagtagatggggcgaccagcttcgtgcttatgtatatgcggggaactaaatggctggactatcatttaataaatgcttaactgccgggcatagtgcgtatcctccgacagaagtaaatgctacacaaagtaaagtattcactggtggaatagcggtattagttgatggcgactcaattaccccacacaccaagacggttgaccctcatgatacgcatggaggagttgttcaacctcgcacatccaaggtatttgtaacaggcaaaaaagctgttcaaatggccgatccaatttcttgcggcgacactgtcgcgcaatcaagctcaaaggtattcatacactaatggctattaaagaacctttaaattatcagttaacgcgtactgcaaacgctatcccagacgcatttactggagcaacattcgacgaaattaaaaatcagcttattaactggcttagtggtcaaaaagagttccaagattttgattttgcgggttcgcgcttaaatgtgctattagatttattagcatataacacgctttacatacagcaatttagtaatactgctttatacgaaagctttattggaacagctaacttgagaagttccgttgttcaagcagctcagcaaaacgggtatttgccaagttccaaatcagcggctactgcatctattatgcttgaggtaactcatccaaatccagagccagcaataaaaatacctcgtggaaccaagtttttagcatatgcacgagattcatcagtagacccatacaactttgttgttaccgaaaatgttattgctttaagagatacttcagcaccagaaggagttaataggtatcttcctattgtcaatttggcacaaggacgtattattcgtactcaattgtcatatgacccgaagaaacctattgttattcgtgatcagtcgattgaccgtaagcaggttaagctgtgggttgatggcgctgaatggactaactggacagacaggtcaatggttcatgcttcatccatttcaacaatttattatatgcgtgaaactgtcgacggaaataccgaattcttctttggtgaaggcgtggcagaagcctctgtagcaggaggagttcttgaaagtaatttcattggtggattaaaacctactaagggcgcgcaggtagttattgaatatattcgtactgatggtgaatctgcgaatggcgcaactgatttcagctatgctgatactctgcaatatatcgtagtaaacaaaatcattgaaaactggtcagattctcctgattatgttggagctgatggcggtggtgaacctgaagacatcgagcgtattcgtgagctcgcccagattaagcgcgaatctcagatgcgatgcgtgtctaaaactgactatgaatcattcgttagttcacgctttggttctatcgtacaagcagtacaatgctttactgatcaggacaaacccggatatgcatttatcgcaattaaaccaaaatctgggttgcagttaactgctgttcaacgagaagacattcaggattatctaaaacctttctgtcttgctccaattactccttcggtaatgagcccagattacttattcattcgtcataatattaaagcttcttatgcgctgaataagttacaagaatctgagcagtggttacagtcaaaaattatagactcaattaatagatattacgttgatgaagttgaaatgtttaacaaaaatttcagtaaatctaaattattgacctatattgatgatactgaccattcaatcatcggttcttctgttgatattcagatggttcgtgaaattgtcaactatttcactcttcctagcgcaggtattaaatactataatactattactccgcggacgttacgttctggtgatttggtctttactgtcactccaactgcagattcatatccagttaatatcgttggaactgacccagataaaaatggtaaaggaaatatggtcattggaccatttaaaccaggtgatattaaagagaatactcatattcagccatatactgaagacgattttgatagaactactaatggagaaagaactcgttggtacaaaatcggtgaagtagattattatggtgataatatttactggagccttggagctattggagccgatcctcttcagtttgaagaccagagtattgagctttattctactcctacccaggatatcgtcttcgcccgcgatggaacacttatcgtatttgagaatgaccttcgtcctcaatacacaactattaaattggagcctattactcaatgacaattgcaccgttcgtcaccagcttacgaattcataagctatctgcgaatcaggtcaatattcgttgggatgacgttggtgcaaacttctactattttgtagaactggccgaaactcgaaacagagcgggggaagttatccccgctgataacttgagttggtcttcactgggttataccgcggataatgattggttcgaacaaaatcgtattgaaccgcttacttattataaaatgcgtgttcaaactacgtcagcagggtttgagccgtctgaatgggttgaaacagaagagttccaaacttttgaagaaaacgcatacacatttgagcatatgcaagaattcagtttagtgaaagaattcattaaacagaagttttctttaaacaacatgtcgtatgttaacttcaacacatctgccatgatggcatctttgatgactgagtcttttcagtttagtcctgaatattctcatttatcagctattgaaaacttcgttgtaggtgaatctggatatcatgaaattcagggacctattgaagcagtgtgtgttgataaaaatagaactatgctgggagaaatagacggaattttgtatctgtttgaaagattccaacatatggttaaagtatcaaatgataaaggacagaattggcaatacgttcagttatttaatgaccgtgtcggaaatccggtttctagagtggtaatttatcaatctaaaactacttcttatgttttaggatatgataaaatcttttacggaaggaaatcatctgacgtacgttggtcatcgaatgaagttaagtttagcgataacgaagttacatttgctaaattgggagaccagttaaagcttggctttgaagtagagttattcggaacgtatgcatcattgcctgctgacgttaccaaatatgctgaagcgtttacctgcaatgacgactatttgtatgttgttgcaaaagacactgtccgtaaagttaaattaaaagatgctccaatagatactgaccctttaagcccgacatttggtgaaaaggtatttgaaaaggaagtatctcatataacaggcaatcctaaatctgtatgctttaaaatggattccgttgggggcaaaatctttgcccttattaccggggaagttaaaaccttaggattagacccaacagacccaaggaacgttgtggattctgcaactaaaggcgtctatgtttaccaggaaggcacaaatacttggaagcgtgtatttggtaataccgatgaagaaaaacgtcgtatagagcatttatggacttctatgtcaactgacggaaaggaaatattcttttcatcagccaattttaagacaacagagtacgctcaggatattgagcttgagacgaaatatccagaactaatttctaccgcagttaaaaatgttaacccaattcagtatcactctgataagcattatcacatgatgagtttcagagcagatgaattttcaagatgggaaacatttgttcctggaccgatgaggttttatgctgaaccttggtttgtctggatggctcgtgaaggcaacagatgctggataagtacagctgaccatgcagttgtcatttataatgatattctttatcaaaaaagagtagatacagcagcacagggaactaccgagcgcattctttcggaagtgtgggataaaggcgacgcaacgttttattgccctccggtttcatttaacggatttttgcagtatgcttctggtatcatgtttcacgagccagatggaaagctgataggttattatgcattcgattatcgtgttcgtgaccaggtaacgcttaactggaaaccaactgatgtaatgtttaaggcgtttctgcagaaccaaacccgtgaagaagattggactcctgaacatactccaggcttgcgtgacccggatttacgtccgtatcttactaaaatgatgccggatagttacttgctacaagatagtaattttgaacacttttgtaagtactatctccaattcctttcagatggaaatggaacacattacaacagtctcgttaatcttgttaagaacaaatatcctcgcgaagaaaatgcatgggaatatctgtggtcagaagtttataaacgcaacatttatctgagtaaagacgctcgtgacgctgtcgtccgtttctttgaagcacgcaagaatgatttctatgctactaaaggaattgaagactcatataagttcctgtttaaacttctttataacgaagacgtcgaaatcgatattgagtcaaagaacactaccgaatatgacattattgttgaaagtacaaatatttctgacgatttagttggtcgtacgatttatactgcttccggtcgtagtaatgtgacttatatcgagagagaataccgggatggtcgtctgttatggcgtattactattcataacttatcaggacggttcattgaaggccaggaaattaaatcagagcgtacggactttgagggtattatagttcaaggtgttcgtggaaaggatatgctgagtaataacattgattatataaaccgcagccgttcttactatgttatgaaaattaagtctcagcttcctacttctcggttccgcgacgatgtattaaggtttgttcatccggtaggtttcggtttcattggtataacattgctgacaatgtttatcaatagtggcttaaatatgaagcatgttgagactatcataaataaactcaagaactataaatgggatgcaggactgccatcagtttatcctgatagagttgctattatcgcttcagatgatacaatagaaagagacccaataaccaatgagcctaggtattcttcacgtgctcaagctggtgaacctttcccgttacctgctaactataatcaagaaaataacaatagtgttatcgctggacaaaaccctggacaacgacgtaagccgttaagtcctacgtttgaccaatcagcagtaacgtttgctaattatcgcgatttagttaaccaacgtcttaaagacgatgcaggtaatcctcgcgatcctgaaaatccgacacaggtaaaaattgatgagtaattcaacaagagcaagttcaacgcgtagcacgatttatcgtgctatcattacatctaagtttagaactgaaaagatgtacacattttataaatcaattggtccgggaacggaccaaaacacgttgtatgtttcatttggtaaaagcactccgtggtcagataacgaatctgaacctgggtttgcacctccatacccggccgataatgaagacggtgtggttgatatttggacaaatatgatgggtgcagtcaaaattgaatcatctatgcttgactgtgttgttccaagaagagactggggagatacaagatatcctaatccacgcacatttttaatcggcgatatcgttgttgctaactctgcgccatataacagaactgatgctggatttggatggatggtatatagatgtattgatgttccaaagaatggaatgtgttcaattggtaatcttacaagcaaagaagaatgtattaagcttgggggtaaatggacgccatcaactatttccggttcagcgcctcgtgggcgtggtgatgcaaatggtactgtcgatttgggcgatggatatctttgggaatatctatatgaaattccagccgacgtatcaattaacagatgtacaaatgaatatatcgtagttccttggccagaagagattgaagaatctccagctcgttggggatttcaaaacaacttaacttggcaacaaaacgactttaacctaatctatcgtatgaagtgtaatacgattagatttaaagcataccttgatgcaatttattttccggagtttagtcttccgggaaatactgggtttaggcagttgtcaattataactaatccgcttgaagttaagccaatgccaaattctcctaacgttaaggctgaaaaaggttggtatagcgcttctggtcttgaaagacagtcaggtgaaatgatttacatggaaaatcgacaacctattatacgttcaatggaccaaacagaagagttaaatttaattttcgagttttaattatggggagcctttggctccccatttttatataaataagactatactttgatatgaggttaacctatgtatacagataagggtaaaaaaataattgacgtcggtgagattggtaatgcttctaccggcgacattctgtatgatggcggtgtgaaaattaatgataacttcgacgccatttataacgccttcgctgatcaacgattatttgcagccggtggtggagctttaaaccaaaaaatccacgcaacaagttattatcaaaagataaaatttggtgatgctaactcggccggtacagttccgatgggttcatgcatagatgctgattgctcagaaggggcagttcaaattcgtctttcaaaaggtaaagcgggagaagctgtattcgttgtaaatagtaatggctcagcatcaaaagctagatccataaaaataacaacaaacggcgaaggtgtagcagatgcatttaaagacggatcgcgagaattgattatcaacacaccaagatgtagaattgaattgtggtgtgttgaagtcaaagctaacggtgctgcagtttgggattattcaatttcaagtatgtttggcagcacatattcaccgttagaagctacatataatttaacaagttctcctattaatattcggcttggatataacgatgattactctactgttaaattgttattaagcttcagcgcaaatccaggtggtcaaaccatcaaaaggcaatcatctgaagtcatgcttatgattgacccgactattacttcatcagcgccaaacggaagagtatttgacactgaatatgcagtgttaagaagcggtgaatcatctgaaaatgaaaagatgtattctatttcatactctattaacgcgcagaaagatttaatatgcacagcttcaacatcttatggaaacgcacgtttggcagttaaagttattgctacacagaccgtaggggtatctcaataatgaaacaaaatttgatagtaggccaatctgtagatgatgggtctggtgattacctccgtaaaggtggtcttaaaattaataacaactttgatgatttatattcagagttaggtgatggttcagttccatttgcagcaggtgcatggaaaacttttaaagctagccctactggaactactttaaatgctaagtttggtcaggcctttgctattaatacccaggcagcaagagttaacgttcagcttccaaagggtacagccaatgactataacaaagttattaaacttcgtgatgtttggtcaacctggcgattaagcccaatcacagttattcctgctcaaggcgatacattaaagggttcagcttctcctaaaattttcaatactaacttccaagatttggaattggtttattgcgcccctggccgctgggaatatattgaaaataaaactgtagataagctaactaatggtaacttaagtactgtagcgaaaaaatcaattattgctactgcgggtcagactgactttcttaacatttttgatggcgtagaatataacgaagactcgcttaatgtatatcgtcgtggtaatattttatattacggtgaaaccagcgttatggataaagccaatgctgattacggttctcctggaacggtagcgggtcaattggtagaattaaacggtaaagacattcgtttaaaagttccatgcgttgaaggggaagtaataacatttgaaaccttcttagatggaattggtgtatatcgttcttcatacaacaagttagctatccagatacgagattcagcccagactacatccaagacgattcctgggtcaatgatagtagataaccttgctactctccgcagaatcactctggatgacatgggtgtacttccaggcgtaggggtaaatcctaactcgcttgaaatttcattgaacggaaaggaattactcgaagctggaactgcaggtcttcctttattttattgtgaaggtgcggaaggtggatacgcagaagactgtataaacaatggtggtcaatgggtaaattctaaccaagattatagactggaatttgactcaactggtactaacgtcgaagctattatttttggtgaggcgtttgaagataaagaccttcttaccgtccgttggttcaataataacatcggtactactatggatatcaatgatatcatggcagaaaccgaccaagtgtatatgaatgctgagcaattagtaactctaaaaaatcgcattgaatacacaaattatgatgaacctaatcagaaaaatatgcgtcctgtcgctgatgatgttatgattaaagtcaataatattgcagcattttttgacgtaatttatccgattggcacgatttatgaaaacgctcacaaccacgcaaaccctgctgactatatgggatttggggtgtggaagctttattcacaaggccgtgttactgctggttggaataatgattcatctgatccttatttttcgcgtaacaacaataacttaaacgaaaatggtcagccatcattaacagcaggtggaacggttggagatttgacgtttacattaggaaaagaacacattcctgagttaatgtcaagagacaaagttctaatttcagaccctgaacatggcagcgtagttattggcggatgtcaattagacccagacgcacaaggtccaggttattctaaataccgtgaagacactgttgcggtaaacaacggtgtagttccaaatgacatcactaaaattcagccaacaatcaccgtttatcgttggattagggtaggttaaaatgacgattgaaactaaaactcgtgaaggggctaaagttaattcaagattaactgccttttcagaatatcgcgtagacccgcagaatattgcggtaggaaataaggctcctatagggagcctaacctttgaacaaatggatttaggtgtttggtatccaaacactgaagctgctattaatgatttaatgtcattacagtcagcagaaattggaactattatttgtaatgacaccggaatatctccacaaccagcacagcaaattacacgcgctactttttcaggcgtagtttcgttagaacctaaagaagacggttctgttggcgacccagtaataattcacattcttggattgccaattagaattgcgaatggtgatgactttgcagcagtagctaccaggtggtatgataaggtaaaagaattagaagcagttggaaaagtggttcaacaagttactcaatcacctgcaactcctcagtatgttgatattattcatctggattatcagaaccataattttgaaacatataaaaaatatggtttaactgttgagtttactgttacttcacctgctaaagcgggttatggacaatgggacgctattggtaacgaaactaaaaccttcggtgcaaacacatttacattccactattttagaaggatgggataatggcccagaataactataatcactacagtgatttggccaaatatacgatatttgacccagcaaatacacaatggccagttgctacaaaagacgtccaatcagcgctagcgttgattggaagctgggcaagaactgacattggattacctgcagcatctccaaccgtagcaggtataattcgtacagctacgcaggccgaagttgaagctggaactgtaggtaatgctgcggttaccccagctacattaaaatccacaattacccggcctgaagcaactaccgcaattcttggcttaacccgatacgcaactaatactgaagccgcagcattaaccgcaggaaatagaactattacagctgctgctcttggccatgtgtttaaaaccgtaaaagcccaagaaaacgtagatggaactgttaggttaacgactgccgctcaagctcaagcaggaactgatgaaaccaccgcagtaactcctaagcgtgttgtagaaatgattggaaagttcagcgttaatcctcctacttatacttctgcaacagaaagcaacttgggattagttcgtgtcgcaacccaagcccaggtagcagcaggtgctgttcacgatggatacgcagtaactccaaaaaccttcatggcatcaaaagcgtctgacagcgtatttggtatagtaaaatttgctaaagactcagatgtggcttcagctacttctaacaatttggctgttactccaaaaagtctacaagcgttaaaatcaaccaaggataaatatggattaacccgattatcaggttctccaacatcagatgcttcacttgctgcagctgcgactgatgctgtctttaaaactcgcaaaataaatggaaaaacccttgataacgatataacaattaccaataacgatatcaattgttatacacgccctgagtcggatggaagatatatgccagctggaacgcgtgtcggtaatattacttgggtagaaggtggaacttatattcctgctggaaactggtttgggtgtaattctccatatgaagccacttctagattggcgctgactctcacaataaaattccaacgtaataacgacggctatgacaatagaatttggagatttagaataactgtcaacggggaaaatagaggagaacatacactcaatatagagaataccaagggcggtagaaatggtcattcgtggagatttgaaggatatgctacaggctcatatattataaatgatgttcctcctaacgccagagttcaaattgagccatttgaaaatatccgtggcgataattattcagcgtcattaacgttttgcaccaaccgatagggaattatatgacaaaattagtagactcgcttccgtttgtagacggaattccagacgattttcaacagagaattaactggataaaaaatacagagcctcttaatggggcttcaacccgctatggaaatgatggagaactgaatagagcttctgtgcagattcagaaaaatgtggttcaggtacataacgatttgaacaacgttggaactgctgtagaaaatattcaagtagatgtagaccaaatcaaaaaatcgttagaaattacaggttcttctgacgccattgagcaggtttatatcaataaaaagaatattgaaaagcatgatggacaaattcttaaattagaagaagacaccgaaaaacttcgaactgaccttgattttctcgaagaggatgtaggtgtttatgattctagtaaagatgattattacagaacagttcgtgataatatagtttgggttaaacgtgaaattggtgcgtatcctgggcaagatgttaacggacagcctaagcaagacgctccgggttctggtatgaaataccgaatcatcaacaatgcgtcagctatagtaaaacatgacgagcgtattcaggcgctagaggatgcatacaatgattcagacgtaggttctctgactattgaagtaaacgacctgcgtaaagaagttggtcctaaatccggagctacgtcagcttcaatttatgcaaggcttgtgaataacgctgatgctatttccgcagctaataatgaaatctttgctattaaccaagccattgattttaccaatccagtaaaaattggagctcgtactactagattagaaaacgattatcgtatagttgacgcaacacttaactctgcacaaaccgggttagttcctcgtgtcaataatattgatgctcgtttggggtcttctgataagcctgatactattgaaggaaaaattagttctctttcaactgaccaagggtacatttctgatgttgtaggacgtgatacttcatcagggcttcagggtcaagtagcatggataaatcagcaagttggtattgttcctggcggacagccgattcctccggggtcaattttagcgagaatgaccaatgttgaagggatgcaaaactctcagcagtctgctatccaggacattcaagtagaacttggcaataacagcgaagggttaaaaggttctgtatttacgttacagactcaaatgaatggtgacttttcgtcagaaaatccagttcaacgggatggtgtatacgctactgtagtagaattgcaagataaattcgtgactgcagttactgacgtagaacagactggagcatacctccgtaaacggggcgaatggtttaagaagccttcatcaataggtgaattcagtaaagaagatttcactgttgatttaagttctgatgcattggtaaatcctaactcattggtcgctgcttcatttaatgctggcattcgtattgttgatgatattattgttgatgacgatggcgtattttgtgtagaaactgatacagttatcgaagcttctgattcagataaagctgtccaaattgttattctcgtcaataacattgaggtgtttacttatagcctaggtgttaaagcagtaaccggcgagcaactgttgaaaaccaagaaacttattaagttttcgtctggcgatgcaatcaaaattgtgtatagagctgcttcagaagaatcaaaagttcctgttagtattaaatcattggatattactattcatccagcagtataatgaaagggaccttcgggtccctttttcgtataaatagaatataaagaggagcttatatgtcatacaacacatacaacccaaaaacgcttaaagacgctatacttcgacgtctaggagcgccggtaattaatgtcgaagtaactgaagaccaaatttatgattgtattcaacgagcattagagttgtatggtgaataccactttaacggattgaataaaggctatcaagttttttatattggaaaagatgaagctgacaacgcaagatttttaaatggtgtgtttgatttgcgtggtcgtaatgtatttgctgtcactcaaatcgttagaacaaatgtaggttcattaacttcaatggatggtaatgctacctatccgtggtttactgactttttaatgggaatggccggaattaatggcggaatggggtcaagctgtaataagagttatggaccaaacgctttcggtgctgacctgggctattttactcaattaatgacttattggtcaatgatgcaggatttgcttgccccacttccagactattggtataactctgataatgaaatgcttaaagtaatgggcaacttcatgaagggggacatcattgtttgcgaatgctggactaaatcatttatgaataccgacatgatggtaggtaatactgcaggttacggcttcgctggtgaacaaacttccgaccattggggcttaggagataggtatcagaatcctaaccttcgcaataacggccaatatgcaggtgaaggtaatacaaatagagaaggtgcttataataatcgttgggtaaaagattatgctacagcactgactaaaaagttgtggggtgaaattctgtttaaacaccaagggctacaattagccggcggcgttacagttgatggccaaacacttaaagtagaggcccaagaagaaatcgagaggctccgagaggaacttgatttacttgacccgggttgtcctattctgttggggtaaaagatgactacatttaattctagtttattcgctcgccttgaggattaccgaggatacaataaaactaatgagacagaaattctcaatccttatgtgaatttttataatcacagaaatagccaaacgttagcagatgttttatcagctgaggctattcaaatgagaggaattgagttttatttccttcctcgcgaatataacaatccggatttgcttttcggagaagacccatcaagtaaattcaccaaggcttggaaatttgctgcttacttagactcttttgacggttattctggtgataacacgttcttcagtaaatttggtatgatggttaatgatgaagtcaatttgactattaatcctaatttgttcaagcatcaaaccaataattcagaaccaaaggcaggtgacctgatttatttcccgatggataattcgctgtttgaaattaattgggttcaaccatatgatccattttatcagttaggtcaaaatgttcaacgtaagattactgcgcagaaatacatttattccggtgagcagcttcaaccagaattgcagcgcaatgaaggaattatcattcctgagttctctgaacttgatttagaaccaatcaaaaacattgattctcttgctgatatttctgacgtacaatacgcagaaagcgatgcaattaataaagaagcctctgaatatgttcatccgtattatgttaataacggaagaggacttgagtctcctcctaaagcagattcgtttgatgacggattttttgaataaataaaataaagatgggacctttgggtcccttaggagaaatcatgtttggacattggtataattcgtccttacgccgatacattgtattgcttggagatttattttctcatgtacaaattgctcgttggcgtgaagacactggactaaaatatattaaagtacctatcacttatgcttcaaaggaaaagttcctttctcaactcggaaaatggactgctatccagtctaccgagaataaagcaaagatagaaactgttttgccaagaatgaatttgcacttggttgatatgcaatacaacgcgatgtataaaacatcacagttgaatagaaccaaatcatataaaaccccttcaaaaattacatctcagtataatcctactccgattaagatgatttttgaattgggaatttatacacgcaatcaagatgatatgtatcaaatcatcgagcaaatcgttccttattttcagccgcattttaacacgactataactgaactttacgacaaagacacaagctttaatcgtgatgttagaattgtattacagtcattttctccggatgaagctgttgatggagataatatcactcgtcgtagattagaatggtcgctgatgtttgaagtcaatggatggttatatcctcctgttgccgaggttgacggcgaaattagaaccatttatttagatttcttcgctaacagcaaagagctaactccagaaggaaactttgaatcagtagatagcgaagtcactccacgagatgttcaacacgaaaattgggatggttctagtaaacaaacttattctcacgatattcctattccggtaaatccggaggctcctggaccgagaggtgaaaaatgagtgaattacaattagatatggctaaattattagacatcgaaggaattcctggaatagaaggacaagaaattccagtttatgaaaaacttgaattagttgaagttaaatctaatccaaatgaccgtaaacctgacctcgaagatgactattcggtcgttcgcaagaacatgcacttccagcaacaaatgttaatggacgcagctaaaatatttttggaaactgctaagaatgctgactctcctagacatatggaagtatttgcaactcttatgggtcagatgactacaaccaacaaagaaattcttaagcttcataaagaaatgaaagacattacttctgagcaggttagtactggaaaaggagctaatcctcaacaaggaatgaatattcaaaacgcaacagtctttgtagggtctaccgctgatatgatggatgaattcggtgatgcctatgaagcacaagaagctcgagagaaaatagtaaatggaacagactcaaccgtttaacgttctgagtgatgcccatcctttaaatgacgggaaactgacggttattcgtcacccgtctgaaatggaaacgaaaatcgaaaacggagttcgtttctttaaatcgcaatgggatgataagtggtatcctgagaaatttgaagactatcttaagttgcatgggatagttaaaattcgtttgcaaggtgaagacccagctcatttccaaacgtttaaggacaaaaataataagcgcacccgctatatgggattgccaaaccttaaacgagcaaatattaaaatgcagttgactcgtgaaatagttgcagaatggaagaaatgccgagacgatattgtgtacttcgcagagacctactgtgcaattacgcatattgactacggtactatcaaagtccagctccgtgattaccagagggacatgctagaaatcatggcggctaaacgtatgacttgttgtaaccttagtcgtcagcttggtaaaactactgtagtagcaatctttcttgcgcacttcgtgtgttttaataaggataaagcagtaggtattcttgcgcataaaggctcaatgtctgcggaagttctcgaccgtactaagcaagcaattgaattacttcctgactttcttcagcctggtattgttgaatggaacaaaggctcaatcgaattagataatggctcatctattggggcatacgcttcgagtcctgatgctgttcgtggtaactcatttgcaatgatttacattgacgaatgtgcgtttattccaaacttcatagatgcatggcttgctatccaacctgttatttcatcaggtcgtcgttctaaaattattatcacgactacaccaagtggattaaaccacttctatgatatttggactgcagctgttgaaggtaaatccggctttacgccttatactgcaatttggaactcggttaaagaacgtctatataacgacgaagatatgtttgatgatgggtggcaatggtcacttcaaactatcagtgcttcttctcttgaacagtttaaacaagagcactgtgcggaatttcatggcacatccggtactctcatttccggtatgaaacttgccaatatggattggattgaagttactcctgactcgcacgggttttataaatttaaagaagcggaagcagaccacaaatatattgcaactcttgactctgctgaaggacgcggtcaggattaccatgcactaaatattattgacgtgactacatctgaatgggaacaagttggagtattacattctaatacaatttctcacttaatcctcccggatatagttattaaatatctaatggagtacaacgaagctccgatctatatagaacttaactctacaggtgtttctgtagcgaagagtctttatatggatttagaatatgagaatgtcatttgcgattcaatagttgatttaggaatgaaacagacgaaaaggtcaaaagccgtcggatgttctgcactaaaagaccttatcgaaaaagataaactcattattcaccatcgtgctactgttcaagaatttcgtactttctctgagaaaggagtatcctgggcggcagaagatggatatcatgacgatttaattatgtcactcgtaattttcgcatggttaacaacacagcaaaaatttgctgatttcgtggataaagatgaaatgcgtttagcatctgaagtttttaaacgcgaattagaagatatgaacgacgattacgctcctgtagtgttcgttgacgccgtgaatagcgcagaatatgcgcctcaagaacatggtctttcatttgtataaataataaaaagcaaacaacattgaggatatatcatgcctttagtctctcctggaattgagctcaaagaaacgagcgtacagagcacggtagtacttaacgctacaggtcgtgccgcaattgtcgggaagttccaatggggtcctgcatatcaagttactcaaatcactaacgaagttgaactggttgatatgtttggtggtcctaataaccaaactgctgattactttatgtcagcaatgaactttctgcaatatggtaatgatctacgtacagtccgtgtagttaatcgtgaagctgccaaaaacgcatctccactggttgataatattgagtgggaaatcacaactgctggtagtaactatgaagttggtgataaaattacggttaaatatgcagaccaaactgtagatgacactggttcagttactgaagtagatagtgacggaaaaattatgtcggtgttcattccgacggcaaaaattattgcatatgcaaaaagcattaatcagtatccggatttaggtgattcatggacaactactattacttcacagagttctggtgtttccgctgttattactctgggcaaaattatttctgattcaacagttctgttaactgaacctgaaactgcccatgaagaaatgacaaaaactgaattccagactgcgcttgcgcaatataaaatgcctggaattgtagctgcgtatcctggcgagctcggaaaccaactggaaattgaaattgtatcaaaagccgcttttgataaaggcgaacagctgacgatttatccgagtggtggacagcgtgcatcaaccgcaaaagccgtatttggatatggtcctcagaccgatacacagtacgctatcattgttcgtagagatggtgcggtagttgaatcaacggtgttatcaacaagccgtcaagataaagacatctacggaaacaacatctttatggacgattatttctccaaaggttcttcacgttatatatttgctaccgcgcaaggatggcctgaaggattttccggtgttattcgtctgggtggtggggtttcagctaatgaatcagttactgctggcgatttaattcaaggctgggatttatttggtgaccgtgaagcattgcgtgtaaaccttctgattgctggtgcttgtgccggtgaaaccgatgaaatcgcaagtacagtacaaaaacatgtttcgtctattgcagatgagcgtcaagactgtttagcactcatttcgcctccaaggtcaacgattgtaaatattcctctgactcgtgctgttgataatttaatcgactggcgccaaggcgatggaacttatgattctgctaacatgaacattaataccacgtacgcggcaattgatggtaactataaatatcagtatgataaatataacgacgtaaaccgttgggttccactggctgccgatattgcaggtctgtgtgctcgcactgatgatattgctcagccttggatgtcaccggctggttatcgtcgtggtcagattctgaactgcattaaacttgcgattgaacctcgtcaagcacatcgtgaccgtatgtatcaagcaggtattaacccggtaacgggtcaaggtacaggtgaaggtttcattctgtttggtgataagactgcaaccactgttccaactccgtttgaccgaattaacgttcgtcgcttgtttaacatgctgaagaacaacatcggtgattcttctaagtggcagctgtttgaattaaacgataactttacccgtagttctttccgtatggaaaccagccaatacctcgcaggtattaaagctctgggtggtgtatatgacttccgagttgtatgtgataccacgaacaacactccagcagttatcgaccgcaacgagtttgtagcgagcttctacatcaaaccagccagatcgataaattatattacgcttaactttgttgctacagcgactggagcggatttcgatgagttgatcggaccacaataaattgtacattttcgctaaatcctgatacaattgcacatatgaaatattatgtgcaattaaggaaaaccaagtgattatctctaaatttgttaaagtaaaaataattcctaaaaattttaaatacttttcggaacttggatacaagctgcctcctctgggttcgcctaggcatggattcaaatattattcaattgatatcagtgttgaccatcttgagcccgggtcaaacatatatgttgattgtgtttgtgataaatgcggtgaacaatattcacagcgttattgcagagacactgacgtgtgctatgattgccgtagcggaaaatttaagataggaaatactattggaacagctaataagggtaaagtgttgtcttcgatgacaggagaaaaccatcctcgctggaatccaaacaagacagaatataatgaatatgctagtaaagttagaagagaaacttctaagcataaaccaatttattctacatgggaaaattttgataagattggactatgtggaatacctggagcgtatcaattagaccataaggtttctgttgcatatgggttttacaacaaagttcctcctgaaattataggaagcattgataatttagagataatcacttgggaagaaaatcggtcaaaatcaaagaaatctagtattgatttatgggatctattgaaatgaaccccaggacattctggggtcatctaacctttagatgataaattatattaccgcacactttaatagcctctacgatgatgtagtcaatcaagaggctatataaatatctataggaaacaacgatggaattaacagacatcacccgtgcgtttgaatctggtgactttgcacgtcctaacctgtttgaggtagaaattccttatctgggtcgtaacttcagtttcaaatgtaaagcagcaccgatgccggcaggtatcgtagaaaaagttccagtcgggtacatgaaccgtaagattaacgttgccggtgaccgtacttatgacgactggactgttaccatctataacgatgataaacatgaagtacgtaaggcaattattgcttggcaggctcaggcccacgctcaaggcaatgatatctctggtatgactccagccgattacaaaaaggttgctacggtacgccagtttagtcgtgatggcaaaactatcacaaatgaacacaccattaccggtctgtggccaactaacgttggtgaagtacagatggactgggattcgaataatgaggtagaaacgttcgaaactacatttgctattgactggtgggaataatgttatggggcttcggccccgtatcgaagttctgtgagttatttgcttaaatatctgacaaaacttcgatataaatatacttatagataatttcggagactccaatggcctttcatattttggacttattcgctccgtgggaaaaacgcgacgaagctgaatataagcaacaaatcaacaatgacctagagtcaatcactgctccaaaatttgatgatggagctcgtgaagttgaatcaaacgaaaacgaaatccagtataattcattcaaccaaatgatgtttggttccaatgaacctggaatgaaaacaaccgctgatttaatcaacacttatcgtagtttaatgaataactacgaagttgacaatgctgttgaagaaatagtttctgacgcggttgtatacgaagacggtcatccagtagtttctcttgatttagattctaccgacttcagtcaagcaattaaagaccgcattcttgaagaatttaatacagttttaacatgccttaatttcgagcgaaaaggagccgaccatttccgccgttggtatgttgactcaagaatattcttccacaaaatcgtcaacaccaagaaaatgaaagacggaattcaggaactgagacgtcttgacccgcgcaacttacaattcatccgtgaaatcgttaccgctgatgacgctggcactaaaatcgttaaggggtacaaagagtatttcatttacgatactggcaaagaaagttattacgcagatggtagattatattccgccggaacgaaaattaaaattccacgcgatgctatagtatatgcacattctgggctagttgattgctcaggtcaaaacatcattggttatttacaccgagccgttaaacctgccaaccagttaaagctattagaagatgcgttggtaatttatcgtattactcgtgctcctgaccgtcgtgtgttttacatcgacactggtaatatgccttctcgtaaagcggcagcacacatgcagcatattatgaacacgatgaaaaaccgtgttgtatatgatgcgtcaactggtaagattaaaaaccaacagcataatatgtcaatgacagaagactattggttgcagcgtagagatggtaaagcagttactgaagtagatactcttcctggtatgtcaggtatgagtgatatggatgacgtccgttactttagaacagcgttatacatggcattgcgagttcctctttcgcgcatgccagatgcaaataatcaaggtggtgtgcagtttgatgctggcacagcaattactcgcgatgagcttgattttgctaaatttattcgtagattacagcataaattcgaagagattatgcttgatccacttcgcactaatctaattcttaaaaaagttttgtctaaagatgagtgggaagacgaaataaataatattaagattgtgttccataaagattcatatttcaccgagttgaaagatgctgaagttatggagcgtagaatcaatatgctcacaatggctgaaccgtttatcggcaagtatatttctcataagacagcaatgaaagatttccttcagatgtctgacgaagaaattgaacaagaagccaagcaaattgaattagagtctaaagaggctcgcttccaagaccaagaaaatgaagaggatttctaatggaaaattatatttccgcaattgaatccagagacctcgtagcagccaaaaaagcttttggtgcaattatggctgaacggacatctggtttaattgaagagcgcaaaaaatttatcgcagcgtctgtcatgattgagggtgaagagcccgttgacgatgaagatgaagacgacgaagatgaagataagtctgagaaagacgacgacgaagaggacgagtaatgcttatactgcctgaaaatcatgaattagttatcgacgctgtcgaagcttttcttcctgaagcacaggcacgttttgataagttgtccgcagcgctttctaaagatgatataaataaaattgtagagaacatggttacttctgagcctgatttagcaattgctttaggttcaattaacgaatctctacaattaaatgaatttatcgttaagcacgttgattctaaaggtactattacacgtactaaggatcgtaaaacacgtgagcgtaacgcgttccaaacaaccggactttctaaagctaaacgccgccaaatcgcgcgtaaagcagtaaaatcaaaacgtgctaatccatctgctcaaattcgtggattacgtaaacgtaagaaagcacttaaacgccgtcaggctctggggctaagttaatggaaaacctcaatgaacaacttttaattgagcattggggtcaaccgggcgatgtaattgatggtaaacccatgctggaatctattatcgttgaaggcgaaaatgaatctggcttaaaacctggtctgtatatcgaaggtgtttttatgcaggcagaagtagtaaaccgtaataaacgtctttatccaaaacgcattcttgagactgcggtaagccgttatattaaggaacaggttgctactcgtcaggctctaggagaattaaaccatccacctcgtgcaaatgttgacccgatgcaagccgcaatcattatcgaagatatgtggtggaaaggcaacgatgtttatgggcgtgcaagaatcatcgaaggagaccacggtccaggtgataaattagccgctaacatccgtgctggttggattcctggtgtatcaagccgcgggctcggttctttaaaagactcaggaaaaggatataacatcgtacaagaaggctttcgcctgactgttggtgtagacgcagtttggggtcctagtgctccggatgcatgggtacaaccgaaacaaatttcggaaaatacctcggcacaagttgccaatagtgctgatgatgcttttatggctctcgcagagaagttaaaagcgttataaataattatgtaacttaacacaggacatcaaaaatgcttaaagaacttttaatgaccgaagctaaaactatcgatgcttccgtcgctcttgacagtattttcgaatcagttcagctttctccggaagctaaagctaacttcagcactgtattcgaagcaacagtcaaaaaacacgccgtagctctggcagaatctcatattgaaaagattgctgagaaagcagaagaaaaagttgaagaagaaaaagaaaaagctaaagaagaagctcgcgaagagctgaaagaagctgcttctaaatactttgaccatatcgctgcagaatggatggcagaaaaccagctggcggttgaccgcggtattaaagctgacctgtttgaatccatgtttgtcggtatgaaagagctgtttgttgagcacaacgttgtaattcctgaagaatcagtagacgtagtagctgagatggaagaagaacttgctgagcaaaaagcagaaactgctcgtttatttgaagaagtttctaagcgcgatgagtatatcaattatgcccaacgtgagtatgctatccaagaagcaacccgtgaactgactgatacccaaaaagagaaagtagtttctctgacagagggtatggattattctgactcgttttcaactaagctgaaagctattgttgaaatggtgcagggttctgtagagcagtctgtaacggaatctgccgatataaatactatcgacaaagaagcagacggtttaaacttcacaactgaagcagtcgaagaaactcctgcgactaaaaccccatccgttatggatgcttatgtagcccaagcggctcgtctttcttaatttaaaaggttatacaacacatgaaaaagaataaacttatcgaaaaatggcagccgctgcttgagaacgaagctctgccggaaattgttggcgctagcaaaaaagctctgatcgctaagatttttgaaaaccaggaagctgatattaatcaggctccggaataccgcgatgaaaaaatcgctgaagcatttggttctttcctgtctgaagcagaaattggcggtgaccacggttatgatgcacagaacatcgcagctggtcagacctctggtgctgtaacccagattggcccggcagttatgggtatggttcgtcgtgctatccctaacctgattgctttcgatatctgtggtgtacagccgatgtctaacccaaccggtcaggtattcgctctccgcgctgtttacggcaaagacccgctggctgctggtgctaaagaagctttccatccgatgtacgctccggatgcaatgttctctggtcagggtgcaaccgagaagttcgaagcagttaaagccggtgatgctctgactgttggtgatatcgttgttcacgatttcgcacagaccggtcgtgctcatctgcaggttgttgaagatttcactgtagacgctggcgctactgatgctgctaaactggacgctgcagtaactgccgctctggaagctggtaaagttgtagaaatcgccgaaggtatggctacttctgttgctgaactgcaagaagcatttaacggttctaaagataacccgtggaatgaaatgggcttccgtatcgataaacaaactatcgaagcgaaatctcgtcagctgaaagcacagtattccatcgaactggctcaggacctccgtgctgttcacggtatggacgctgatgctgaattgagttcaatcctggctaccgaaattatgctggaaatcaaccgtgaagttgttgactggattaactactccgctcaggttggtaaatctggtatgacccagaccgttggttctaaagctggtgtattcgacttccaagacccgattgatatccgcggtgctcgttgggcaggtgaaagctttaaagctctgctgttccagattgacaaagaatccgctgaaatcgctcgtcagaccggtcgcggtgaaggtaacttcattatcgcttcccgtaacgtagttaacgtactggcagctgttgataccaacgtatctccggcagctcagggtctgggtcgtggttataataccgacaccactaaagcagtatttgctggtgttctgggtggtcgctaccgtgtatacatcgaccagtatgctcgtcaggattacttcaccatcggttataaaggtgctaacgaaatggatgctggtatctactatgctccgtatgttgcactgaccccgctgcgtggttccgatccgaagaacttccaaccggtcatggggttcaaaacccgttacggtatcggtattaacccgttcgccgattctgctgctcaacagccgaaaggtcgtattacctctggtatgccttctatcgtcaactctgttggtaagaatgcttacttccgtcgtgtatgggttaaaggtatctaataccaataagggagccttcgggctccctttagttgttttaatggatataaataaacttataaatccacagaggaaagcgcaatggctaaaatcaacgaacttctgcgcgagtcaactacaacgagtagcaacttaattggtcgccctaatctcgttgcattaacgcgcgcaaccactaaattaatctataccgatcttgttgctacacagcgtactaaacagcctgtagcagcactgtatggtattaaatatcttaaccctaatggtgacctgacgtttaatacgggtgcaacttatgcaggtcaaatcggggcgccagaacgtgagtcaattgaagaactcactatggcaaataaagactcattcaataaagacgatatgttcaaataccagaatgtggtctttaaagtacttaaagatagcccgtttaccgatacagcagaaaccgatgaatttggaattgtatctgaagcagtagcagctaataatattcgtatgatgtcagatgctgcagtcactgaaaaattcgaaggacctgattcagacccaatcaccgaagccagttttaaaattgataaatggcagacccaggttaaatcgcgtaagcttaaaacggatttaactgtagaattagctcaagacttagaagctaacgggttcgatgctccagagcttattgatgatttacttgctactgaaatggcagaagacattaataaagacatcctgcaatcattgattacggtttcttctcggtttaaagtagctggtgtatccgataaaggtgtattagatttaactaagcaggattctgccccggaacaaggtcgtactctgtatcgtttcatttgtgaaatgaattcagcagttcaacgtaatacttcttattctggcacctacgcagtagcatctactcgttgtgcagcggtactggcagcttctggttggttaatgcagaagaacgatgggactattccagaaaacgcatatggcattctgaataacggccttccactgtattgtgatactaacagtccgattgattacgttattgttggtgttaaggcagaatttggtgggaaggaaactgtaggttcattattctatgcgccgtataccgaaggtcttgatttagacgaccctgagcatgttggtgcatttaaagttattgttgacccagctagcttgcagccttctgtagctttactggttcgttacgcgctgtcggttaacccatatactgtaggattggacgaggacgaagctcgtgtgattaatgctgcggatatggataagatggcaggaagaagtcagatgtctgttatgctcggtgttaagttacctaagctgattgcggactaatttatgggagccttcgggctccctttttgctataaactaaatatgtcaaacttcggagagtattcctcctcgagggatttaaacactttcttatcgtatagattaacacattctatcccgtgcctgcgagctatatcaacagctactctcgtccctccagatacactcccgcatcttttctcaggcgcccaatataataccttatctacaggctcagtgcattctaggcccaatacctgcatagaattccgtgcgaataaagtctgcactatcttcgagcattcatcccagtacgacgtaacttctctcgccttaatgatgcttttgattttggcttcgtttgataattcagaccatacaacaacacctgtaccaggaacatggccacaaaagccagaataaggaataatcctacaagaatttgacctatcgtatttcgccaaccacgcttcatctgaacctggagctccacctgaatatgaaaaatgcccctcttccgagaggcgttgacctattgtagtcattagactcagaactctgcgtggcgcttctcgtgaaccaataagcgccaatctcattattctacaacctcatgccatttactacgaatagtattttgaatcaaagtagtgatttctttcttaaccgcagaaggattatcagcgaataacatatcatgaccttcacgtgctgcttcgttaatgatatctttcatagtcagacccataacacgaccgaaatctttagcagttacagtaccaatatgagacagaacgttacttacgcggttccaggttacatattcggaaaagatttccagaacacgcttatcattctcggtgagttcaaccttcgctttaataggcttatcggatttagccttctcgctgaacttagagttcttacacttaatagcaacacgagtaccattattgaagaacttaggatgaaccggcttaagaacatagccttcagctacgccagtttcagaagaagcctgtgggccgaacacatgtttatttgcatgttcaaggtcagtcgtgtcaacaagctcattatagtaattgacaatagatttaaagtcattcacatactgagatagctcggcaaatgaacctcgaccaagaagtggagctaatttaagaccaagaccagtagcaaacgattctactacataatcgtcccaataaactttttcgttaccggaatccgacaggatatcaaatacgtagaaatctttctcaccataatctacgcctttctgaataccaccgccagcaaattcgccgaagatttgaacagatactaaatccatggcgttcagcatgttctgcatcttaacgaaagaatccttatacttcttcatgataatatcatgaccgaagaagctttcaccttctaaaataggaccagtacgcttagcaggaacgatttcggtaggagtaataatcacactaaagttagtgccatgaatcttctcacgagccacccactcaacagtatgcatatcaaaaccagcaccgcgaatcttctcgatgaacttaccgttgtaatgattctcgagactagaatattttgcaaacattataatttccttagaatgtgattttcataaagtcagtatcaccattacgctgggcactggtataatttgtaacaaatccttcatcatgcaaataattaagaacacttgtaatatgtttcttaactaaactgctaggatacataattaactcacgttgacccgctaaagcggttttctcaatctgagttaatacttcttcttttgctgcactcaattcttctgtagcaatattgatggctgtattagccattctatctgcaaggttcataatttttctctcaataaataatataaaaccaggagtctatcttggtcaaaatggtatcagaggatttcccctgagcccattataccacatcgatttttaaagcaattaatagccgctcggcacgaagcgatacatgatatatccgcttttagttagcatgatttcaaattgacttttgcttccaacctcaagtactaatggaatatctttatccatcagcatccaatcaatttttccataccgttcattaatcaaatccgttattttacgtgcaccacttttatagtagtaagaactctgaacagccatcattttactaacaaatttagatgcaaacaaccagacatttaccccattagcagctggcgtaaatttcttagaaagcatttcttcaaatcgttctactacaattgggtctactttaggcattttcataataacctcatgtgtttaacaagtttcttatgacgagattttataccaacgtttgttaagcgtttccgataaacgactttttctttttgcttaaaccgttcgtgtgctttctcaactgagacccacaatttagcagcttccgctggagtgatatctaacgcccttgcaatttcttgaaaatcctttccgctttcatgcatcaagtgagcttgtaatgctttcataataacctcatctatgtgacgaggacataataaaccaatccgtgaatagcaaaaagggagcccgaaggctcccgaatattacggatagataatacctgcttccagcgcagtacgatgaacaatgtatccatttctagattcttgtacatcgacttctggataatcatctagcattttagctagagtataccgatgcaggtaataatcgctgtcagggtcgtcgagtttccaatctttgccctcaacagtcattcgttggatttcatccattacccaccatccacaccagatataggctgttccacggaacggtagaggatgaatatacggaagttctccgtctggctccggggctacccttttagtaatggttacatcgccagttttagtgactgtaatcggggtgtaatcttctgcggaaacctcaacagaaacctcaatcacttgagaccctatatcagacgtgtcaatcactaacgtgcttgttgagccttctacaggagaaccgtctttggtccaagaataaaccccagttgcaccttctggagcaccgataacgttggctttaaaagatgcttcagacccttgttcggtcgtaatagactcaggagtcaaagtaacagaaacaccgctcatggtctttttagtaaaagcgacagcaatacctttagttgcagttccattattatagtctggggcagaaaccgttacttcacaattcagtgtgtagctagtttccgttgactcggttaaggtaattgttttacccgtttggccagaaataacagaagaaccacgtttccaaacataagcaatgcttgctcctgaaggggcaccagtaacatcagctgtgactacttgggattgaccaatttctttagaaacagaagtcgggctcaaagttaaagtaattgcaggcatagttttgttattaacggtaagagttgtttctgcttcagccgtttcaggatcgccttcagccggagtaacagtagcaactactttaacggtcttactacctgcaggtcctgcagcaacataattcatagctgcggtaacagaagattgttttacaccatttactgtccatacaaacgtttctgtgccttcagctgcggctccagaagttgttgcagtaaaattggttgttgctccaatgactgccgaagcagccaaaggagcaatagatacgctataagccatagctgttccttattttaaagttacaaatgaagaattacgtgtttcacgaatcataacagacccgtttcttttgatgtaatagattaaactaaacagtgtctggtgtgctgatgggtgttcaaacgacgttggccgagatttccaatctgggttatctttaatccattggtaaatccaccatggaagagtaatatatcctgggttcttacctagcaattgcatatttggactaaagttttcaggaagctcaatgatttcgtctgttttaataattttaactactttgtccattgctttgaagaattcttcagggtccgtagtactaattggaatgtttgtaagttttccttcatcatctatatgaataacgctgtctccaataggagcttcagcataaaatcctttatcattgatagaaggtgtttttacttcaaatccagggtcatttaccttaggggtttctttatagaaacctgggtcaatatcatgaattttaataccaacattaactggagcgtcaaacagtagttttgcttcatcagacgcttcatcattgaaaagtgattttccttcaatttcatcatctgcttggattaaatcagcaattgatagaccatcgttgtcttctggcataggctcatcggccaatttagccagttctttttccaaatcagcaaccatattgtcaaatgagcgggtcttcttcagtttaataccgaaggttttggcatattcgtcgagcttgtctttagcttcttttttatcgagtgcctgaatttctttaatatagtctttatctagcattgggtgtgcctcatgtaatgtataaatatgattgtatttataaactgaggatagtacagtgcacgacatccaagtcaaatttaaagattttagtcatgttcatattgagtgtgatgactcgattttctatgaactcagagactattttagcttcgaagccgatggatacagattcaacccgaaatatcgctatggacattgggatggacgaattcgtctgctagattataatcgtctcttaccgtttggtcttgttggccaaattagaaaattcgctgaccaattcggatataaggtttatttcgatccagctatattcgagcaagaaactctttcgcgggaggattttgataattggttgtcaactaaagaaatttattcaggattaactaagattgaacctcactggtatcagaaagatgctgtatatgaaggtctagttaatcgacgtagaattcttaatcttccaacatctgctggtaagtctcttatccaggcattacttgctcgatattatgtagaaaattacgaaggcaaggttcttatcatcgttcctactactgcgttagttgaccagatgattgatgatttttgtgactatcgtttatttcctcgtaatgctatgctgggtattcgaggtggtactgctcgtgattcgaatgcattagtttatgtatctacctggcagaccgctgttaagcagcctaaagaatggttttctcaattcggcatgatgatgaatgatgaatgccatcttgcaacgggtaagtcaatttcaacaatcattgcaggtcttacaaattgcatgtttaagtacggactgtctggttctcttaaagacggcaaagctaatatcatgcaatatgttggtatgtttggtgaaatcttccgtccagtatcaacttctaagttaatggaagacggacaagtaactgagcttaaaattaatacaatcttcttaagatatccagatgcagccgcaaatgctttaaaaggaaaaacgtatcaagaagaaattaaattcatcaccaatgttaagaaaagaaatcgttggattgctaatcttgctactaaacttgcagcgcgtgacgaaaatgcctttgtgatgtttaaacatgtagctcatggtaaagagctattcgagatgattaaagctgctggtcatgagcatgtctattatgtgtcaggcgaagttaataccgaaacacgtaatgctttaaaggctatggcagaaaacggaaagggaattattatcgtcgcaagttacggtgtattttctaccggtatttctgttaaaaacctgcatcatgtaattttagcccatccagttaaatcgaagattatcgtactccaaactattggtcgtgttcttcgtaagcataaagataaatctttggctacagtgtgggatatcattgatgacctgggtgtaaagccgaagtcagccaatgctaaaaagaaatacacacatttaaactattgcttaaaacatgcattagagcgtattcaacgatatgctgatgaaaaatttaactacgtaatgaaaacggtaaatctatgattaaatttgaagatatttacgaagccacaattcgtgaggctactatcgataacttcatgagtaaaattaatgcttgccagaccttagatggtctggaagaactcgagaagtattacgataagcgctctaaagaaactactcttgctgattctgatgatatcattgtgcgtgatgctttggcggggcgtagacaagctcttgaagctgattctgaagatgaagacgacgaagacttctgatataaaaaagccccaaccgaaaggaaggggcaaagccaattggctacatcaacactagactaaattaaaagctgcgtttcttgcaattgctcttctgtgtcttcagtgacaggcaattcaatcgcataattatagcaagctccgggatgaaccgggcctttgtctgtttggacaaccaatgcttcatcgattggtcctttacagacgacacataccgtattcgacatgattgtctccttagtttacaagtttatttattacgcgccagcttcaaactgacgaaggtcaataatatgcttaatgctaaaacctcgtgacttaatagcatccatagcatcactacagaactccaaaagaattccccaatattgcaatttagtatctacacccaagatttctttatcagcgcttaaaacagttttcatttctgatttttcatacacatccatgcatacttcaccaccaacctcgccacggccagtgtaataatccaatcgtgctttaagattttgctttttgagggcatctaatcttaacatctcttttcgacaagtcgagtgcttacgcacccatttaccatacagaacagggttattagccgcttcatactgtagtttagtctggtcgataatcaaatcattatccaattcatcctgtaattcttctaatctcattctatctccactctactgtttctttggaaggactagtaccattatactctactgctagagttagcattactacgcatctgtatgcgtatacgttctagcgtatcagggtcgtctactatagaaaactgcacggtgacaattatagcattatcgtcatataacggaagcacatcaactgatagacggttaatcctaggctcataattacgcacggcagagactatattacgctttatcgtatcaccagttaatggagtcatgttttcaaataattcgtttgtgatatcacaaccaaacgctgggtcaaatggccgagacccctttcttgtggttattattccaagaaggctatttttaaccgatcgtgctcctaccgtttttgacacatcggtatcccaagcaagtcgcatctctgggtcaaggtcagaatataatttatcaatattgctcatgacataatcttaaagaattctttaagccccttaattacatgaatgtgagaaattccgcattcacaagtaatgggaactgccaattgaacctgtggcttcaatagcatatttttgatgttaactacatcttcggttgtaatagcagaatataaatcatcgatttctgcatcatttaaatcattaaagtaaatctgctcatttccaaccacgatataatctatgcattttgatatcatcattggaatgtctgaatcgtcaaaaagattcggatacttgaactttattttaaatccctttaagtcataccagaggtcttctggaggatcgatttgcgcatgtgtataatttaatggcacaggaattttacgcccacaggtgcaattccaggtcacctcatgattaacctcgcctatactatgcgcccaaagtataactataagtaattccgattcctgtttgtttaattcagtggcattagtgcattctctgagcaatgctttaacgcattcatcgattgtaccgtttttcttcgctgcaattaaattagcgtattcttctagtgtaaaagctcggcactggatattcttgccatttattcttgtttcaaatttgtatgtgatgttcatatccactcctcttattcaaatatttataaatagtataaagaggattaccttatggccaatatagttagatgcgaattaccagatggtgtccaacgttttaagccatttacagtagaagattatagagaccttttattggttagaaacgacatgaacaccaagtctgaagaagaacaaaaacagcttatagcagaattaatggatgattattttcatgaccatcctgctgagtatcgtccttatatatttcttaaggtatttctttcaagtattggtaaaaccaaaatacctgtcagaatgaagtgcccaaaatgcggaaaatataagcagtatctttttaatcttaatcagcctccgttgacaaatccgaaagtagaggttgctggattaacgctcaagttcaaaaaacccatagaaataattgacgatacaggtaaaatgattttagataacattatatctgtgaaggattcatctggggaatacgcgtggaatgaattgagcgatagcaataaattgaccgttatcgatgctatagatgttgaaaccttggaaaagattttatcgcagatgaagccgtttaattttgagctaaaaacgtcatgctgtgataccacgacagtattaaaatatgataacattgttgatatctttaagctattgctacatcctgacgagattttcacattttaccaaattaaccatagattggtttctcaaggtaaatatgacttgaattctataatgaagatgctgcctattgagcgtggcataaccttatcgcttattgaaaaggaccttaaatcatgacaacacaaagattaggatatcctaatataagcataaaattatattctggatatgatgcgtggctagctaatagattcgttgaattagcagctacatttattacattaacaatgagagattcattacgcgggactaacgaaggcctacttcagttttatgactcgaaaaatatgcacacgcgtatgaacggtgatgaactagttcaaatatctgttgcaaacagtaacacatcgagaacacaaacccgaatttatgggattaaacactttacagttggtgttgatgataaaggcgatagcattatcacccttcagcttggaacactgcatgacataatgaatctcaagttcagcagagcgttttttagttctgcgtatgaaactataaaagaaatgataggtgcaatgtatgttgaccaaccattgattgctcctcctatcaacggaattaacgcttacgtcccacgggttccctggactagtaccctcaaagattacttacgatatgttagaaatgtaggcatttctacagacaacgatcaatttatttttgcgtgggaagatatcaccggaattaacatgatggattatgaatcaatgatatcccaggacccaaatgtattcatgttcggggctcctcaaacaataggtcagtttgctgcaggattaaaatatccattagcatgggattttgaatggcttgttaaatcaaatagatataatagaaatcccatgaaaaacgcaacattttatgcacactcgtttgtggacaaagatgttacccgaattattaatggagaaggccaaaacagcgtattcattaataggtcaggaggatattctgacatgatttttaggaatggctatgaagaagcactacgcatttctacgatggctcaatatgacgggtatgctcaaactaagtgttacggtaattttgaactaactccaggaatgaaaatcaactttgttgatttaaaggaccagttcagaactgacttttatatagatgaagttatccatgaaatatcaaataacacatctataactaacttatatatgttcacaaatggctctgcccttgaacctgtagatttgattaaggtgaaaaatgaacttaaacgtgattcttcctattaagaaaatagtaataaatgaaaagacgatatcaattccaaaactggggttaaagcaccataatctgatgaaagatgttaagggtccagatgaaaacatgaatcttcttttggattcaatttgtccaggattaacagcagccgaatctgatattgttgtattacacttattagcatttaacaacagaataaaagaaactgttgttaaagatgattttacctacgatttgaataaggtttacatttgccagcgattaactcaaaggttagatggtaaagaattcaaattcagagctcctcctcgttattccaaactaggttcagtagattcaattttgagcgaatttcttgaatcagtagatggaaaaccaatggatataaactttatgaagcttccagcttttgtgacaaagtgggctgatgacttagtaaacactatagccattgatggacctgaaggaccaatcaaaggcatgcttaacgtaatggaaatatttgaatgactaagaaatcagaaatgaattcaatgcgtagaagagttattgctgactcggctccacagaaaaaggctgagtctcaagctgatgctcagattaatacgctagaagatattggtcgtcgcttagacgaccaacaagcgtctactgatttgatttcggatgtaatagaaactaaatcaaacgaaattatcaaatcagtagaagatgtttcagctggtgttgaattaactgctgaagcttcagaacgcacaacagatgctgtctcgaaactaaatgatacagcatcgttaattaatgataagctcacgaaacttgccgatttgttatctaaaaagcatgatgttcagcaagatgtccaaaagactggtactggaacatcgttagaaacaataacggaacaagtacctgatgctccggttcagcagccgctagaggaattactcgaaaggcttattcctccacaggatgatagacgtcctgacgcggatttctttcctaacacagaagagcaagaggaaagaaaagaacctaacaaagaaactgaagataagaataaaaagtttcttgacctaaaatttggagaattaattaaaagcgttaaatctggttttggaaaaactatttcattaacagataaaattagcagtatgctgtttagttatactgttagcgctttggcccaaatggcgaaaactgccgccatggttttgggtgtgataatgcttatagatttaattaaagttcattttaattattggactaaattattcgaaaagaactttgttgaatttaacaagcaggctaaagaatggggtccgctattaactgcaataagcgagatgtcgaatgaaatagtaaaatcattcgtcaaaggagattggggcggattagcaaaagccattggctcgggtttggttgatgtaattgataagctcggagaaaccattatgctcggaatgagtaagcttcttgctggaatgttacgcgcattaggatttaacgattcggcagataacattgaaggcgctgctttagacagatttcaaactgttactggagcagaactcgatgaagaagatgctaaaatgagagcaaaatatgttgaccgtcaagaaagagaatatgacgaacagcctgaatggaaaagaaagctttctgctaagttccaaaaattcaccgggcagattgatgacgatgaatataacaaactgctgagcggagagaaaaagcagtcagcgtatgcagacttgccagaagacgaacgcctcaaaatcatcacagctcgtaataatgctgaagcagaactcaagcgtacaaaagcatatgttgaaaaaactgacgcatctgattccactcgattagactctgctaaggatgcagtacaaagcacaaccaccagatataaagaattggagaaattatctccagaagttgcaaaagacttaaaggttgaattagaccaattgcaaaaactccttgattctaaaatatcagaacctgctccaactgccgaagctatacctgcagcagaacaacctgaggttaaacagtctgcttctattaaagccgctgcggatagtcgtgaagctgctcgtacacgtgaatctaatacacagtcgcaacctattcaggttaataccgctgtaaataagaatagcacatacgtttatagaacgcctccacagacttcaacagctgctcctggaatgcaaggcgctatgaaaacctcttaaggaaaaacaatgatttttgaagaactggccgatggccttgaaaacatcaaaaaatcaggaactcgaatttcccaaggtaaatctaaactgacgaatgcgccaaccactaaggtggcgcagttcccagctgaacgttcagctgggaatgattccgcccaagatatgagagtacatgacttatatcgcaatgggttattattcacagcatatgattttaaaggaagaactactcctgatttgcgttcatttagacgagatgtaatgttatcgtctgtattcgattcaccaatgtcagcattggctaattcatcaagttctaccactagtactgcaccagtagctaatattctattaccgcggtctaagtcagacgttgattcagttagccataaatttaatgatgttggggattctcttgttacacgtggcggcggtactgctactggtgtattaagcaacgtggcttctactgcggtgtttgggtcgatagagtctttaacgcagggattaatggccgataatggtgaacaaatttataacactgcccgtagtatgtatgccggacctgataatagaacgaaagtgtttacttgggatttaactcctaggtctgcagatgaccttatacaaattattcgcatctatgaaatttttaactactattcttacggtgtgactggaaattcatcatacgcaaaagaagttaaagctgctattgatgaatggtataaaggaactcttaaatccgcagctccagatggggctaaagtagaaaacacggtgtttgagcaaataacatcgtttttaagcaatgttattgtagtttctaacccaacgatttggactgttcgtaattttggatattctacatcaatggatggtagagaggatatatttggtccatgccaaattcagagtatccgctttgataaaacgccgaacggacatttcaatggtttagcaattgctcctaaccttccaagcacatttacgcttgaaattactatgcgtgaaatacttactcttaatagaggtaacgtttatatcggaggtattgaataatgtttactctcgaagaatttaagagtcaagcggctgatatcgatttccagagaactaatatgttctctgttgtattcgctactgtaccctctagtaaaacccaggctcttctaaacgactttggtggagagctgtataataatatgggtttagatggaaattggcttggattgaccccaggtgaattcaatcagggtataacaactatagtgacacaaggaactcggcaagttgttcgtaaatcaggtgtgaatacatttatgattggcgcaatgactcaacgtgtggtgcagtcattattaggagaatttacggtaggtacttatctgctcgatttctttaatatggcatttccaacagcaggattgatggtttattctgctaaaataccagagaacagattatcatatgaaatggataagttccataacgctcctaatataaaaatcacaggaagagatatggaaccgctggttctttcatttaggatggacccagaagcaagcaactaccgggcaatgcaagattgggtaaatgctgttgaagacccagtgactggtctgcgaggattgccacaagacgtagaatgtgatatccaagttaaccttcatgctagaaatggattaccacatactgtatgcttgttctcaggggctatgcctgtagcgtgtggagctcccgaatttacatatgatggagaaaacacgatagcagtgtttgatgtcacgtttgcttaccgtagcatgcaaacgggttcggttggaaaacaagctgctatggattggttggaagataaggctattcagaaaattgagacgattaatccaaatcagggcttgagtgcgtctgcttcaagattgtctcgtttaggcggggctggtggtggaatttctaatatcactactacaacaagtagaataatttaggggccgtaaggcccctttgttttatgcaatgcagccaataaaccctggctcagtgcgaagaagtttcatttcgtttgtggtccaaactactttaacaggaatgataccttctgcctttccattaagaacggcttctacaaacgatggctctgttggcttacggaagatatcttgaataagaaccgtcggagtaccttcgttaaacccttcaagcatgataagaacttcttcattgaacttctctgcatctttaacatcagcagaccattcaataccgttaaagcgaaatacgtgtttcatatcaatttcctcattggtttgtgtaagtctatagtatcacgtccttgtgataagtaaacaactttatgcaagtttttctgggataccatccaggttgatagcaccagccagtagctccatggtacgcgtgtagctaaccttatctgtagaacggtctggcgaaaagtaaatctcatttaaaaagcctttgaacttgctttcttcaagaggttccactttgccctgttccatcaagatgtcaccatcatagagatgaaccgattcatcgatttgctctggcggaactaccgtcatttctaccatgaatgtcttgttattcgctacaccaactccatttctaaaaggagttccccatactttgttgactttcattgccaacccgcgaggaagaataacttcagcctcatcgctaaagcttgacaagacacccgggataactaccttaactttatcggccccatggataacgaatccaaacttaaactcatcgccataggcaacttcctcgcctctatcaactctttccaagttgtctgttccaataacagaagatactgcatctatagttgtttctttgttttctaaatcagaactaggtgcgtctggcattaatgaatcaccagcatttgaataagcaccaaagataattggacttaacgaagtagaaacatagttctggaaataaaacattttagactcaatgttatctttaaagtcttcatattttcctcgctgaccacgatacaaaagagtgcctggttcaagacgcaaacctttttcaaaggcagaatcgagcggacgaattttcttgtcaataattggatcgcctaagctttccatgccaataagatagttattaacaaatgaataaccagaaccacagtaatggtgtattgcatctctttcttcttcgcttaaacgagaatgcatttcacggttatattcaattgctttggatatagaatcgccaacaattgacacataagcggatatcatataattgacaagattttggtattgacgtaaagctccgaaatcgtcagctggaggcatatcaaatccacgagtagctacttcaacgattttacgcattgtttccatagatgcaggatttttagcttgagcaataacgtcagcaacgtctgaaattcgttgttcagcgattttcattttgtctgaccccgaaggaatgaaaaccttccagtcgtcatgcattctcgacatttggcctacaaataatctctcaactgcatcgccaaaattacttccatatccgccacgaacacgatagtgcttgatatcatcaacataaaaaggaattgatttttctaatccggctttgatatctttttggaggtctaccgtatcgccttctgcgctaagaaccggtgtgttagtagttaattcgtaccaacgttcgcgtttattttctggccaatcttcatcaacatatgaaacaaatttgccgtactgtgctcggattaaatcttttcgagacactttcattttactcattacagcgagttcagatttcttgtcttctttttcgccaatggaattagccaatgcttcggctttggtaacgttttcgccggtttctttagacacataaacttcgcctactttggaatctactttggtgtaaagttcttctgaaatttcaggaattccttcaatctcttcaagtttcttacctttacgaaccataatagaataagcatacttacctttgtagtaagccatatctttcattagattgaaacgaccgccggtgcgagt

SEQ ID NO: 23 - DNA, 167701 bp, unidentified
  source 1..167701: mol_type = genomic DNA
attaccagagccgtcaagcaagaccaattttcgggcttcaacgttgcctgcaccgcgttgtacgaattgaatagtttcagcgccatcatcaatagtaccgatttcaagaataccactgttgcttgtaccgccggcaccaatgtaccagccatcattagtagcacatttgccaacgatatgacgagttatttcaccgctcaaatcagtagtttcaaaactaattgctttattcggagaaatggttacattgtcttttaacgtagtagttccatcaacgctaagagttccggaggtatctaagaaaggaacccctttaccggcgagctgtactacggcatcattttcatctttagtataaatggcaagagtacgcccatgtgtattcaaagcgatttcgccacgggctacgatatctgcacctggtgctttattctctgtgctagttcttttaaattgtatttgttttaagttttgatcggccatggctacctcttagtatgtgccaaaatctattgttaccccgcgtgaaataacctgatctaatctaggagcatattcaccggatgttgctttatttactataactacgccagcgttagccctaagtacaccggtcatggtatcaccagctttcttgactgctgcgttagctacgttgctaacagtatttattcgtccatcaacataatctttacgagttaaatcgtctacgccagatggctgttgtttagaagtaaatacgttagcggtaattctaccagtctgtgcagttaagttaccatttttagcaatttcaactatgccgctggaatcttccgttccgccgccgcgcaattgaattgttgaattccctccgatgataagaacttcaccattactaccaccgactctaataccaacatttgccaacggacccatgcttaacttgccagagccgccatatgctatttttacttcgcctgtatacgtaccaccacgggatttggacacgaagtcgttatcatttgcttgaggtttatctatctcagtataaaccttcttacctctataagttagggagtttcctgccggcacaagaggaaaagtacccgcgtgccaaataggatttccgccaactgttgaacctgcttttaaatcggccatagtttatcctcttatatattttctatttatacgaaaaaaggaagcccgaaggcttccttagtctgatgtttctctgaacgattgaactggaataacaccgctcggatcgacttttgaatttggaagttccataatcatagtggttcctccttcaacgcctttattcattcttataccattcacaccaaattcttgaacaacactattcagtttttcgctatgagaggtttgaacaaatacaaggtttttgattttagagtcaccaactacagacgtttttggatatcttgataccacaatagtaaatccatcagcgtctgtaggaacagcggtaaatctttcaaatcttaaccatctatcagctccattttttggaacttctaatgatacgtttgaagataataaagatgagcctttgaaccatcgcaggctagctctagtagtagaaccagcatcaagaagacttttagatgcatacatatcacatactaaaaatacagaatccccaggagatagtccataatcagctattttgcttatagattcattttgaactggatatcgcttatattcatatccagtagaatccgagtactcattagtgtcttcaatggaacgataagggcagcctgtatatcctacatcgccaacgttatcatatacagtatcgactttagctctggaatcttctttaacctttccatcatttccgtaaaatgactcaattaatatgcgtccttttgctgctccgagcactcctacataagcagagtttggaaatgatttggaaaaatcagaacctggccaagaagcagaccacttatttttaaaccacctgtctattagcgggctggattgaaatcgttcatgtgtcattataatatacaatcccgaagttaatccatttgcatattctacaaacgctttgttattagcgttgttatcatcagtggtaacgtcaaatgttttaaagttaataaacctgtcaccattaacttgaacaacattaatccccctccgtaaggaggaggtcatatcaaaggcaccgttaatattcaattctggcttattcggaacagcattagaatgcgtagcataagcttttagccaatacttcacagagtttgcctcagagaggattcgtgtttccacgaaatcctcgccgaaggctgccattaaaattggttcagccattaatcacctacccattcaaatttgagagtttgatttggacggtctggccagattttaactggaccaagcttaatccattccaaaacttcaagggttttaacctgagttgatactgagctcggagctccgatatcagctgcagttggaggagtagcagatgtaaatactcgcatccaatcatcaaacttattaaggtttggattataaatcctcatccacacagtatgcgcgaaacgcttatcagcagtttcggttgtcggaggataaggcgtccaaagctgataagtattgtttgtagttacaccaacctgagttaaaacaccaccagctgcagttttttcttcatacccagtcactactaaagtgcttgggttaccagggtcaatcggtgttctgattggaaccatataaccacgaagacctttcaatttagtagcgtctttgatttcagcagtccaagaaccttgtcttattacagtttcattcgttggcacataccaggattcagaacccgtaatgacgatagcagaactatttatgttaagattgccggtcatggtatcaccagctttcttgacataacggccatcagctaatcttgcgtagtttttggtagttaaaattggatacgatccagttgaatcctgtgcaaaaatttgtgtatcagcgtcacgggaacgaataaatgcggactgtgattgggcaccgaatattgaattcaatccctcgacagcaagcatctgaacgtccttaaccataacagttccgccaactattgcatttccagaagacctcagagttttagttgacacttcgttaggaacttctaacgtaccgttaccgccaaatgtgtaggtctggcttgcagcagtagttcctgttccgttttttacgcgaacttttaagtttccggctgaagctgtttgaggctcagcataaattataccacgctcgcttccgtctctattttgaaaacgaacatgcacaattccagtgtcagcagttggagaaattttaacttcaccaccattagcatatataacattcttgacagaaatattattgctaaatgaagtgtcctgactaaatgtccaagctccagaaatagtctgcgctatatcgcgacgagcatatttgtctggtgtttgaccacctaacattcctgtgtcataggctttaccgagacgaggcaagtaatgtttcagtgtaaggttcaattcatacggagacactgcgacgcccttagaggcatacccgttatccggaagagttgagccattggtatcattacctttccacgttccatcgcctgtagatagcctcacggtccctctaacgctgtctgtagcttgccatgactctgttacctgaatagtctgtttcaagtaagcaggaggaacaattctatcacttaatgtgcctgcatcaacttgtgcctgtgtagcatactgagcaagaccgatagctccttcggttgctgttttagcatgtaacgcggcagcagtaactattttcttagcgtcggttccagttctaacctcagcagcagtagcaagagtggttgtacctctttgagaagtacttgcttcctgtatgttgatggtataatggtcccagaggttcccagtaatagttaagccagaactagtattaacttggatacgatcggtattagcaaatttatcgaacagtaatttagggtttaccattactgtacttgaagtaccagcttcaaattcaccctgggcaccaggtgtcgcgaagcgagcaataccagtacgattgttagttgctgtacggtcatttaatgttttaggtgtaactgctttattagtcacgccgccagcattaacttcagtttgtgtagctatttggattaaaccaattgctccatcagtagcaacttttttatgcaaagattctggtgtaacaaccgtaggaatatttgaagaagcaggagttccgtttctaacttcgctatcagttgctaaccagactattcctgattggtttacagtagctttatactcacgaagagtttttggagtaactgcatttttgtaatcagaatgatcgaatataccggtgccagcagaagaacgatcagcagttgtgttaggagcaccaccagtttttactaattgaataacacctaaccgtgaatccgacgtagtacgataaagcagcttcttaggagtaacaattgtaaaatcgtctgttcctgcatccattttagcattagtcgcaatctctgctaaacctctacgagtttcagtagcagctctttcgttaagctttttaggagtaacgattacattatccaagtaagaagcagttgttgactgattaacttcgctggaagttgcaattcttgctataccagtttgggtttcagtagaacgacgtccatttaaggtttctggcgtaattgctaattctttttctgggtttgactccgcattagcttgagcctgcgtagcaagagcaataacacctaatcgggctctagttgtattgtctttagcatcaactcgttctacggtagggtcagattcagttacaatccaatagctttttccggatgctttatcttcaatatatgcaagcccaagaacaggaacatacgatgtagttccgttaaaggtaattgagcttgattgcacccatgctgcatcaggtggatactctgaacgttttggaaattgcagtaaattcaaattgctagcgatagtatcaccaccagaagctttaattactacagtctgtcctttgcgcatataattcattgcgattgtgacagtatccccaacagctacgtctgtaggcaaagtaacgttaattgttttaacggtattgttatctgtgccaaatacagaaatatgctcattaggcattaaagtaacatcagaagtaattattcttactctggtgcgtaaatcattttcaaaaatacgccagattttgtcaatcgagtcatataccaaaaatccggtgcctgaagtacgtacttgaacctctgtttgcccaggagtcccaattgagatagttgggtcaaacgtacgcacagtcatatggttaattggcgatgtaccgtcaaggtcagtaaaattgatgatatcgtttgaattagcgaacaacggcagagtaataaaaatctctgagttggaagtataacgacgaactacgttatcacctgcctgaacttgcgtcggaacaatcccgttcggaactaccatcttggcagtatcgccaaaatctgttaaactcgcacgccatgcaccattactaaacgtaagcataatttgtgaatacggacgtgtaagtcttacctcacgcagacgcgattcaccaaatacgatagacgcaccagtatcttgtgctttaattaagattccgttatagccaggacgcccgccaatatcacgaactacaatggtatcgccttcatctggtgctaacggaagcagtaatgtagcattacctgcagcgttagagtcaacgttgatgaactgaccagattgaatttcaaactctcctttacggacggtataaatccagttcgggtcaacacgtaaagaagtccaattcgcctggttaaaatctccagcaggctttggaatatctttatttgcaatccagatacgacgtccataagtcacagcaaaatcagtgagatacccacgtgtcgggtcatatttttggatagtgttttcttgaataacgtactcgacggagacgccgtcggttttaacgttgcggtcagcaagtgccacatttataactttatttccgcctgcgtccaagccgttcgttgcacggaaatgttgtttcagtaaatcgctcatagagtctcctatggggttatgcttcattatagaagtatttataatggctgtactaactaattgaacgaggttcaaatgtctgatttaaattgcttattcgccgaagaagaccaagtaaaagaaggcgtcattttaattgacttgtcacaaattgcaatggcgacaattcttcatacgtataaagaaggtgacaaactaacaactcctatggttcgtcatcttattctttctactttaaaatttaatgcttttaagtggaagaaagatggatacactaaaattgtcatctgcgttgataacgcagttaatgggtattggcgtcgggacgtagcatattactataaaaagaaccgtgctaaagcccgtgaagaatccaattgggactgggatggatactttgaaggtcttcgtactgtaattgatgaatttaagcagtatatgccttattatgtcattgatattgataaagctgaagctgatgacagcattgcggtattaaccaaaaagttcagtctcgaaggccatccagtcatgattgtttcttcggatggtgactttactcaattgcataagtatcctaatgttaagcaatggtcaccaatgcagaagaaactggtaaaatctaaaaccggttctcctgctttagattgtatggttaaaattattaaaggtgacaagaaagataacgtagcttctattaaagttcgttcagatttttggtacacccatgttgatggtgagcgtactccttcaacgaaaatgacatttgttgaagaatgtcttgatgctggcgaaaacattaaagatttgcttactgaagaacagtataagcgtttcttggaaaaccgcgtgttaatcgattttgattacatccgcgaagacattgttgctaacattttagattgttataataactatcaattaccgggtcgtggtaaaatttatagctactttgttaaatccggtctgtctaaattaatgaaagaaattaacaacttttaaggtgaatataatggctaagaaagaaaaagagcaagtagtatttgatgaagcggtacatggacaggctctgcgagatatgattaaagaagcctcaggtaataagttgaaagcagaaagctatcttgaacttaacaaagacattaaagaccgcgccaagaaagagcttggtgtagaaggcaaattatttaatcagctgcttgccctgttccataaaggtacacgcgatcgttttgaaactgaaaaagatgaagtggtagaagcttatgactctattttcgcttaaagacgagggggaggtatccccctctgaatccattaatcagctgttagataagcaagctaacggatttactattgagtctatggtaacagaacttggaatggggtatcttgaagcaacaactcagtggttagaagaaaattctattcctgagggaaacttcaatagatatattccacctgcaatcatagaaaaaattatgtcagaagcattagaagaaaatatgcttcgaccatcatttagtcaaacacataaaacgaatagtctggattttttattatgattcgtctccgcatgcctggaaataataacagatacgttaacggtaagagcgtttatcttttatatttaatgctcaaacaacactttgccggtcgatatgacgttgttaagtataactgggttatgcgggtctctgataaagcttatcaaaagcgtagagacaaatatttctttgagaaactcgctgagaaatatacattaaaagagttaacactgatattcatgagtaacctcgtagctaaccaagatgcttggattggcgatatcagtgatgctgatgccctcgtgttttatcgtgaatatataggtaaattgaagcagattaaaacaacgttctcggaagatgtaaagaacatttactattttgccaagaaagttaatgtagataagcttcatgatatttttgaatataatgagaaagtcggaacatcttatgtgttcaaacttcttcagtcaaacgttatatctttcgagacattcatcatgcttgactcgtttttagatataataaatactcatgatactgcaacggataatttagtttggagtaattactccactaaattaaaagcttataaaaaacttttaaacgttgacggtgctgaagctaagaaactctttattagcataatcaaatcttgtaaagaaattagtatataattaatctatcgtccagttgcaaggacccatgttgcaacaacaactgttaaatttaaaaaggtaatcatatgtttaagcgtaaaaatcctgctcaacttcaacaacaactggctggtctgaaaggtggttcttctttctctaacgaagacaaaaacgaatggaaactgaagaccgataatgctggtaatggtcaagcagtaattcgcttcctgcctggtaaagatgaaaactctctaccgtttgtaaaactgatcaatcacggtttcaaacacggcggtaaatggtacatcgaaaattgtacttctacccacggtgattttgattcttgcccggtttgtgctcatctgagtaaaaacgattcttataacagcaacccagctgaatataagcttctgaaacgtaaaacctctttctggtctaacatcctggttattaaagacccggctaacccagaaaacgaaggcaaagtattcaaattccgtttcggtcagaaaattatggacaaaatcaacgcgatggttgaagttgatgttgatatgggtgaaactccggttgatgtaacttgcgtgtatgaaggtgcaaacttcgtcatgaaagttaagaaagtcggtggtttccagaactatgatgaatgtaaattccttggtcagtccgagattgcaaacatcaatgatgaagaaactcagaaattcctgaccgaaaatatggctgacctcagcgaaattgttgctccatctcagtttaaatcgtttgaagttaacgaagccaaatttaaacagattatgggtacagcagctcttggtggtgccgcggcaaaagcagcagctcaagccgataaaattggcgatgacctggattcctttgacaaagacctgtctgattttgaatccaaaccgacctcttctcgttccgcagacgatatcatgggcgatgctggtgacagtgttggcgatgacgatctgaatgatattttgaacgacctctaatataaagggaccttcgggtccctttttctttattcctccaaaaaatatttcacaaaattgtttacaagccagttgatgagtgatactatatctacatcgaaacaaaacgagtagaggaaaacatcatgggtaaattaaacattgatatcgtagcaactcctattatcaacaaagacggtatttgtgtagatttggagtatgcagatggtacacgtttttatgacactgaccatggtattgattttgacttgattatgcgtcatggacctggtggtggttggccaaatattgacctccgcggttctagagaaaaggttattgcatatcttgaatctctggaatgggacgacattgattactttatggaagattttgaagaataattgtttacaaggagctatgcttgtgatagtatagctccataatctactggagaataaaaatgaaacttcaacgtcaaagcatcaaacttggttctgaatatcgtggtaaatggaatttctgcatttgcgacaaaaacccagaagaattagagcgtgttgaagaagtactgtgccagatggaagctccattcactatgggtggtgaaactgtctattggaatgattactgtgataactgcccatgctatgaagatgggtatggctcaggcttctggattcctgttgaagatgttgaagaattcaaaaaagcatttaaacttgctaaggccaagaaatgattgaggctgaattagtagttttgttaatttctgttactgccgcttttattagcggcattatattaggattatttttatatgtctaaattttgctgaggtttaaatgattcaaatagtttatgcatttgctcctacaaaaactgtagacggcaaaaacgaaaatgctttcggtttaggcgatggtcttccatggaaacatatttcccaggacatgaaaaactttgctaatcgtactcgagatactatcttgatttgcggagcaaagacttttatgagttttcctaaacctcttcctggtcgtaagacaatcgttgtccaagacatgagtcgtgcgttggcaactgctaaaaatggcttctttgcagatgcttatgtaagtgaattagaatttatcggtttcttgggtggtgacattatggccgctcatacttcttacaacagtactatcacttttaatagagaccttaattattctatcataggtggtgccggaatcatccagaaggcatatccatatgcagatagggttatccaaacaaccatcagaaaaagtcatagagtgaattctgatgtcactctacctgctgaatttgtagcagctcctacttggccagaatcaggattcattactaaagaaaatcactggtatcatattgatgaagtgactaacatttcagaggtggtctatgagcgcaaactatgatatcactcagctatcagaagacaaagtccaaaagaagtggaaaagatttccatttaagcatggtattcatcttctagttttcagttataatggtcttagcacttataacggttcaactacagtatataaccgaaatggaaatatacctattgaaattgagcgtgattataagaagatgttcatcggaatgtcacacggtaatgtgacggttaacgatgatgtagtgtctattattggacgatttgaaaagcgtggagaccagcttttctttactcctcttcaggaaaaatttaatgcgtgaataccaagaattaattaaagatatttttgaaaatggatacgagactgatgaccgtactggtaccggtactattgcaaagtttggtactcaacaccggtttgatttacaagaaggatttccggcagtaactaccaagcgtcttgcgtggaaagcgtgtattgcagaactgatttggttcatgcgtgggtctactaatgtgcatgaattacgtcttattcagcatgactcattactagaaggtaaaactgtctgggacgacaactatgaaaaccaggcaaaagacatggggtattccggaggtgaactgggacctgtgtatggtaagcaatggcgagatttcatgggtgttgaccaactgaaattgatcattgatcgtatcaagcaacttccatatgaccgtcgtcagattgtgactgcatggaacccggttgatttggataagatggcattgccaccatgtcatttgctgtatcaatttaacgttcgtcaggggcatcttgacctccaatggtatcagcgttctgtagatgtattccttggcctccccttcaacattgcgtcatatgcagcactagttcatatcattgctaaaatgacaaatcttaaacctgggcatttggtattcactggtggtaatactcatatttacctgaatcatattgagcaatgtaaagaaattcttcgtcgagaaccgaaagaactttgtgagcttgaaattgcattcccagatacgtatgaaacttggcagactagttctcaggttcgttggttagaacaatttgcacgtcctcatcattttgaactagttgggtataaatctcacccaacaattacaggaaagatggcgatatgaatattcgatttgttcgtaaaggacaccagtctaaaacagtattaggcgagatgtgtgatgcattctctagcgatttgcctgaagttaatgacaagatagtttttgatgggaccgaacaaagggttctgtctattgttaaatcatatgaatggtctataggcaaaacacaattaatctgttggtttgaagttgatataacatgaagatatgtcgggtggttaataaataccattccgacttcgatgtaaatatccaacgtggaacaatgtggggaaattacgtcggtaaagattgcgataatcgtcctgatgctattgcagcgtttaaggacgattttattgctaagattcggaacggagaaataaagcgagagcacttagaaactttaagaggaatgagattaggatgcacctgcaaaccgcttccttgccatggtgatataatagctcttgtagtgaataaactttttaaagatacatttgaattagaggacttatgcaagtaattaagagctcaggtgttagtcaagaatttgacatgcagaaaatcattaaagtcctcgaatgggcgtgcgaaggaactaaagtagacccatacgagctgtatgaaattattaaatcccatctgcgtgatggcatgagcactgcagatatccagaagactatcgttaaggtagcagcgaatagcatttctattgatgagccagattatcaatatgtagcatccaatgcagcaatgtttgaaatccgtaaacgtgtttatggacagtttgaaccgcctgcatttattgaccacatttcacgttgtgttaacgcaaataagtacgataaagaaattctaagtaagtggtctgcagaagaaattactttgcttgattcttatattaagcatgagcgtgatttcactatgacttatgctggaacaatgcagcttatcgagaagtatctcgtaaaagaccgtcacactggtgaattgtatgaaactccacagtttgcctttatgttgatcggtatgtgcttgcaccaagatgatggcgaaaaccgtttagcaaacgttattcgtttctatgatgcagtttctactaaaaagatttcattgccaacaccaattatgtctggtgttcgtactccgacacgccagttcagttcatgcgtggttattgaaggtggtgatagtcttaattcaattaacgaagctgctgcgtcaattacgaaatacatcagtaagcgtgcaggtattggtattaatgctggaatgattcgcgcagagggttcaaaaattggattcggtgaagtcaaacatactggagttattcctttctggaaacacttccagacagcagttaaatcctgctcccaaggtggagtccgtggtggcgcggcgacattgtactatcaaatctggcacttggaagttgaaaacctcctcgtacttaagaacaacaaaggtgtagatgaaaaccgtattcgtcatctggattatggtgttcagattaataacctgatgattgaacgtttgattaagaatgattacatcactctgtttagtcccgatgtgtgtcttggtactttgtatacagaatacttccgtgatgcacaagcattccgtactttatacgaagagctggaaaagaacccagacgtaagaaagaaacgtattaaagcccgtgaactgtttgagttgttccttactgaacgtgctggtactgctcgaatttacccgtacatggtagataacgttggtgaatatggtccttttattcgtgatgtggctacggttaagcaatcaaacctctgcctcgaaattgcgttaccaacttcggatgttggccaagaagatggcgaaatcgcgctgtgtacactcgcagcattcgtgctcgacaacttcaactggcaagaccaagaagaagttaacgaaatcgcagaagtaatggtaagggctttggataaccttttggattaccaagactatcctgtagacaaagcgttaaaagctaaagaccgtcgagcactaggtgttggcattactaactatgcagcttggttagcaagcaactttgcttcatacgcagatgctaatgatattactcacgaaatgatggaacgtattcaatatgcactcatcaaagcctctgttaaacttgctagcgaaaaaggtccatgcacgctttacaaagaaacacgatacggacgtggtgaactgcctattgactggtacaacgaaagaattgaccaactcgcagctccaaactatgtctgtgactgggaactcctgcgagaagacctcaagcgatacggtatccgaaattcaacgttatctgcgcttatgccatgcgaatcgtctagccaggtatcaaactctaccaacggtattgaaccaccacgtggaccagtgtcagttaaagaatcaaaagaaggaagcttcaaccaagtcgttccaaatgttgaacacaatgcttccctttatgattatgcctggcagctcgcgaaacagggtaataagccttatctgaaccaggttctgattatgcagaaatttgtagaccaaagcatctctgctaatacttattacgacccggcgaatttccctaaaggcaaagttgaaatgtcggtaatgatggacgacttgctttatttctggtactttggtggtaagactctttactatcataacacccgtgatggttccggtaacgatgatatgattcaagattctgctgactgcgcggcctgtaagctttaataaaagggaattataattagaccacggatggttaacaccacagaataggaaatagaatgagtacagtttttaataccaagcaagtagatatcatgaccgaaccaatgttctttggttctggtctaggaattgcacgctatgatattcagcgtcataaagtattcgaggaactcattgagaagcaattgagcttcttttggcgtcctgaagaagttaacgttatgatggaccgtggtcagtttgaaaaactcccagaacaccaacgtaatatcttcactgataacttgaagtaccaatctcttcttgattcaattcaaggacgggctccagcagcagttttatctgcgcttatttctgacccaagcctagatacttggaaccagacttggacgttcagtgaaactattcacagccgttcatacacgcatatcatgcgtaacctatatgtagacccagctaaaatctttgatgaaatcgttcttgacgaagcaatcatgaaacgcgctgagtcaattggtgtttactatgatgatgttatagcgaagactcgcgcatgggaaaatgccaaaaatcgctgctttaatcaagataatatcgaaattaaagaagctaaacgtgatttaatgaaatctctttatctttgcttacatgttattaacgcattagaagctattcgtttctatgttagttttgcgtgtaccttcaacttccataaaaatatggaaatcatggaaggtaatgctaaaatcatgaagttcattgctcgtgatgaacaacttcatttgaagggcacgcagtacattctgcgtcaacttcaaactggcactgatggcgaagaatgggttgagattgctaaagagtgtgaacaagaagcaattaaaatcttcatggaagttaaccgccaagaaaaagattgggctatccatcttttccgcaacggtggtcttccgggtctgaacgttaaaattcttcatgacttcattgactatctgactgtatctcgcatgcgtagctgtggtctgccgtgcccaatcacggatgcaccaactcgtcatcctattccttggattcgcgaatatcttaactctgatgcagtccaatctgctccgcaggaagttgagataagttcttatctggtagctcagattgacaatgatgtcactgatgatgttctaattggatttaaaaagtacttataaggaaaggggcttcggcccctctttattatgaatgatattgctaacgagttttcttttataaaatatgttcaacttgagttagaaccagattttaccatcaaaccaattctgatagcaaacaagttaaacgtagtttatgccatcgcagttgatgatgaactagtttacattggtaagactaaaaatcttcgtaaacgtataaattattatagaactgctattaatcggaaagaccaaacctctgattcggctaaatctgccaagatttttgaagcactaatggctggcaaaaaagtagagttctatgctcgtcagtgttttaatcttttgattaataatgaacttggcgagatgtcaatatccactatggacttggaagaacctcttctaattaaaaagttcaatcctccatggaacacccaacatactaacaaagctaaatgaactatgttaaagtatatgataacctaatagcaaagggtaaattacgaggcaatgataaaggaaaattaaactattatactgaagctcatcatatcattccaaaatcattaggaggaaatgacgatgtttctaatttagttttattgactggacgtgaacatttcattgcccatttgctattatcaaagatacataataattctaaaatgaattatgctctttggatgatgtgtaattcttctggaaagaattttaaagttcattccagattttatgaaagctctagaataaagcattctaattatacatctaacttattctccggaaagaaacgaacggaagaacatagaaagaatttatctaaagcactgaaaggcagagtaagtcccactcaaggaaagactcatgccaaagaaacacgcgaaaagatatcaaaatctttaaccggtaaaacacaatctgaagaaactaaactcaagcggtcagaaagccaaaaaggaaagaaaaagcctttgtacagcccatgcccgcattgtggtataataacttcaaaggccattgctatcagatggcactacgataattgcaaacataaggtaaagaaatgttagagctatataaaaatttaatgaatctgtgtgaaagctcagaagttgcaaaattcttttataaagattttaccggtcctatggatggtaagttcagagtgttttcataccactacgcaagttacagtgagtggttaaaacccgatgctcttgagtgccgcggtatcatgtttgagatggatggcgataccccaattcgaattgcttcgcgtccgatggaaaaattcttcaatttgaatgaaaacccactaacgatgggaattgatattagcgatgtagaatacattatggataaggctgatggctctctagtatcatcttatgttgatgatgggtatctataccttaaatcaaaaacctctctttacagtgaccaggcaagacaagcttcagctttgcttaacagtgaagaatattcttcgcttcatcaggttattcttgagctagcgctagatggttatacggtaaacatggaatttgtttcacctaataatcgtgttgttttagcatatcaggagccacagctgtttgtgttaaacgtccgtaataacgcaactggcgagtatattaaatatgatgatttgtacgctaatgctaagattcgtccttatttaattaatgcttacggaatttctgaccccaaaacttgggttgaaggtgttcgtgaacttgaaggcgtagaagggtacattgcagttctaaacactgggcagagatttaaggttaaaaccgaatggtattctgctcttcatcacactaaagactcaataacgtcaaatgaaagactgtttgcgtctgtcgtatctgcaaattccgacgatttgcgttctctttttgctggagatgaatacgcaattaagaaaatttctgcgtttgagcaagcttatctagattacctaggaaagtcacttgagctatgtcagtcgttctacgatgaatacagaggtcgtgctcgtaaagattatgctattgctgctcagaaagcaacggttaatcagcgccatctttttggtgttatcatgaacatgtacgaaggaactgtagatgtggataaactgcttaaagacctcgaaagggtgttcttgaagtactgggcaggatatgttccaaaagagtacgaaaaagaaattgaaatttctgaagaatagttgtttacatcctcatcagagtgtgatactatagacttacacaaactgatgaggatattgaaatggatatgcaagcgattactttagatatggttgttaacaaatatggtactcattctgatgggatttttgtgtggaatggtaccaagaaggtgggcttcgtcactgacctacggacgcacatggcgcgcaaggaagctgctcgtaagaagcaaaaagagtacactaatcgtgtgaacgagcagcgtgccgaagcccttcctgaagctgtagatgaaatgattgatttcctagataatcatctcgcgaagtatggtgcagaggtgttcaagaacatcacccagccaaacgttcatgctaacggatgcaaatgctatgtaatcgttgacccgatttatggcaagcatcgtcttggcattatgcatcgcgagctgaattattctgagatggcagaatatgtagaagcttgcttcaagtgttctccttcggaaagttctgatcgtcacatcctcatttcgggattatcccgtgatgatatcgtagaggttatccttaaactatgctcaaaataaacacaacttggttgatgattggtgtgttagcgttatccgccggtggattgaaatatctttcgtggcgggtagaaaatcttaaagctgacctcaaagtcgtccaagatgaatctgatcgacaagcaaaagaaatagaaaacattggtgtttctataaaaaatctgcagacaacatataaaggctatcaggaaaaccgagcagctcgtgatacttctaacgctaagatgaataaagattctaagcgtggaaacgtagttgcagccaaacctggattagttgaaaaacagattaatgcaagcttcaataagtttgcagaagatatccaggaggctaccagatgaaacgaagtctattagccatgggtattatcagcttacttgctggatgctcttctagtgcaccagatgtcccggttttacatcctgagtggccagacccaattcaaaaatgggaaggacattgggaagtaaaagtaattgacggtaaagcctgggttggtatgccgtttgaagagtcgcaagaatatcgtatctggatgaatgacattttacgatatactaaagatgctaatggaatgatatgttattatcgttctgaccttaaagaacctcgttgcgttaagtgatggtattataatgaaccgagagcagtatgaaacacttaaaggattaattgctgaaaatgaattggcgtgcatcgtgtttggacgcgcagctgaaaattatgacaaaaatgatatactgtcaatgaataagccattgcgagcaattaaagaaaaatatcgtgctaattggggtgaaaagtctaaggctcttcatgattttattgacactcttaaggatgtataatgaaaaaattggttttgacacaaggggctccaggctctggtaaaacaacctgggctaacgaatacgtagcagctaatccaggttggtatgttttgtctcgtgatgatttgcgtgaaggcatctttggccttgataaacgtaatgattacaaatattctaagcttcgtgagaagtcagtatctgtatgtcagttttctatggcgaagactctactcgagatggaaaccactaaaggtgtcatcattgctgatactaaccttaatccaacgactatcaagaagtggcaagagttggcatacgaaattgatggtgtcaagtgggaaattaaacgctttgacgttccttggactgaattgcttaatcgtaacctctatcgtggcgcgaatgcagttcctattgaagtgcttcgtagcttctattctaagatgcatccatatgatttgtacattccagacgaatcattgccaaaagcagttatctttgatcttgacggcacgttagcagataacaatcatcgttctccttatgacttggccaaatgtggtaaagaccatccaaaggaaatggtaattgaatttcttaaaatgcttcgtaacaaaggatataaaattcttactgtttccggcagagagtctggtactaaagaagaccctactgtttatcaacgcattacgaagaaatggttgttggaccatgttggcgaaacaggcgaacacttccaacgtaagcaaggcgattcacgcaaagacgatgtggtaaaagaagaaatcttctgggaccgaattgctgatcgttataatgtaaaacttgcagtagatgacagggcgcaggtggttgaaatgtggcgtcgtatcggtgttgaatgctggcaagtagcccacggtgatttttagaggaaagtataatgtttccaaagtattccgaagtagtaaaagtatcatttacgcaagttgttgctaatcatttaacagatgagtttactccatctgaagtagccaaaatgcatgcagagtttttatctgccatgaatgcacttattccaaacggcgaagttattaaattttctattgaccgctcaggcggttcatctgaagttaaaatttcttgtggcgaaggtgaacacgattggtttatcgttggaattattgctaattttgaaacccaacaggttatgacttatgttgtctgacgctaaattttcacatgatgaatttatttcgaaggttaaaatcttcgcacaggaagtagcaaaccgggttcctggaagtaaagtgactctccgacgagagtcatcctttaactatgttgatgcttatatcattacagttaataatggaaagagcaatcaacacactcaattggctttaaccggaacaggccaagttgaaatgactaacattttaggacatatctaatgactttacgtgaggctgtagaagctcttttaattgaacatgctcgtggaattagggcagaaattagccaaaatggtattcgtctaattaatgctgttattggttctgaccaaggcgtttggtcaattccgcgcgaagaatatgatgctattttgtacagtaacgttgatgttaaggaaggccaacctctttatggttatgtcttttccgatgttcttgaacgaggaaatcatccgtttccagatggtacaggcattcgtacttctcgagtagagagttttgcttctcctaccgacgagttaaaattggttaaaacaaataacacaacttatctggtgatttaaatgaaagcgtcgacggtactacaaattgcgtatctcgtatctcaagagtcaaaatgctgctcgtggaaagtcggcgcagtaattgaaaagaacggacgaattatttctactggctataacggttcaccttctggcggcgtgaactgttgtgaccatgcagcagaacaaggttggattggtgaaattccttacaaatctacgggattgcgtcaagacggatttcaagtcaaaaaagtcggattgctcaaagaacatcgagcagcccactctgcatggtctaaagtcaatgaaatccatgctgagcttaatgctattctttttgctgcccggaacggcagtagtattgatggagcaacaatgtatgtcacactgtctccatgtccagattgtgcaaaagccatcgctcagtctggtattaaaaaattagtatactgcgaaacatacgacaagaacgaacccggctgggacgatattcttcgttctgctggaatcgaggtgttcaatgttccaaaacgtaatttggataagttgaattggtataacattaaagaattctgtggaattgaataatgaaacttagaattgttgaaattaataaacttaacctaagtggtgatgttgttatatcatactcagtagaacgccggtattggtttaaatggaaaccactagcaacatttaaatttgaagatcaagcagttcgattattaaaagaattatccaagcgcaaatctgtaattatcaaaactattaaagagacatcaaaatgaaactgactactgaacaaaacatccatattcgtgaaactctgaaggctgtgctgagcatgggcgaatcccagattgtgtttgaaaaagctgatggcactattcgtactctgcgctgtactcgtgataaagacattattccatctgatttggtagaaagcactactaaatctgctcgagcagaaagcactacttcacttccagtatatgataccgagaaagaaggttggcgctcatttgcctttgataaacttatctcggtaaatggtatgaaagttgagcatctgctgcagatgatcggtaagtaatttgctttaaactgaccatgttaatataactacatggtcaaacaataaaggtaacacatggaacttccaattaaagctctaggcgagtatgtaattctcgtatctgaacctgcacagcaaggtgatgaaattgtttctccttccggtattattcttggaaaagaagaacaaggacaactgccggatatgtgtgaaatctattctatcggtgatgatgtaccgaaaggatttgttgaagtcggtgatttgactccactgcctgttggtaatatcagaaatgtacctcatccgttagtagcagcaggtgtgaagaaacctaaagaaattcggcagaagtttgtgacttgtcattataagtcccttgcatgcgtatataaataataatatgaattgggcgtcggacaattagttacccgagcaattctacgcggtggatgcccgagctaaacctcggttaccgtccaccaaattttaacctcatttgaggaacgattcaatgaacaaacaacttactaaagctctggaactccaacgtaatgcatggaattccggtcacgaaaactacggtgcttcaatcgatatctatgcagaagcactggaagttctgaaaggttttaaacatctgaacccagctcaagctgaatttcgtgatactttagaagcgatggatgaactgaagtatgctaagcatcttggttctgctgctcgcaaagctgttcgccactttgtggtaacgctgaagtaatttgtacgcccaccatgtgtacgcatgggtaacgtatgatgtggacgttgttggttatccccacgtaaaacatccgaaaccatcggtgatttgctaccaaagtgcagctagaaaataaacggcaagtgcatgctaccccgaggcgatggccaatcgggagtacgcctcaaggcctatacatccatcggtgtatatcttatccccgagaaatcggacccggaacctttaagctaacggtgtgcaacagataagagtttaaacgtaccctttgagggcttgcgggagctacaaccgaaagaactgtcgaaagaagttgaacctcggaagaacgtgctcccatgtatttctccaaaatggaagatgataaaatggctaaacaagctaaagcaaaaactgcagtaaaagaagttgttggtacctctaaacgcgctggctacaagcgtgggtcgaacaagcgtatcaatcagacggttgagaaaatcatgcgtcgggctcgtgcggttcttcgcgatgatgcttctcgttttggtaagccgaaagcataagttcagggactccttcgggagtcccttttttattttccgcagaatgaaaaaagttgtttacttctaggctcaacaaggttactatagacctgtaccacccaaacagatacaacggagaataaaatgaataccatcaacctgaatgcaactatcaagactaaagaccatgacggttataaagctcagactgtccacgagaaaatgtggattttgtctaaagttcaaggtgatatcgttccatgcatgacaccggacggtccatcagatgatttctgctggcatatcacgctaaccaattggttcacaggttctgtatatgttctgaacactccagttgttggtcgtattcgttctgaaacttacacagatgaagaagacggttactcagaagatgtaacttggtatgaaaacggtcgtcaagtggctgacgacctaattgaaaaaatgaaagctaaaggtgttgttgatttaactcactggacttttatctgttaattgaacggggcttcggccccatctttgaggatatcaaaatgaattacagcgaaaaccgagtatattgcatttccccagaaacttaccgtagatggaaagacgctaagaacacaattaactatctcattgccactgttgttggagttcaaggctggacgccgttagaacttgattcgctgggccgggttgttaagattaaaaccgaaactggtaaaatcatttcggcaaaaaccataggagatgaatatgaccggtctctgtcatgcttattttcttctcacgagttagaagaaggacgggttgtgcaaataggagcgtttgaaaatcaaagctctgatgaccgctatgcagtttttgaaatcccatcaacgttcgttaaacctactccagtggttaaagacgggcgtagcgtcttcgctttaaaggaagcaaaagaaatcatccttgagctaaccgatatcgttccagaaactaccaagtatgaactgtttaaaagcatcggatttgcagaagtaaaaactgttaaaactgtagaggttaaaaatgtctgaagtttttgaataaaagttgtttacttcttgggtggtctgggttactatagacctgtaccacccaaacagataaacaaactacggagaataaaaatgaacttcactaacttcaaccgcaaatacgtacagaacaatgcttgggacgtttctactactttgctgtgggaacacaacaatggcacagtagctcaaatcgatatgtactgggaagataactacgtattcttcagctttgaaaatggtcctactttggatattcagttcaacggttctgaaatcaaagttggattccatgatgaagttcgtaaacgtgatttatcttcacatccgtcttggaacacaaatcgtcagctgcttgttaaaatttatctgcgccacatcctcggtcgtaaaacaaccgaagaacaacgtgaagcaatctgggatatcgtttcaaacgaaatcaagttttaactaactcggggcttcggccccactattgaggaaatgataatggaaaaaggtaaattctataagcttaaaaagactccaatcttgtctccaggcgctcttatcaagggtgtttttgagcaaatcggtaataacccgattaaaattaccagaacctttaaatatgcggaaaataccggattagttgaatttgaaatcattaagccagatggggaatataaacgcgttagtgtagatgaagttcgcttttctcacatgtggtgtattcttactaatcaagagtttcagcattattttgaagaaaccatctacaaagaacatgaaccgaagaccgacgatgatggaagcaatgattggggtgtttggacctcaaataaaggaaatgatacctacaatggcggattaacaaaggaagaagctgttaatcttgcaaaagtacaacgcctgaatgcaactaaagacacaaaagttgtaatcatgcagccttttgctatccctgtagttcacgttaatattcgtccgttttaagaggaaattgaaatgattgtatcagctttctatgattcacgaaagaaaaaagttgaaaccattatcagcgatactcgcgatggtacacctgctaataaaaatggtgtgaaagcatacattgataggtattgccctcctgaatttcgtatggttgatggcgtagattctctgagcattaatgttataaatgctaaaattgaattcattaatgcaactatgccaattgggtattctgacagtgatggctcaaatgccaaaatgccgaaagaaaaattcataactaaattttgaggaaatcaacatgattgtatccgtgcctaaacctaaagctggtattttttcttgcagtttgaaaaaccacccaatggttgatatcatgtcagctgatgttaaacaacacaccgttgagtatgaaattgatgctccggatttctttgaattgcccgaatgggcagtgagacttgatgcatgaaatatcatatcttcagtacagtaagattagcaaatggaattcctggagttgtatgtgatacggctccagccattaaagcctactcggttgaaccttggtatgaagttaattgggttgatggtaatcgttcaatccatgcagaatctgagctttatccaattactcaattaagggctgctaacgacgatgtctattaatcctcacttcggtcatatggttgcccgacgtatcaccagggaaatgctaaagactgctgagtattataatatagaattaattgatatagaaccctcggacgctccagggttaatctggttcaatttcaccggtgccgcaaatagcgttgccaaatttaaacaagcattgaggaatttccccgaatgtcaaagccagtaatcgcaaccgatgttgatggaatcatcgttaagtggcaaagtggtctgccttactttgcccaaaaatataaccttcctgtagagcatatccttgatatgatgactactgaaaaattcattaaacccgctgagctgtttgattgtgaagaagaactagctgttaagctgcttctgaagtacaacaacagtgattttattcgttatcttgctccgtatgctgatgctttagctacagttaataagctcaaagaaaaatacgattttgtcgctatcacggctcttggcaactcagtagatgctaaccttaatcgtcgtttcaatctgaatgctttgttccctgatgcatttacagaaatcatggtctgcgattatgatgaatctaaagatgctttactggaaaaggctaaagtaaaatacggcgatcgcatcgtttgctatgtagatgatttgcctaaacacattgctgcagctagcaaagtctttgaagacactgaaacccgtgtgttttatatgcctcgtggtgagcgagaaggttcagtgactgctcctggaattatggttgaagattggcatcaaattgtaacttgcctggaatctctgaaattcgttaagaaaccgcagaagtctctttctggattgtgggaagaagctatcaaagaccaaattcgtaaagagcaacatccttttaattggcctccacgacaagttccaggagattggtggaaacaacctatcattccgtttagtcctggtccgcatgttcctcctggaaacgactggtggaataatggtcgtattacatgtgataatcaccaaattaattgctaacactctgggtatggtataattgccataccctaggaggaaatatgtttgtagttcatactaaggttggtaaacgctggttatcatgtgattacggtcatgttaatcagttttatcgttggaatccaatttggcgtgaagcaaagtcgtgcccgatttggaatgaatgcatcaataacgggtttgtttatatcgatggattaacttatcatcgtagcgtaagcgaactttcaaaagaattaggtgaataatgatttttgatatcatcaaagcaattgaagatgctaagggttctaaagccaaaacccaaattctcattgacaataaagataacgttgatttaaagcgagcttatctgctggcgtattccgggcgatttaaattctttattaagaaagttccagaatatactcccgttaaatatccaaatgttccttcaaagacgttttcagatggtctagattacctccaagacattctggcagcacgagtacttactggtaatatggcaatccaggggctagtagatttgctctctaagatgaatgagggtgatgctagtgtactggtacgggttcttcttaaagatatgcgttgcggcgcttcaggttctattgctaataaggtatggaagaaattaattcctgagatgccacagatgttagcatcagcctactctgagaaagcgctgtcatatattaagttccctgcattcgcacaacttaaagctgatggagcccgatgcttcgctgaaatccgcggagatgatttagatgatgtgactcttcttactcgttccggtaatgaatacctgggtctagataaacttaagcgtcaacttatcgagatgaccaaagaagcccgagaacgccatcctaacggtgtgatgattgacggcgagttggtatatcatgtcgaagtgaaagaagaagaaaacgacctgtttgatatgtttaaagagcctgagcttcctgagttaagtaaagctaaggaattccaacagacggctcgcacggaatcaaacggattggctaataaggctattaaaggaacaatatctgccgaagaagcggaaggtatgagattccaagtttgggattatgttccgcttgatgtagtatattccgaaggtaaagttcctggatttgcttatgatgtacgcttccgtgcattggaaatgatgagcaaaggctatgacaaggttattctaattgaaaaccatgtcgtacataacatccatgaagctcgggctatctataagacatacgtagaccaaggtctcgaaggtattatccttaagaatatcggtgcttattgggaagataagcgttctaagaacctcgttaaatttaaagaggttatcactgtagatttgaaatgtgtcggttcgtacgagcatagaaaacaacctggtaaaatgggcggcttaatgttcgtatcagaatgtggtcgtattcgtgttaacgctgggtcaggtcttaaagataagcccgaagaattacatgaacttgatcgtactcatctatggaaaaacagagattctcttccaggaactatctgggaacttgaatgtaatggttgggtaactgctgaaggtcgtgatgatggtacagtaggattattcttacctatcattaaacagcgtagatatgataaagaagtggctaatacattcgaagccgcgtttggtgttaactttactgaggcaacaggaataaaatgaaagctttatacgaagtgattgctaaatctcttgacggacgtggtggtatttctgttcacacagaagttattgagtttaataacattaacacattaagaaacttcaaagaaaacattgaagagtatgagtctgtaaatggactacaagtttggcgtacagtaacaataattaattaaggccttcgggccttttttcgtataaatagaataaacaaacgaggatatgtcatggaacttttaaatgaagttttcgatgaagagaatagtaaaatctatcccgtcgagaacgttaagccaaaacttaaggtaccacaggtctttttgattaaggtgccgggtaataacaatttaatgattcggttagtacaagggtcaggtcaaggtgatgcagttaagaacatcaagatgggtgataaattcatccaggtctatgttttctctgtgtcggaaaaaggtaacatcggggcgcttaaaggtggtttaggccaagacccgattggtgctatcaataccatttttgagaccgtcaacaaagtagttaagcaaattaaagctgatgcggtaatgttccgctttaatccgaagaaaatgcaaggacaggataaagccattcaacgcattcttgctcggttgattactactcgcaccggcggtcgtttcaatctaatgaaagatatggcttactacaaaggtaagtatgcttattctattatggttcgtaaaggtaagaaacttgaagagattgaaggaattcctgaaatttcagaagaactttacaccaaagtagattccaaagtaggcgaagtttatgtgtctaaagaaaccggcgaaaacgttaccaaagccgaagcattggctaattccattggcgaaaaagaagacaagaaatctgaactcgctgtaatgagtaaaatgaaagtgtctcgaaaagatttaatccgagcacagtacggcaaatttgtttcatatgttgatgaagattggccagaaaataaacgcgaacgttggtacgaattaactactaacacaccggttcttagcgcagaaggcgatacggtagacctccaaaaagatatcaaagccggattagaaaaatcaattcctttttatgttgatgatatcaagcactatcgtgttcgtggcggatatggaagtaattttggcgatgcagttgagagattatttgtaggccaaatgtcgagaatgcatgacgactggaaggttttcattccttcggggtcagacaaaatgaaaatcgctgaacaacgaatttcagacgttgctgacgttattgctcaagctaaaaatcctgcatctatggaaacaatgcgtaaaatcgttgaagtagctactcgtggatttgatatgcctccagctgacgatttcggagctttacgtcaataccaaaatcttgtcaattatatgatatccgcttatgtgtcaattgttggcgattctatatccaaagcaattgaatataaccgtgaaatgcattctcgtttaagcgaagaagaaagagatgcaatacaccattactgtggttctggttattcatttgttaataactatcttattggcatggaaagcttaggcgatccaattattgacaagaaaattcgtccgctcgattctgcctttgaaaaaggtttgcgtcttgaaccaggcactcttttgtatcgtggtcagcgaggaaaatatgaagactttaaagataacattgagtctaaaatgttttatttccagaactatgtttctacttcgttaagtccaattatctttggtgcttattcaaatgctggtgattcattaatgccagacgcacctagttctgatttagaaaacaaagaaacaactatagatgcagtatcttctgttattggaacagacaacttggaaagagttgatagaggcgaggaagttgcctatggcgatgagtttaagtttggattcgttatccatggggccgataaagttaaggtagttatcccgggtgtcttgtcaagctttagcgatgaggctgaagttattcttcctcgcgggttggcaatgaaagtcaacaaagtatggggaactccttttagaaatggagttggtgtagcgaataacaagacattcatggtagaaatgacggtagttccgccagagcaaatcgatgaatcggttcatctctatgatggtgacatcttgatggaacagggcaaagtggaacctcttgaagaaagcaagttcaaaggctttttaaatgagatttacttttcgccagaccgttctacagataaggttagctacacgcgtaccatggagctactggctggtgctatcaacctggatggtatcccagaaaaacttgcataaagttgtttacttatcacaaggacgtgatactatagacttacacaaaccaatgaggaaattgatatgaaacacgtatttcgctttaacggtattgaatggtctgctgatgttaaagatgcagagaagttcaatgaagaagttcttatcatgcttgaagggtttaacgaaggtactccgacggttcttattcaagatatcttccgtaagccaacagagccatcgtttgtagaagccgttcttaatggaaaggcagaaggtatcattcctgttaaagtagtttggaccacaaacgaaatgaaacttcttcgcactgagccagggtttattggctgcattgcataaaacaaaggggccttacggcccctaaattattctacttgttgtagtagtgatattagaaattccaccaccagccccgcctaaacgagacaatcttgaagcagacgcactcaagccctgatttggattaatcgtctcaattttctgaatagccttatcttccaaccaatccatagcagcttgttttccaaccgaacccgtttgcatgctacggtaagcaaacgtgacatcaaacactgctatcgtgttttctccatcatatgtaaattcgggagctccacacgctacaggcatagcccctgagaacaagcatacagtatgtggtaatccatttctagcatgaaggttaacttggatatcacattctacgtcttgtggcaatcctcgcagaccagtcactgggtcttcaacagcatttacccaatcttgcattgcccggtagttgcttgcttctgggtccatcctaaatgaaagaaccagcggttccatatctcttcctgtgatttttatattaggagcgttatggaacttatccatttcatatgataatctgttctctggtattttagcagaataaaccatcaatcctgctgttggaaatgccatattaaagaaatcgagcagataagtacctaccgtaaattctcctaataatgactgcaccacacgttgagtcattgcgccaatcataaatgtattcacacctgatttacgaacaacttgccgagttccttgtgtcactatagttgttataccctgattgaattcacctggggtcaatccaagccaatttccatctaaacccatattattatacagctctccaccaaagtcgtttagaagagcctgggttttactagagggtacagtagcgaatacaacagagaacatgttagttctctggaaatcgatgtcagccgcttgactcttaaattcttcgagagtaaacattattcaatacctccgatataaacgttccctctattaagagtaagtatttcacgcatagtaatttcaagcgtaaatgtgcttggaaggttaggagcaattgctaaaccattgaaatgtccgttcggcgttttatcaaagcggatactctgaatttggcatggaccaaatatatcctctctaccatccattgatgtagaatatccaaaattacgaacagtccaaatcgttgggttagaaactacaataacattgcttaaaaacgatgttatttgctcaaacaccgtgttttctactttagccccatctggagctgcggatttaagagttcctttataccattcatcaatagcagctttaacttcttttgcgtatgatgaatttcccgtcacaccgtaagaatagtagttaaaaatttcatagatgcgaataatttgtataaggtcatctgcagacctaggagttaaatcccaagtaaacactttcgttctgttgtcgggtccggcatacatactacgagctgtgttataaatctgttcaccgttatcagccattaatccctgcgttaaagactctatcgacccaaacaccgcagtagaagccacgttgcttaatacaccggtagcagtaccgccgccgcgagtaacaagagaatcaccaacatcattaaatttatggctaactgaatcaacgtctgacttagaccgcggtaatagaatattagctactggtgcagtactagtggtagaacttgatgaattagccaatgctgacattggtgaatcgaatacagacgataacattacatctcgtctaaatgaacgcaaatcaggagtagttcttcctttaaaatcatatgctgtgaataataacccattgcgatataagtcatgtactctcatatcttgggcggaatcattcccagctgaacgttcagctgggaactgcgccaccttagtggttggcgcattcgtcagtttagatttaccttgggaaattcgagttcctgattttttgatgttttcaaggccatcggccagttcttcaaaaatcattatttttccttaagaggttttcatagcgccttgcattccaggagcagctgtcgaagtctgtggaggcattctataaacatgtgtgctattcttatttacagcagtattaacctggataggttgtgactgtgtattagattcacgtgtacgagcagcttcacgactatccgcggcggctttaatagaagcagactgtttaacctcaggttgttctgctgcaggtatagcttcggcagttggagcaggttctgatattttagaatcaagaagcttttgcaattggtctaattcaacctttaaatcttttgcaacttctggagataatttctccaattctttatatctggtggttgtgctttgtactgcatccttagcagagtctaatcgagtggaatcagatgcgtcagttttttctacatacgcttttgttctcttcatttctgcttcagcattattacgagctgtgatgattttgaggcgttcgtcttctggcaagtctgcatacgctgactgctttttctctccgctcagcagtttgttatattcatcgtcatcaatctgcccggtgaatttttggaacttagcagaaagctttcttttccattcaggttgttcgtcatattctctttcttgacggtcaacatattttgctctcattttagcatcttcttcatcgagttctgctccagtaacagtttgaaatctgtctaaagcagcgccttcaatgttatctgccgaatcgttaaatcctaatgcgcgtaacattccagcaagaagcttactcattccgagcataatggtttctccgagcttatcaattacatcaaccaaacccgagccaatggcttttgctaatccgccccaatctcctttgacgaatgattttactatttcattcgacatctcgcttattgcagttaatagcggaccccattctttagcctgcttgttaaattcaacaaagttcttttcgaataatttagtccaataattaaaatgaactttaattaaatctataagcattatcacacccaaaaccatggcggcagttttcgccatttgggccaaagcgctaacagtataactaaacagcatactgctaattttatctgttaatgaaatagtttttccaaaaccagatttaacgcttttaattaattctccaaattttaggtcaagaaactttttattcttgtcctcagtttcctttttaggctcagctttttcctcttgctcttctgtgctaggaaagaaatccgcgtcaggacgtctgccatcctgaggaggaataagtctttcgagtaattcctctagcggctgctgagtaggagcatccgggacttgttctgttatcgtttctaatgatgttccagtaccagtcttttggacatcttgctgaacatcatgctttttagataacaagtcggcaagtttcgtgagcttatcattaattaatgatgcagtatcattaagttttgatactgcatcagttgtgcgctcagaagcttctgcggtcaattcgacaccagctgaaacatcttctactgatttgataatttcgtttgatttagtttctattacatccgaaattaaatcagtagatgcttgttggtcgtctaaacgacgaccaatatcttctagcgtattaatttgagcatcagcttgagactcagcctttttctgtggagccgagtcagcaataactcttctacgcattgaattcatttctgatttcttagtcattcaaatatttccattacgttaagcatgcctttgattggtccttcaggtccatcaatggctatagtgtttactaagtcatcagcccactttgtcacaaaagctggaagcttcataaagtttatatccattggttttccatctactgattcaagaaattcgctcaaaattgaatctactgaacctagtttggaataacgaggaggagctctgaatttgaattctttaccatctaacctttgagttaatcgctggcaaatgtaaaccttattcaaatcgtaggtaaaatcatctttaacaacagtttcttttattctgttgttaaatgctaataaatgtaatacaacaatatcagattcggctgctgttaatcctggacaaattgaatccaaaagaagattcatgttttcatctggacccttaacatctttcatcagattatggtgctttaaccccagttttggaattgatatcgtcttttcatttattactattttcttaataggaagaatcacgtttaagttcatttttcaccttaatcaaatctacaggttcaagggcagagccatttgtgaacatatataagttagttatagatgtgttatttgatatttcatggataacttcatctatataaaagtcagttctgaactggtcctttaaatcaacaaagttgattttcattcctggagttagttcaaaattaccgtaacacttagtttgagcatacccgtcatattgagccatcgtagaaatgcgtagtgcttcttcatagccattcctaaaaatcatgtcagaatatcctcctgacctattaatgaatacgctgttttggccttctccattaataattcgggtaacatctttgtccacaaacgagtgtgcataaaatgttgcgtttttcatgggatttctattatatctgtttgatttaacaagccattcaaaatcccatgctaatggatattttaatcctgcagcaaactgacctattgtttgaggagccccgaacatgaatacatttggatcctgggatatcattgattcataatccatcatgttaattccggtgatatcttcccacgcaaaaataaattgatcgttgtctgtagaaatgcctacatttctaacatatcgtaagtaatctttgagggtactagtccagggaacccgtgggacgtaagcgttaattccgttgataggaggagcaatcaatggttggtcaacatacattgcacctatcatttcttttatagtttcatacgcagaactaaaaaacgctctgctgaacttgagattcattatgtcatgcagtgttccaagctgaagggtgataatgctatcgcctttatcatcaacaccaactgtaaagtgtttaatcccataaattcgggtttgtgttctcgatgtgttactgtttgcaacagatatttgaactagttcatcaccgttcatacgcgtgtgcatatttttcgagtcataaaactgaagtaggccttcgttagtcccgcgtaatgaatctctcattgttaatgtaataaatgtagctgctaattcaacgaatctattagctagccacgcatcatatccagaatataattttatgcttatattaggatatcctaatctttgtgttgtcatgatttaaggtccttttcaataagcgataaggttatgccacgctcaataggcagcatcttcattatagaattcaagtcatatttaccttgagaaaccaatctatggttaatttggtaaaatgtgaaaatctcgtcaggatgtagcaatagcttaaagatatcaacaatgttatcatattttaatactgtcgtggtatcacagcatgacgtttttagctcaaaattaaacggcttcatctgcgataaaatcttttccaaggtttcaacatctatagcatcgataacggtcaatttattgctatcgctcaattcattccacgcgtattccccagatgaatccttcacagatataatgttatctaaaatcattttacctgtatcgtcaattatttctatgggttttttgaacttgagcgttaatccagcaacctctactttcggatttgtcaacggaggctgattaagattaaaaagatactgcttatattttccgcattttgggcacttcattctgacaggtattttggttttaccaatacttgaaagaaataccttaagaaatatataaggacgatactcagcaggatggtcatgaaaataatcatccattaattctgctataagctgtttttgttcttcttcagacttggtgttcatgtcgtttctaaccaataaaaggtctctataatcttctactgtaaatggcttaaaacgttggacaccatctggtaattcgcatctaactatattggccataaggtaatcctctttatactatttataaatatttgaataagaggagtggatatgaacatcacatacaaatttgaaacaagaataaatggcaagaatatccagtgccgagcttttacactagaagaatacgctaatttaattgcagcgaagaaaaacggtacaatcgatgaatgcgttaaagcattgctcagagaatgcactaatgccactgaattaaacaaacaggaatcggaattacttatagttatactttgggcgcatagtataggcgaggttaatcatgaggtgacctggaattgcacctgtgggcgtaaaattcctgtgccattaaattatacacatgcgcaaatcgatcctccagaagacctctggtatgacttaaagggatttaaaataaagttcaagtatccgaatctttttgacgattcagacattccaatgatgatatcaaaatgcatagattatatcgtggttggaaatgagcagatttactttaatgatttaaatgatgcagaaatcgatgatttatattctgctattacaaccgaagatgtagttaacatcaaaaatatgctattgaagccacaggttcaattggcagttcccattacttgtgaatgcggaatttctcacattcatgtaattaaggggcttaaagaattctttaagattatgtcatgagcaatattgataaattatattctgaccttgacccagagatgcgacttgcttgggataccgatgtgtcaaaaacggtaggagcacgatcggttaaaaatagccttcttggaataataaccacaagaaaggggtctcggccatttgacccagcgtttggttgtgatatcacaaacgaattatttgaaaacatgactccattaactggtgatacgataaagcgtaatatagtctctgccgtgcgtaattatgagcctaggattaaccgtctatcagttgatgtgcttccgttatatgacgataatgctataattgtcaccgtgcagttttctatagtagacgaccctgatacgctagaacgtatacgcatacagatgcgtagtaatgctaactctagcagtagagtataatggtactagtccttccaaagaaacagtagagtggagatagaatgagattagaagaattacaggatgaattggataatgatttgattatcgaccagactaaactacagtatgaagcggctaataaccctgttctgtatggtaaatgggtgcgtaagcactcgacttgtcgaaaagagatgttaagattagatgccctcaaaaagcaaaatcttaaagcacgattggattattacactggccgtggcgaggttggtggtgaagtatgcatggatgtgtatgaaaaatcagaaatgaaaactgttttaagcgctgataaagaaatcttgggtgtagatactaaattgcaatattggggaattcttttggagttctgtagtgatgctatggatgctattaagtcacgaggttttagcattaagcatattattgaccttcgtcagtttgaagctggcgcgtaataaataaacttgtaaactaaggagacaatcatgtcgaatacggtatgtgtcgtctgtaaaggaccaatcgatgaagcattggttgtccaaacagacaaaggcccggttcatcccggagcttgctataattatgcgattgaattgcctgtcactgaagacacagaagagcaattgcaagaaacgcagcttttaatttagtctagtgttgatgtagccaattggctttgccccttcctttcggttggggcttttttatatcagaagtcttcgtcgtcttcatcttcagaatcagcttcaagagcttgtctacgccccgccaaagcatcacgcacaatgatatcatcagaatcagcaagagtagtttctttagagcgcttatcgtaatacttctcgagttcttccagaccatctaaggtctggcaagcattaattttactcatgaagttatcgatagtagcctcacgaattgtggcttcgtaaatatcttcaaatttaatcatagatttaccgttttcattacgtagttaaatttttcatcagcatatcgttgaatacgctctaatgcatgttttaagcaatagtttaaatgtgtgtatttctttttagcattggctgacttcggctttacacccaggtcatcaatgatatcccacactgtagccaaagatttatctttatgcttacgaagaacacgaccaatagtttggagtacgataatcttcgatttaactggatgggctaaaattacatgatgcaggtttttaacagaaataccggtagaaaatacaccgtaacttgcgacgataataattccctttccgttttctgccatagcctttaaagcattacgtgtttcggtattaacttcgcctgacacataatagacatgctcatgaccagcagctttaatcatctcgaatagctctttaccatgagctacatgtttaaacatcacaaaggcattttcgtcacgcgctgcaagtttagtagcaagattagcaatccaacgatttcttttcttaacattggtgatgaatttaatttcttcttgatacgtttttccttttaaagcatttgcggctgcatctggatatcttaagaagattgtattaattttaagctcagttacttgtccgtcttccattaacttagaagttgatactggacggaagatttcaccaaacataccaacatattgcatgatattagctttgccgtctttaagagaaccagacagtccgtacttaaacatgcaatttgtaagacctgcaatgattgttgaaattgacttacccgttgcaagatggcattcatcattcatcatcatgccgaattgagaaaaccattctttaggctgcttaacagcggtctgccaggtagatacataaactaatgcattcgaatcacgagcagtaccacctcgaatacccagcatagcattacgaggaaataaacgatagtcacaaaaatcatcaatcatctggtcaactaacgcagtagtaggaacgatgataagaaccttgccttcgtaattttctacataatatcgagcaagtaatgcctggataagagacttaccagcagatgttggaagattaagaattctacgtcgattaactagaccttcatatacagcatctttctgataccagtgaggttcaatcttagttaatcctgaataaatttctttagttgacaaccaattatcaaaatcctcccgcgaaagagtttcttgctcgaatatagctggatcgaaataaaccttatatccgaattggtcagcgaattttctaatttggccaacaagaccaaacggtaagagacgattataatctagcagacgaattcgtccatcccaatgtccatagcgatatttcgggttgaatctgtatccatcggcttcgaagctaaaatagtctctgagttcatagaaaatcgagtcatcacactcaatatgaacatgactaaaatctttaaatttgacttggatgtcgtgcactgtactatcctcagtttataaatacaatcatatttatacattacatgaggcacacccaatgctagataaagactatattaaagaaattcaggcactcgataaaaaagaagctaaagacaagctcgacgaatatgcccagactttcggtattaaactgaagaaaactcgttcatttgacaacatggttgctgacttagaaaaagaactggctaaattggccgatgagcctatgccagaagataatgatgggctgtcaattgctgatttaattcaagcagatgatgaaattgagggtaaagcagtatttaaagatgaagcgtctgatgaggcaaaactactgtttgacgctccagttaatgttggtattaaaattcatgatattgacccaggtttctataaagaaacccctaaggtaaatgacccagggtttgaagtaaaaacaccttctatcaatgataaaggattttatgctgaagctcctattggagacagcgttattcatatagatgatgaaggacaagttaccaatattccggttagtatcacggaccccgaagaatttttcaaagcaatggacaaagtagttaaaattattaaaacagacgaaatcattgagcttcctgaaaactttagtccaaatatgcaattgctaggtaagaacccaggatatattactcttccatggtggatttaccaatggattaaagataacccagattggaaatctcggccaacgtcgtttgaacacccatcagcacaccagacactgtttagtttaatttattacatcaaaagaaacgggtctgttatgattcgtgaaacacgtaattcttcatttgtaactttaaaataaggaacacctatggcttatagcgtatctattgctcctttggctgcttcggcagtcattggagcaacaaccaattttactgcaacaacttctggagccgcggctgcaggcacagaatcatttgtgtggaccgtaaacggcgtaaaacaatcttctgttaccgcagccatgaattatgttgctgcgggtcctgcaggcagtaagactattaaagtagttgctactgttactccggctgaaggcgatcctgaaacggctgaagcagaaactactctgacagttaagaacaaaaccatgcctgcgattactttaactttgagcccaacttctgtttctaaagaaattggccaatcccaagtagttacagctaacgttgctggggcgccagcaggagcaagcattgcttatgtttggaaacgcggctcttctgttatttctggccaaacgggtaaaacaattaccttaactgaatcaacggaaaccagctacacattgaattgtgaagtgacggtttctgctccagactataataatggaactgcaactaaaggtattgctgttgcttttactaaaaagaccatgagcggcgtttcagttactttgactcctgaatctattacagtcgagcaggggtctgatgcatcttttaaagccgacgttatcggttctccagaaggtgcatccggaacttattcatggaccaaagacggttcccctgttgaaggttcaactagtactttagtgattgacacgtctgatatagggtctcaagtgattggggtttctgttgaggtttccgcagaagattataactcagtcacagtaactacaactggtaatgtaaatattaccaaaagagtagcccctgagccagacggagaacttccatatattcatcctttaccattccgtggaacagcctatatctggtgtggttggtgggtaatggatgaaatccagcgaatgactgttgagggcaaagattggaaactcgacgaccctgacagcgattattacctgcatcggtatactctggctaaaatgctagatgattatccagaagtcgatgtacaagaatctagaaatggatacattgttcattgtactgcactggaagcaggtattatctatccgtaatatttgggagccttcgggctccctttttgctattcacagactggtttaatatgtcttcatcacatagatgaggttattatgaaagcactacaagctcacttaatgcatgaaagtggtaaagattttcaagaaattgcgagagcattagatatcactccagcggaagctgctaaattgtgggtctcagttgagaaagcacacgaacagtttaagcaaaaagaaaaagtcgtttatcggaaacgcttaacaaacgttggtataaaatctcgtcataagaaacttgttaaacacatgaggttattatgaaaatgcctaaagtagacccaattgtagtagaacgatttgaagaaatgctttctaagaaatttacgccagctgctaatggggtaaatgtctggttgtttgcatctaaatttgttagtaaaatgatggctgttcagagttcttactactataaaagtggtgcacgtaaaataacggatttgattaatgaacggtatggaaaaattgattggatgctgatggataaagatattccattagtacttgaggttggaagcaaaagtcaatttgaaatcatgctaactaaaagcggatatatcatgtatcgcttcgtgccgagcggctattaattgctttaaaaatcgatgtggtataatgggctcaggggaaatcctctgataccattttgaccaagatagactcctggttttatattatttattgagagaaaaattatgaaccttgccgatagaatggctaatacagccatcaatattgctacagaagaattgagtgcagcaaaagaagaagtattaacccagattgagaaaaccgctttagcgggtcaacgtgagttaattatgtatcctagcagtttagttaagaaacatattacaagtgttcttaattatttgcatgatgaaggatttgttacaaattataccagtgcccagcgtaatggtgatactgactttatgaaaatcacattctaaggaaattataatgtttgcaaaatattctagtctcgagaatcattacaacggtaagttcatcgagaagattcgcggtgctggttttgatatgcatactgttgagtgggtggctcgtgagaagattcatggcactaactttagtgtgattattactcctaccgaaatcgttcctgctaagcgtactggtcctattttagaaggtgaaagcttcttcggtcatgatattatcatgaagaagtataaggattctttcgttaagatgcagaacatgctgaacgccatggatttagtatctgttcaaatcttcggcgaatttgctggcggtggtattcagaaaggcgtagattatggtgagaaagatttctacgtatttgatatcctgtcggattccggtaacgaaaaagtttattgggacgattatgtagtagaatcgtttgctactggtcttggtcttaaattagctccacttcttggtcgaggttcatttgccgagctatctcagtatgtgaatgactttaaatctattgtcaattactataatgagcttgttgacacgactgaccttgaacatgcaaataaacatgtgttcggcccacaggcttcttctgaaactggcgtagctgaaggctatgttcttaagccggttcatcctaagttcttcaataatggtactcgtgttgctattaagtgtaagaactctaagttcagcgagaaggctaaatccgataagcctattaaagcgaaggttgaactcaccgagaatgataagcgtgttctggaaatcttttccgaatatgtaacctggaaccgcgtaagtaacgttctgtctcatattggtactgtaactgctaaagatttcggtcgtgttatgggtctgactatgaaagatatcattaacgaagcagcacgtgaaggtcatgatatgttattcgctgataatccttctgcggttaagaaagaaatcactactttgattcaaaatactattcgtagtaaatggcatgaggttgtagaataatgagattggcgcttattggttcacgagaagcgccacgcagagttctgagtctaatgactacaataggtcaacgcctctcggaagaggggcatttttcatattcaggtggagctccaggttcagatgaagcgtggttggcgaaatacgataggtcaaattcttgtaggattattccttattctggcttttgtggccatgttcctggtacaggtgttgttgtatggtctgaattatcaaacgaagccaaaatcaaaagcatcattaaggcgagagaagttacgtcgtactgggatgaatgctcgaagatagtgcagactttattcgcacggaattctatgcaggtattgggcctagaatgcactgagcctgtagataaggtattatattgggcgcctgagaaaagatgcgggagtgtatctggagggacgagagtagctgttgatatagctcgcaggcacgggatagaatgtgttaatctatacgataagaaagtgtttaaatccctcgaggaggaatactctccgaagtttgacatatttagtttatagcaaaaagggagcccgaaggctcccataaattagtccgcaatcagcttaggtaacttaacaccgagcataacagacatctgacttcttcctgccatcttatccatatccgcagcattaatcacacgagcttcgtcctcgtccaatcctacagtatatgggttaaccgacagcgcgtaacgaaccagtaaagctacagaaggctgcaagctagctgggtcaacaataactttaaatgcaccaacatgctcagggtcgtctaaatcaagaccttcggtatacggcgcatagaataatgaacctacagtttccttcccaccaaattctgccttaacaccaacaataacgtaatcaatcggactgttagtatcacaatacagtggaaggccgttattcagaatgccatatgcgttttctggaatagtcccatcgttcttctgcattaaccaaccagaagctgccagtaccgctgcacaacgagtagatgctactgcgtaggtgccagaataagaagtattacgttgaactgctgaattcatttcacaaatgaaacgatacagagtacgaccttgttccggggcagaatcctgcttagttaaatctaatacacctttatcggatacaccagctactttaaaccgagaagaaaccgtaatcaatgattgcaggatgtctttattaatgtcttctgccatttcagtagcaagtaaatcatcaataagctctggagcatcgaacccgttagcttctaagtcttgagctaattctacagttaaatccgttttaagcttacgcgatttaacctgggtctgccatttatcaattttaaaactggcttcggtgattgggtctgaatcaggtccttcgaatttttcagtgactgcagcatctgacatcatacgaatattattagctgctactgcttcagatacaattccaaattcatcggtttctgctgtatcggtaaacgggctatctttaagtactttaaagaccacattctggtatttgaacatatcgtctttattgaatgagtctttatttgccatagtgagttcttcaattgactcacgttctggcgccccgatttgacctgcataagttgcacccgtattaaacgtcaggtcaccattagggttaagatatttaataccatacagtgctgctacaggctgtttagtacgctgtgtagcaacaagatcggtatagattaatttagtggttgcgcgcgttaatgcaacgagattagggcgaccaattaagttgctactcgttgtagttgactcgcgcagaagttcgttgattttagccattgcgctttcctctgtggatttataagtttatttatatccattaaaacaactaaagggagcccgaaggctcccttattggtattagatacctttaacccatacacgacggaagtaagcattcttaccaacagagttgacgatagaaggcataccagaggtaatacgacctttcggctgttgagcagcagaatcggcgaacgggttaataccgataccgtaacgggttttgaaccccatgaccggttggaagttcttcggatcggaaccacgcagcggggtcagtgcaacatacggagcatagtagataccagcatccatttcgttagcacctttataaccgatggtgaagtaatcctgacgagcatactggtcgatgtatacacggtagcgaccacccagaacaccagcaaatactgctttagtggtgtcggtattataaccacgacccagaccctgagctgccggagatacgttggtatcaacagctgccagtacgttaactacgttacgggaagcgataatgaagttaccttcaccgcgaccggtctgacgagcgatttcagcggattctttgtcaatctggaacagcagagctttaaagctttcacctgcccaacgagcaccgcggatatcaatcgggtcttggaagtcgaatacaccagctttagaaccaacggtctgggtcataccagatttaccaacctgagcggagtagttaatccagtcaacaacttcacggttgatttccagcataatttcggtagccaggattgaactcaattcagcatcagcgtccataccatgaacagcacggaggtcctgagccagttcgatggaatactgtgctttcagctgacgagatttcgcttcgatagtttgtttatcgatacggaagcccatttcattccacgggttatctttagaaccattaaaggcttcttgcagttcagcaacagaagtagccataccttcggcgatttctacaactttaccagcttccagagcggcagttactgcagcgtccagtttagcagcatcagtagcgccagcgtctacagtgaaatcttcaacaacctgcagatgagcacgaccggtctgtgcgaaatcgtgaacaacgatatcaccaacagtcagagcatcaccggctttaactgcttcgaacttctcggttgcaccctgaccagagaacattgcatccggagcgtacatcggatggaaagcttctttagcaccagcagccagcgggtctttgccgtaaacagcgcggagagcgaatacctgaccggttgggttagacatcggctgtacaccacagatatcgaaagcaatcaggttagggatagcacgacgaaccatacccataactgccgggccaatctgggttacagcaccagaggtctgaccagctgcgatgttctgtgcatcataaccgtggtcaccgccaatttctgcttcagacaggaaagaaccaaatgcttcagcgattttttcatcgcggtattccggagcctgattaatatcagcttcctggttttcaaaaatcttagcgatcagagcttttttgctagcgccaacaatttccggcagagcttcgttctcaagcagcggctgccatttttcgataagtttattctttttcatgtgttgtataaccttttaaattaagaaagacgagccgcttgggctacataagcatccataacggatggggttttagtcgcaggagtttcttcgactgcttcagttgtgaagtttaaaccgtctgcttctttgtcgatagtatttatatcggcagattccgttacagactgctctacagaaccctgcaccatttcaacaatagctttcagcttagttgaaaacgagtcagaataatccataccctctgtcagagaaactactttctctttttgggtatcagtcagttcacgggttgcttcttggatagcatactcacgttgggcataattgatatactcatcgcgcttagaaacttcttcaaataaacgagcagtttctgctttttgctcagcaagttcttcttccatctcagctactacgtctactgattcttcaggaattacaacgttgtgctcaacaaacagctctttcataccgacaaacatggattcaaacaggtcagctttaataccgcggtcaaccgccagctggttttctgccatccattctgcagcgatatggtcaaagtatttagaagcagcttctttcagctcttcgcgagcttcttctttagctttttctttttcttcttcaactttttcttctgctttctcagcaatcttttcaatatgagattctgccagagctacggcgtgttttttgactgttgcttcgaatacagtgctgaagttagctttagcttccggagaaagctgaactgattcgaaaatactgtcaagagcgacggaagcatcgatagttttagcttcggtcattaaaagttctttaagcatttttgatgtcctgtgttaagttacataattatttataacgcttttaacttctctgcgagagccataaaagcatcatcagcactattggcaacttgtgccgaggtattttccgaaatttgtttcggttgtacccatgcatccggagcactaggaccccaaactgcgtctacaccaacagtcaggcgaaagccttcttgtacgatgttatatccttttcctgagtctttcaaagaaccgagcccgcggcttgatacaccaggaatccaaccagcacgaatgttagcggctaatttatcacctggaccgtggtctccttcgatgattcttgctcgcccataaacatcgttgcctttccaccacatatcttcgataatgattgcggcttgcatcgggtcaacatttgcacgaggtggatggtttaattctcctagagcctgacgagtagcaacctgttccttaatataacggcttaccgcagtctcaagaatgcgttttggataaagacgtttattacggtttactacttctgcctgcataaaaacaccttcgatatacagaccaggttttaagccagattcattttcgccttcaacgataatagattccagcatgggtttaccatcaattacatcgcccggttgaccccaatgctcaattaaaagttgttcattgaggttttccattaacttagccccagagcctgacggcgtttaagtgctttcttacgtttacgtaatccacgaatttgagcagatggattagcacgttttgattttactgctttacgcgcgatttggcggcgtttagctttagaaagtccggttgtttggaacgcgttacgctcacgtgttttacgatccttagtacgtgtaatagtacctttagaatcaacgtgcttaacgataaattcatttaattgtagagattcgttaattgaacctaaagcaattgctaaatcaggctcagaagtaaccatgttctctacaattttatttatatcatctttagaaagcgctgcggacaacttatcaaaacgtgcctgtgcttcaggaagaaaagcttcgacagcgtcgataactaattcatgattttcaggcagtataagcattactcgtcctcttcgtcgtcgtctttctcagacttatcttcatcttcgtcgtcttcatcttcatcgtcaacgggctcttcaccctcaatcatgacagacgctgcgataaattttttgcgctcttcaattaaaccagatgtccgttcagccataattgcaccaaaagcttttttggctgctacgaggtctctggattcaattgcggaaatataattttccattagaaatcctcttcattttcttggtcttggaagcgagcctctttagactctaattcaatttgcttggcttcttgttcaatttcttcgtcagacatctgaaggaaatctttcattgctgtcttatgagaaatatacttgccgataaacggttcagccattgtgagcatattgattctacgctccataacttcagcatctttcaactcggtgaaatatgaatctttatggaacacaatcttaatattatttatttcgtcttcccactcatctttagacaaaacttttttaagaattagattagtgcgaagtggatcaagcataatctcttcgaatttatgctgtaatctacgaataaatttagcaaaatcaagctcatcgcgagtaattgctgtgccagcatcaaactgcacaccaccttgattatttgcatctggcatgcgcgaaagaggaactcgcaatgccatgtataacgctgttctaaagtaacggacgtcatccatatcactcatacctgacataccaggaagagtatctacttcagtaactgctttaccatctctacgctgcaaccaatagtcttctgtcattgacatattatgctgttggtttttaatcttaccagttgacgcatcatatacaacacggtttttcatcgtgttcataatatgctgcatgtgtgctgccgctttacgagaaggcatattaccagtgtcgatgtaaaacacacgacggtcaggagcacgagtaatacgataaattaccaacgcatcttctaatagctttaactggttggcaggtttaacggctcggtgtaaataaccaatgatgttttgacctgagcaatcaactagcccagaatgtgcatatactatagcatcgcgtggaattttaattttcgttccggcggaatataatctaccatctgcgtaataactttctttgccagtatcgtaaatgaaatactctttgtaccccttaacgattttagtgccagcgtcatcagcggtaacgatttcacggatgaattgtaagttgcgcgggtcaagacgtctcagttcctgaattccgtctttcattttcttggtgttgacgattttgtggaagaatattcttgagtcaacataccaacggcggaaatggtcggctccttttcgctcgaaattaaggcatgttaaaactgtattaaattcttcaagaatgcggtctttaattgcttgactgaagtcggtagaatctaaatcaagagaaactactggatgaccgtcttcgtatacaaccgcgtcagaaactatttcttcaacagcattgtcaacttcgtagttattcattaaactacgataagtgttgattaaatcagcggttgttttcattccaggttcattggaaccaaacatcatttggttgaatgaattatactggatttcgttttcgtttgattcaacttcacgagctccatcatcaaattttggagcagtgattgactctaggtcattgttgatttgttgcttatattcagcttcgtcgcgtttttcccacggagcgaataagtccaaaatatgaaaggccattggagtctccgaaattatctataagtatatttatatcgaagttttgtcagatatttaagcaaataactcacagaacttcgatacggggccgaagccccataacattattcccaccagtcaatagcaaatgtagtttcgaacgtttctacctcattattcgaatcccagtccatctgtacttcaccaacgttagttggccacagaccggtaatggtgtgttcatttgtgatagttttgccatcacgactaaactggcgtaccgtagcaacctttttgtaatcggctggagtcataccagagatatcattgccttgagcgtgggcctgagcctgccaagcaataattgccttacgtacttcatgtttatcatcgttatagatggtaacagtccagtcgtcataagtacggtcaccggcaacgttaatcttacggttcatgtacccgactggaactttttctacgatacctgccggcatcggtgctgctttacatttgaaactgaagttacgacccagataaggaatttctacctcaaacaggttaggacgtgcaaagtcaccagattcaaacgcacgggtgatgtctgttaattccatcgttgtttcctatagatatttatatagcctcttgattgactacatcatcgtagaggctattaaagtgtgcggtaatataatttatcatctaaaggttagatgaccccagaatgtcctggggttcatttcaatagatcccataaatcaatactagatttctttgattttgaccgattttcttcccaagtgattatctctaaattatcaatgcttcctataatttcaggaggaactttgttgtaaaacccatatgcaacagaaaccttatggtctaattgatacgctccaggtattccacatagtccaatcttatcaaaattttcccatgtagaataaattggtttatgcttagaagtttctcttctaactttactagcatattcattatattctgtcttgtttggattccagcgaggatggttttctcctgtcatcgaagacaacactttacccttattagctgttccaatagtatttcctatcttaaattttccgctacggcaatcatagcacacgtcagtgtctctgcaataacgctgtgaatattgttcaccgcatttatcacaaacacaatcaacatatatgtttgacccgggctcaagatggtcaacactgatatcaattgaataatatttgaatccatgcctaggcgaacccagaggaggcagcttgtatccaagttccgaaaagtatttaaaatttttaggaattatttttactttaacaaatttagagataatcacttggttttccttaattgcacataatatttcatatgtgcaattgtatcaggatttagcgaaaatgtacaatttattgtggtccgatcaactcatcgaaatccgctccagtcgctgtagcaacaaagttaagcgtaatataatttatcgatctggctggtttgatgtagaagctcgctacaaactcgttgcggtcgataactgctggagtgttgttcgtggtatcacatacaactcggaagtcatatacaccacccagagctttaatacctgcgaggtattggctggtttccatacggaaagaactacgggtaaagttatcgtttaattcaaacagctgccacttagaagaatcaccgatgttgttcttcagcatgttaaacaagcgacgaacgttaattcggtcaaacggagttggaacagtggttgcagtcttatcaccaaacagaatgaaaccttcacctgtaccttgacccgttaccgggttaatacctgcttgatacatacggtcacgatgtgcttgacgaggttcaatcgcaagtttaatgcagttcagaatctgaccacgacgataaccagccggtgacatccaaggctgagcaatatcatcagtgcgagcacacagacctgcaatatcggcagccagtggaacccaacggtttacgtcgttatatttatcatactgatatttatagttaccatcaattgccgcgtacgtggtattaatgttcatgttagcagaatcataagttccatcgccttggcgccagtcgattaaattatcaacagcacgagtcagaggaatatttacaatcgttgaccttggaggcgaaatgagtgctaaacagtcttgacgctcatctgcaatagacgaaacatgtttttgtactgtacttgcgatttcatcggtttcaccggcacaagcaccagcaatcagaaggtttacacgcaatgcttcacggtcaccaaataaatcccagccttgaattaaatcgccagcagtaactgattcattagctgaaaccccaccacccagacgaataacaccggaaaatccttcaggccatccttgcgcggtagcaaatatataacgtgaagaacctttggagaaataatcgtccataaagatgttgtttccgtagatgtctttatcttgacggcttgttgataacaccgttgattcaactaccgcaccatctctacgaacaatgatagcgtactgtgtatcggtctgaggaccatatccaaatacggcttttgcggttgatgcacgctgtccaccactcggataaatcgtcagctgttcgcctttatcaaaagcggcttttgatacaatttcaatttccagttggtttccgagctcgccaggatacgcagctacaattccaggcattttatattgcgcaagcgcagtctggaattcagtttttgtcatttcttcatgggcagtttcaggttcagttaacagaactgttgaatcagaaataattttgcccagagtaataacagcggaaacaccagaactctgtgaagtaatagtagttgtccatgaatcacctaaatccggatactgattaatgctttttgcatatgcaataatttttgccgtcggaatgaacaccgacataatttttccgtcactatctacttcagtaactgaaccagtgtcatctacagtttggtctgcatatttaaccgtaattttatcaccaacttcatagttactaccagcagttgtgatttcccactcaatattatcaaccagtggagatgcgtttttggcagcttcacgattaactacacggactgtacgtagatcattaccatattgcagaaagttcattgctgacataaagtaatcagcagtttggttattaggaccaccaaacatatcaaccagttcaacttcgttagtgatttgagtaacttgatatgcaggaccccattggaacttcccgacaattgcggcacgacctgtagcgttaagtactaccgtgctctgtacgctcgtttctttgagctcaattccaggagagactaaaggcatgatatatcctcaatgttgtttgctttttattatttatacaaatgaaagaccatgttcttgaggcgcatattctgcgctattcacggcgtcaacgaacactacaggagcgtaatcgtcgttcatatcttctaattcgcgtttaaaaacttcagatgctaaacgcatttcatctttatccacgaaatcagcaaatttttgctgtgttgttaaccatgcgaaaattacgagtgacataattaaatcgtcatgatatccatcttctgccgcccaggatactcctttctcagagaaagtacgaaattcttgaacagtagcacgatggtgaataatgagtttatctttttcgataaggtcttttagtgcagaacatccgacggcttttgaccttttcgtctgtttcattcctaaatcaactattgaatcgcaaatgacattctcatattctaaatccatataaagactcttcgctacagaaacacctgtagagttaagttctatatagatcggagcttcgttgtactccattagatatttaataactatatccgggaggattaagtgagaaattgtattagaatgtaatactccaacttgttcccattcagatgtagtcacgtcaataatatttagtgcatggtaatcctgaccgcgtccttcagcagagtcaagagttgcaatatatttgtggtctgcttccgcttctttaaatttataaaacccgtgcgagtcaggagtaacttcaatccaatccatattggcaagtttcataccggaaatgagagtaccggatgtgccatgaaattccgcacagtgctcttgtttaaactgttcaagagaagaagcactgatagtttgaagtgaccattgccacccatcatcaaacatatcttcgtcgttatatagacgttctttaaccgagttccaaattgcagtataaggcgtaaagccggatttaccttcaacagctgcagtccaaatatcatagaagtggtttaatccacttggtgtagtcgtgataataattttagaacgacgacctgatgaaataacaggttggatagcaagccatgcatctatgaagtttggaataaacgcacattcgtcaatgtaaatcattgcaaatgagttaccacgaacagcatcaggactcgaagcgtatgccccaatagatgagccattatctaattcgattgagcctttgttccattcaacaataccaggctgaagaaagtcaggaagtaattcaattgcttgcttagtacggtcgagaacttccgcagacattgagcctttatgcgcaagaatacctactgctttatccttattaaaacacacgaagtgcgcaagaaagattgctactacagtagttttaccaagctgacgactaaggttacaacaagtcatacgtttagccgccatgatttctagcatgtccctctggtaatcacggagctggactttgatagtaccgtagtcaatatgcgtaattgcacagtaggtctctgcgaagtacacaatatcgtctcggcatttcttccattctgcaactatttcacgagtcaactgcattttaatatttgctcgtttaaggtttggcaatcccatatagcgggtgcgcttattatttttgtccttaaacgtttggaaatgagctgggtcttcaccttgcaaacgaattttaactatcccatgcaacttaagatagtcttcaaatttctcaggataccacttatcatcccattgcgatttaaagaaacgaactccgttttcgattttcgtttccatttcagacgggtgacgaataaccgtcagtttcccgtcatttaaaggatgggcatcactcagaacgttaaacggttgagtctgttccatttactattttctctcgagcttcttgtgcttcataggcatcaccgaattcatccatcatatcagcggtagaccctacaaagactgttgcgttttgaatattcattccttgttgaggattagctccttttccagtactaacctgctcagaagtaatgtctttcatttctttatgaagcttaagaatttctttgttggttgtagtcatctgacccataagagttgcaaatacttccatatgtctaggagagtcagcattcttagcagtttccaaaaatattttagctgcgtccattaacatttgttgctggaagtgcatgttcttgcgaacgaccgaatagtcatcttcgaggtcaggtttacggtcatttggattagatttaacttcaactaattcaagtttttcataaactggaatttcttgtccttctattccaggaattccttcgatgtctaataatttagccatatctaattgtaattcactcatttttcacctctcggtccaggagcctccggatttaccggaataggaatatcgtgagaataagtttgtttactagaaccatcccaattttcgtgttgaacatctcgtggagtgacttcgctatctactgattcaaagtttccttctggagttagctctttgctgttagcgaagaaatctaaataaatggttctaatttcgccgtcaacctcggcaacaggaggatataaccatccattgacttcaaacatcagcgaccattctaatctacgacgagtgatattatctccatcaacagcttcatccggagaaaatgactgtaatacaattctaacatcacgattaaagcttgtgtctttgtcgtaaagttcagttatagtcgtgttaaaatgcggctgaaaataaggaacgatttgctcgatgatttgatacatatcatcttgattgcgtgtataaattcccaattcaaaaatcatcttaatcggagtaggattatactgagatgtaatttttgaaggggttttatatgatttggttctattcaactgtgatgttttatacatcgcgttgtattgcatatcaaccaagtgcaaattcattcttggcaaaacagtttctatctttgctttattctcggtagactggatagcagtccattttccgagttgagaaaggaacttttcctttgaagcataagtgataggtactttaatatattttagtccagtgtcttcacgccaacgagcaatttgtacatgagaaaataaatctccaagcaatacaatgtatcggcgtaaggacgaattataccaatgtccaaacatgatttctcctaagggacccaaaggtcccatctttattttatttattcaaaaaatccgtcatcaaacgaatctgctttaggaggagactcaagtcctcttccgttattaacataatacggatgaacatattcagaggcttctttattaattgcatcgctttctgcgtattgtacgtcagaaatatcagcaagagaatcaatgtttttgattggttctaaatcaagttcagagaactcaggaatgataattccttcattgcgctgcaattctggttgaagctgctcaccggaataaatgtatttctgcgcagtaatcttacgttgaacattttgacctaactgataaaatggatcatatggttgaacccaattaatttcaaacagcgaattatccatcgggaaataaatcaggtcacctgcctttggttctgaattattggtttgatgcttgaacaaattaggattaatagtcaaattgacttcatcattaaccatcataccaaatttactgaagaacgtgttatcaccagaataaccgtcaaaagagtctaagtaagcagcaaatttccaagccttggtgaatttacttgatgggtcttctccgaaaagcaaatccggattgttatattcgcgaggaaggaaataaaactcaattcctctcatttgaatagcctcagctgataaaacatctgctaacgtttggctatttctgtgattataaaaattcacataaggattgagaatttctgtctcattagttttattgtatcctcggtaatcctcaaggcgagcgaataaactagaattaaatgtagtcatcttttaccccaacagaataggacaacccgggtcaagtaaatcaagttcctctcggagcctctcgatttcttcttgggcctctactttaagtgtttggccatcaactgtaacgccgccggctaattgtagcccttggtgtttaaacagaatttcaccccacaactttttagtcagtgctgtagcataatcttttacccaacgattattataagcaccttctctatttgtattaccttcacctgcatattggccgttattgcgaaggttaggattctgatacctatctcctaagccccaatggtcggaagtttgttcaccagcgaagccgtaacctgcagtattacctaccatcatgtcggtattcataaatgatttagtccagcattcgcaaacaatgatgtcccccttcatgaagttgcccattactttaagcatttcattatcagagttataccaatagtctggaagtggggcaagcaaatcctgcatcattgaccaataagtcattaattgagtaaaatagcccaggtcagcaccgaaagcgtttggtccataactcttattacagcttgaccccattccgccattaattccggccattcccattaaaaagtcagtaaaccacggataggtagcattaccatccattgaagttaatgaacctacatttgttctaacgatttgagtgacagcaaatacattacgaccacgcaaatcaaacacaccatttaaaaatcttgcgttgtcagcttcatcttttccaatataaaaaacttgatagcctttattcaatccgttaaagtggtattcaccatacaactctaatgctcgttgaatacaatcataaatttggtcttcagttacttcgacattaattaccggcgctcctagacgtcgaagtatagcgtctttaagcgtttttgggttgtatgtgttgtatgacatataagctcctctttatattctatttatacgaaaaagggacccgaaggtccctttcattatactgctggatgaatagtaatatccaatgatttaatactaacaggaacttttgattcttctgaagcagctctatacacaattttgattgcatcgccagacgaaaacttaataagtttcttggttttcaacagttgctcgccggttactgctttaacacctaggctataagtaaacacctcaatgttattgacgagaataacaatttggacagctttatctgaatcagaagcttcgataactgtatcagtttctacacaaaatacgccatcgtcatcaacaataatatcatcaacaatacgaatgccagcattaaatgaagcagcgaccaatgagttaggatttaccaatgcatcagaacttaaatcaacagtgaaatcttctttactgaattcacctattgatgaaggcttcttaaaccattcgccccgtttacggaggtatgctccagtctgttctacgtcagtaactgcagtcacgaatttatcttgcaattctactacagtagcgtatacaccatcccgttgaactggattttctgacgaaaagtcaccattcatttgagtctgtaacgtaaatacagaaccttttaacccttcgctgttattgccaagttctacttgaatgtcctggatagcagactgctgagagttttgcatcccttcaacattggtcattctcgctaaaattgaccccggaggaatcggctgtccgccaggaacaataccaacttgctgatttatccatgctacttgaccctgaagccctgatgaagtatcacgtcctacaacatcagaaatgtacccttggtcagttgaaagagaactaatttttccttcaatagtatcaggcttatcagaagaccccaaacgagcatcaatattattgacacgaggaactaacccggtttgtgcagagttaagtgttgcgtcaactatacgataatcgttttctaatctagtagtacgagctccaatttttactggattggtaaaatcaatggcttggttaatagcaaagatttcattattagctgcggaaatagcatcagcgttattcacaagccttgcataaattgaagctgacgtagctccggatttaggaccaacttctttacgcaggtcgtttacttcaatagtcagagaacctacgtctgaatcattgtatgcatcctctagcgcctgaatacgctcgtcatgttttactatagctgacgcattgttgatgattcggtatttcataccagaacccggagcgtcttgcttaggctgtccgttaacatcttgcccaggatacgcaccaatttcacgtttaacccaaactatattatcacgaactgttctgtaataatcatctttactagaatcataaacacctacatcctcttcgagaaaatcaaggtcagttcgaagtttttcggtgtcttcttctaatttaagaatttgtccatcatgcttttcaatattctttttattgatataaacctgctcaatggcgtcagaagaacctgtaatttctaacgattttttgatttggtctacatctacttgaatattttctacagcagttccaacgttgttcaaatcgttatgtacctgaaccacatttttctgaatctgcacagaagctctattcagttctccatcatttccatagcgggttgaagccccattaagaggctctgtattttttatccagttaattctctgttgaaaatcgtctggaattccgtctacaaacggaagcgagtctactaattttgtcatataattccctatcggttggtgcaaaacgttaatgacgctgaataattatcgccacggatattttcaaatggctcaatttgaactctggcgttaggaggaacatcatttataatatatgagcctgtagcatatccttcaaatctccacgaatgaccatttctaccgcccttggtattctctatattgagtgtatgttctcctctattttccccgttgacagttattctaaatctccaaattctattgtcatagccgtcgttattacgttggaattttattgtgagagtcagcgccaatctagaagtggcttcatatggagaattacacccaaaccagtttccagcaggaatataagttccaccttctacccaagtaatattaccgacacgcgttccagctggcatatatcttccatccgactcagggcgtgtataacaattgatatcgttattggtaattgttatatcgttatcaagggtttttccatttattttgcgagttttaaagacagcatcagtcgcagctgcagcaagtgaagcatctgatgttggagaacctgataatcgggttaatccatatttatccttggttgattttaacgcttgtagactttttggagtaacagccaaattgttagaagtagctgaagccacatctgagtctttagcaaattttactataccaaatacgctgtcagacgcttttgatgccatgaaggtttttggagttactgcgtatccatcgtgaacagcacctgctgctacctgggcttgggttgcgacacgaactaatcccaagttgctttctgttgcagaagtataagtaggaggattaacgctgaactttccaatcatttctacaacacgcttaggagttactgcggtggtttcatcagttcctgcttgagcttgagcggcagtcgttaacctaacagttccatctacgttttcttgggcttttacggttttaaacacatggccaagagcagcagctgtaatagttctatttcctgcggttaatgctgcggcttcagtattagttgcgtatcgggttaagccaagaattgcggtagttgcttcaggccgggtaattgtggattttaatgtagctggggtaaccgcagcattacctacagttccagcttcaacttcggcctgcgtagctgtacgaattatacctgctacggttggagatgctgcaggtaatccaatgtcagttcttgcccagcttccaatcaacgctagcgctgattggacgtcttttgtagcaactggccattgtgtatttgctgggtcaaatatcgtatatttggccaaatcactgtagtgattatagttattctgggccattatcccatccttctaaaatagtggaatgtaaatgtgtttgcaccgaaggttttagtttcgttaccaatagcgtcccattgtccataacccgctttagcaggtgaagtaacagtaaactcaacagttaaaccatattttttatatgtttcaaaattatggttctgataatccagatgaataatatcaacatactgaggagttgcaggtgattgagtaacttgttgaaccacttttccaactgcttctaattcttttaccttatcataccacctggtagctactgctgcaaagtcatcaccattcgcaattctaattggcaatccaagaatgtgaattattactgggtcgccaacagaaccgtcttctttaggttctaacgaaactacgcctgaaaaagtagcgcgtgtaatttgctgtgctggttgtggagatattccggtgtcattacaaataatagttccaatttctgctgactgtaatgacattaaatcattaatagcagcttcagtgtttggataccaaacacctaaatccatttgttcaaaggttaggctccctataggagccttatttcctaccgcaatattctgcgggtctacgcgatattctgaaaaggcagttaatcttgaattaactttagccccttcacgagttttagtttcaatcgtcattttaacctaccctaatccaacgataaacggtgattgttggctgaattttagtgatgtcatttggaactacaccgttgtttaccgcaacagtgtcttcacggtatttagaataacctggaccttgtgcgtctgggtctaattgacatccgccaataactacgctgccatgttcagggtctgaaattagaactttgtctcttgacattaactcaggaatgtgttcttttcctaatgtaaacgtcaaatctccaaccgttccacctgctgttaatgatggctgaccattttcgtttaagttattgttgttacgcgaaaaataaggatcagatgaatcattattccaaccagcagtaacacggccttgtgaataaagcttccacaccccaaatcccatatagtcagcagggtttgcgtggttgtgagcgttttcataaatcgtgccaatcggataaattacgtcaaaaaatgctgcaatattattgactttaatcataatatcgtcagcaaccggacgcatatttttctgattaggttcatcataatttgtgtattcaatgcgattttttagagttactaattgctcagcattcatatacacttggtcggtttctgccatgatatcgtcaatatccatagtagtaccgatgttattattgaaccaacggacggtaagaaggtctttatcttcaaacgcctcaccaaaaataatagcttcgacgttagtaccagttgagtcaaattccagtctatagtcttggttagaatttacccattgaccaccattgtttatacagtcttctgcatatccaccttccgcgccttcacaataaaataaaggaagacctgcagttccagcttcgagtaattcctttccgttcaatgaaatttcaagcgagttaggatttacccctacgcccggaagtacacccatgtcatccagagtgattctgcggagagtagtaaggttatctactatcattgacccaggaatcgtctgggatgtagtctgggctgaatctcgtatctggatagccaacttgttgtatgaagaccgataaacaccaattccatctaggaaggtttcaaatgttattacttccccttcaacacatggaacttttaaacgaatgtctttaccgtttaattctaccaattgacctgctactgttccaggagaaccgtaatcagcattggctttatccataacgctggtttcaccgtaatataaaatattaccacgacgatatacattaagcgagtcttcgttatattctacgccatcaaaaatgttaagaaagtcagtctgacccgcagcagcaataattgattttttcgctacagtacttaagttaccgttagttagcttatctaccgttttattttcaatatattcccagcggccaggggcgcaataaaccaattccaaatcttggaagttagtattgaaaattttaggagaagctgaaccttttaatgtatcgccttgagcaggaataactgtgattgggcttaatcgccaggttgaccaaacatcacgaagtttaataactttgttatagtcgttggctgtaccctttggaagctgaacgttaactcttgctgcctgggtattaatagcaaaggcctgaccaaacttagcatttaaagtagttccagtagggctagctttaaaagttttccatgcacctgctgcaaatggaactgaaccatcacctaactctgaatataaatcatcaaagttgttattaattttaagaccacctttacggaggtaatcaccagacccatcatctacagattggcctactatcaaattttgtttcattattgagatacccctacggtctgtgtagcaataactttaactgccaaacgtgcgtttccataagatgttgaagctgtgcatattaaatctttctgcgcgttaatagagtatgaaatagaatacatcttttcattttcagatgattcaccgcttcttaacactgcatattcagtgtcaaatactcttccgtttggcgctgatgaagtaatagtcgggtcaatcataagcatgacttcagatgattgccttttgatggtttgaccacctggatttgcgctgaagcttaataacaatttaacagtagagtaatcatcgttatatccaagccgaatattaataggagaacttgttaaattatatgtagcttctaacggtgaatatgtgctgccaaacatacttgaaattgaataatcccaaactgcagcaccgttagctttgacttcaacacaccacaattcaattctacatcttggtgtgttgataatcaattctcgcgatccgtctttaaatgcatctgctacaccttcgccgtttgttgttatttttatggatctagcttttgatgctgagccattactatttacaacgaatacagcttctcccgctttaccttttgaaagacgaatttgaactgccccttctgagcaatcagcatctatgcatgaacccatcggaactgtaccggccgagttagcatcaccaaattttatcttttgataataacttgttgcgtggattttttggtttaaagctccaccaccggctgcaaataatcgttgatcagcgaaggcgttataaatggcgtcgaagttatcattaattttcacaccgccatcatacagaatgtcgccggtagaagcattaccaatctcaccgacgtcaattatttttttacccttatctgtatacataggttaacctcatatcaaagtatagtcttatttatataaaaatggggagccaaaggctccccataattaaaactcgaaaattaaatttaactcttctgtttggtccattgaacgtataataggttgtcgattttccatgtaaatcatttcacctgactgtctttcaagaccagaagcgctataccaacctttttcagccttaacgttaggagaatttggcattggcttaacttcaagcggattagttataattgacaactgcctaaacccagtatttcccggaagactaaactccggaaaataaattgcatcaaggtatgctttaaatctaatcgtattacacttcatacgatagattaggttaaagtcgttttgttgccaagttaagttgttttgaaatccccaacgagctggagattcttcaatctcttctggccaaggaactacgatatattcatttgtacatctgttaattgatacgtcggctggaatttcatatagatattcccaaagatatccatcgcccaaatcgacagtaccatttgcatcaccacgcccacgaggcgctgaaccggaaatagttgatggcgtccatttacccccaagcttaatacattcttctttgcttgtaagattaccaattgaacacattccattctttggaacatcaatacatctatataccatccatccaaatccagcatcagttctgttatatggcgcagagttagcaacaacgatatcgccgattaaaaatgtgcgtggattaggatatcttgtatctccccagtctcttcttggaacaacacagtcaagcatagatgattcaattttgactgcacccatcatatttgtccaaatatcaaccacaccgtcttcattatcggccgggtatggaggtgcaaacccaggttcagattcgttatctgaccacggagtgcttttaccaaatgaaacatacaacgtgttttggtccgttcccggaccaattgatttataaaatgtgtacatcttttcagttctaaacttagatgtaatgatagcacgataaatcgtgctacgcgttgaacttgctcttgttgaattactcatcaatttttacctgtgtcggattttcaggatcgcgaggattacctgcatcgtctttaagacgttggttaactaaatcgcgataattagcaaacgttactgctgattggtcaaacgtaggacttaacggcttacgtcgttgtccagggttttgtccagcgataacactattgttattttcttgattatagttagcaggtaacgggaaaggttcaccagcttgagcacgtgaagaatacctaggctcattggttattgggtctctttctattgtatcatctgaagcgataatagcaactctatcaggataaactgatggcagtcctgcatcccatttatagttcttgagtttatttatgatagtctcaacatgcttcatatttaagccactattgataaacattgtcagcaatgttataccaatgaaaccgaaacctaccggatgaacaaaccttaatacatcgtcgcggaaccgagaagtaggaagctgagacttaattttcataacatagtaagaacggctgcggtttatataatcaatgttattactcagcatatcctttccacgaacaccttgaactataataccctcaaagtccgtacgctctgatttaatttcctggccttcaatgaaccgtcctgataagttatgaatagtaatacgccataacagacgaccatcccggtattctctctcgatataagtcacattactacgaccggaagcagtataaatcgtacgaccaactaaatcgtcagaaatatttgtactttcaacaataatgtcatattcggtagtgttctttgactcaatatcgatttcgacgtcttcgttataaagaagtttaaacaggaacttatatgagtcttcaattcctttagtagcatagaaatcattcttgcgtgcttcaaagaaacggacgacagcgtcacgagcgtctttactcagataaatgttgcgtttataaacttctgaccacagatattcccatgcattttcttcgcgaggatatttgttcttaacaagattaacgagactgttgtaatgtgttccatttccatctgaaaggaattggagatagtacttacaaaagtgttcaaaattactatcttgtagcaagtaactatccggcatcattttagtaagatacggacgtaaatccgggtcacgcaagcctggagtatgttcaggagtccaatcttcttcacgggtttggttctgcagaaacgccttaaacattacatcagttggtttccagttaagcgttacctggtcacgaacacgataatcgaatgcataataacctatcagctttccatctggctcgtgaaacatgataccagaagcatactgcaaaaatccgttaaatgaaaccggagggcaataaaacgttgcgtcgcctttatcccacacttccgaaagaatgcgctcggtagttccctgtgctgctgtatctactcttttttgataaagaatatcattataaatgacaactgcatggtcagctgtacttatccagcatctgttgccttcacgagccatccagacaaaccaaggttcagcataaaacctcatcggtccaggaacaaatgtttcccatcttgaaaattcatctgctctgaaactcatcatgtgataatgcttatcagagtgatactgaattgggttaacatttttaactgcggtagaaattagttctggatatttcgtctcaagctcaatatcctgagcgtactctgttgtcttaaaattggctgatgaaaagaatatttcctttccgtcagttgacatagaagtccataaatgctctatacgacgtttttcttcatcggtattaccaaatacacgcttccaagtatttgtgccttcctggtaaacatagacgcctttagttgcagaatccacaacgttccttgggtctgttgggtctaatcctaaggttttaacttccccggtaataagggcaaagattttgcccccaacggaatccattttaaagcatacagatttaggattgcctgttatatgagatacttccttttcaaataccttttcaccaaatgtcgggcttaaagggtcagtatctattggagcatcttttaatttaactttacggacagtgtcttttgcaacaacatacaaatagtcgtcattgcaggtaaacgcttcagcatatttggtaacgtcagcaggcaatgatgcatacgttccgaataactctacttcaaagccaagctttaactggtctcccaatttagcaaatgtaacttcgttatcgctaaacttaacttcattcgatgaccaacgtacgtcagatgatttccttccgtaaaagattttatcatatcctaaaacataagaagtagttttagattgataaattaccactctagaaaccggatttccgacacggtcattaaataactgaacgtattgccaattctgtcctttatcatttgatactttaaccatatgttggaatctttcaaacagatacaaaattccgtctatttctcccagcatagttctatttttatcaacacacactgcttcaataggtccctgaatttcatgatatccagattcacctacaacgaagttttcaatagctgataaatgagaatattcaggactaaactgaaaagactcagtcatcaaagatgccatcatggcagatgtgttgaagttaacatacgacatgttgtttaaagaaaacttctgtttaatgaattctttcactaaactgaattcttgcatatgctcaaatgtgtatgcgttttcttcaaaagtttggaactcttctgtttcaacccattcagacggctcaaaccctgctgacgtagtttgaacacgcattttataataagtaagcggttcaatacgattttgttcgaaccaatcattatccgcggtataacccagtgaagaccaactcaagttatcagcggggataacttcccccgctctgtttcgagtttcggccagttctacaaaatagtagaagtttgcaccaacgtcatcccaacgaatattgacctgattcgcagatagcttatgaattcgtaagctggtgacgaacggtgcaattgtcattgagtaataggctccaatttaatagttgtgtattgaggacgaaggtcattctcaaatacgataagtgttccatcgcgggcgaagacgatatcctgggtaggagtagaataaagctcaatactctggtcttcaaactgaagaggatcggctccaatagctccaaggctccagtaaatattatcaccataataatctacttcaccgattttgtaccaacgagttctttctccattagtagttctatcaaaatcgtcttcagtatatggctgaatatgagtattctctttaatatcacctggtttaaatggtccaatgaccatatttcctttaccatttttatctgggtcagttccaacgatattaactggatatgaatctgcagttggagtgacagtaaagaccaaatcaccagaacgtaacgtccgcggagtaatagtattatagtatttaatacctgcgctaggaagagtgaaatagttgacaatttcacgaaccatctgaatatcaacagaagaaccgatgattgaatggtcagtatcatcaatataggtcaataatttagatttactgaaatttttgttaaacatttcaacttcatcaacgtaatatctattaattgagtctataatttttgactgtaaccactgctcagattcttgtaacttattcagcgcataagaagctttaatattatgacgaatgaataagtaatctgggctcattaccgaaggagtaattggagcaagacagaaaggttttagataatcctgaatgtcttctcgttgaacagcagttaactgcaacccagattttggtttaattgcgataaatgcatatccgggtttgtcctgatcagtaaagcattgtactgcttgtacgatagaaccaaagcgtgaactaacgaatgattcatagtcagttttagacacgcatcgcatctgagattcgcgcttaatctgggcgagctcacgaatacgctcgatgtcttcaggttcaccaccgccatcagctccaacataatcaggagaatctgaccagttttcaatgattttgtttactacgatatattgcagagtatcagcatagctgaaatcagttgcgccattcgcagattcaccatcagtacgaatatattcaataactacctgcgcgcccttagtaggttttaatccaccaatgaaattactttcaagaactcctcctgctacagaggcttctgccacgccttcaccaaagaagaattcggtatttccgtcgacagtttcacgcatataataaattgttgaaatggatgaagcatgaaccattgacctgtctgtccagttagtccattcagcgccatcaacccacagcttaacctgcttacggtcaatcgactgatcacgaataacaataggtttcttcgggtcatatgacaattgagtacgaataatacgtccttgtgccaaattgacaataggaagatacctattaactccttctggtgctgaagtatctcttaaagcaataacattttcggtaacaacaaagttgtatgggtctactgatgaatctcgtgcatatgctaaaaacttggttccacgaggtatttttattgctggctctggatttggatgagttacctcaagcataatagatgcagtagccgctgatttggaacttggcaaatacccgttttgctgagctgcttgaacaacggaacttctcaagttagctgttccaataaagctttcgtataaagcagtattactaaattgctgtatgtaaagcgtgttatatgctaataaatctaatagcacatttaagcgcgaacccgcaaaatcaaaatcttggaactctttttgaccactaagccagttaataagctgatttttaatttcgtcgaatgttgctccagtaaatgcgtctgggatagcgtttgcagtacgcgttaactgataatttaaaggttctttaatagccattagtgtatgaatacctttgagcttgattgcgcgacagtgtcgccgcaagaaattggatcggccatttgaacagcttttttgcctgttacaaataccttggatgtgcgaggttgaacaactcctccatgcgtatcatgagggtcaaccgtcttggtgtgtggggtaattgagtcgccatcaactaataccgctattccaccagtgaatactttactttgtgtagcatttacttctgtcggaggatacgcactatgcccggcagttaagcatttattaaatgatagtccagccatttagttccccgcatatacataagcacgaagctggtcgccccatctactccagttgcctttaactgtttgagagtaaatcttttgctttttatgttctgttatgattggagcactagaacctccggatgaacctccagacgattcttctgtcactgtatatattatctcaactgtataggtaaatgtcttctctagtgttctgggggctttccacaggtataaatcagcagttttgggattaggtaaatcctcccacgctgaagcggacttcagctcatcgccttcacggtatttaagcacatcgtttccaaaagtaaaaactgagttataattacctttataataggtttcagacacagagatatcagatactggttgatagtcgataatatttattgattttaatgtttcgttggtagataattgagcagtaaagtactgctcaacgtattcaccttctattacttcgcgtaacgtggtattaataggaagtatatcagccatgattaacctacatcaattcgtgaaccatcaacagtgtattgaccttgggcgattgagctcatagaagccattgtctcagtccaagccccgccaacattccaattcacagtacctgctacttgccaagttaagttaccaccgacggttacgtcgtggttgccatctactttagtagtggcatcaccgttgacttggatatcagcatttccttcaacgactatcttaatgttacccttgacaaaaatagtaccatcgccttcaatagttttagtttcatttccacgtacataaagcgtgttatcgccatcaatttgctgtcgacgattatacatgttataataggtctcgttccctccaacgttaaccttcttatccccagagattaaaatatttccatcaccctgagtcatgtcatataaatcggctacagtttttctggtacggcgtccatcgggagctacttcttcgtatgaacctgttgggtgaacaatacgatagcgttcatagccaggtgtatcatcaaactcttggatatgacctgattctgtttccattgtgtgaacatatggatactgaccattatatgaagactcaggttctttgaaaagaattcttgaatcttccggagtccatgggtcttcaggattacctccagactttggttctacgtaagcagcagacaggttttttccttctggctttggagcaggaactccatatgattccatattacccgttagaataatcatggaaacacgagaagcacgaccttttgtctgattaaaccaaacagagtttcttgcttctgtataagcggttttccaatcaccaatgagcatggcatcaagcattttaccaaattttgctaaaccacctacacccatttgaaaactcatattttctaaagccatttgccttgatttgttgactttagcatatacaggtcctacacgtgaattcgttttaatatcagaaagcattttatcgcggtcttgcttaaataacgcgactgcttcgtccattgtaatgataccgggatttcccgtaacagtacgaccaacctgattagataaagttttattaatgacagacatatcacgtactttttgcgccatgataagatgcccaatacctatagtaggatatccttctgtgtcccaatagaccttcaatctaagaccttcatccctattaagcatatctgttattgtaattgcaggatttgggtcttcaggaatatcacttaagtcagcatcatcaggattaatgccaatgtctaaatttctgtcctgaatgatatttggtatagcactatacccagtttcatcgccttgaactagtgggttggtatctgacccgacctgtctaggatattggcctgtaggatcagaaaagccttccgtgtagtttggcttcgtttttctatgcgcagaatatgttcctattactagtcctgctgttttgaattcatcaagccataacccaaacactgatgttccttctaccattccggttatagatgagccaactccagaaatcccagctgagttggtaggctgaatcactgacatccagggaaggtcttcagtaggaagacctgttatagctccttgcaccttttcaaatgggtgaagcccataaacacgtactcgcactcttccttgtttcaacgggtcttgtctgtcttcaacaacaccggtaaaccatttcaacgaatcattcatttcaatcatacaacttctccaattgtggtctgggatttatatcgacctgattcatattcactgtcaggagccttttccatttctcgtataatatcagaaagaaatgcttcaatatcactaggattgataatgtttatttggcgcagtttttcattttctataatagagtcttcataaatgtcaacaccagctaaagccccagtatattgagggtactgatgattaaagtcccctttatcataccaaatgcctgaattttcaggatattgctcgaggttataataacgattgccgtttgcatccacgtgatagagtatttggtctccacctacatctgcatatttttgttgtgcaaattgatagcatgcatcctgggttttaatccaatctctaaacgggtcatatacgttattacacattaaaagaatccagtacaactgactatttccataaagaatatatgctaattcttctggtctaggagctccacttatgtaatatgtttgtaaaagatagttttctgctacagtgtcgaaatatttgcgataattacgaaatatgtcagcggttgggatagcttttgccttagcaccttttacggtctttgcagaataatctatcggactaaaaaatgagaagagcatagtttatcctcttataaatattaataacagtatttataaagttgtagtgtacatgacgagtggtttatgatattattaccctactaactacttaggagaatagcatgaattaccgtaaaatttatgaccaactaattgcaagaggcaaatcccgcaatttagaagggtacaaagaacggcatcacattgtgccacgatgcatgggtggaagtgatgataaagataaccttgtggacttaacagcagctgagcattatgtggcgcatcagcttttagctaagatttatccaaataatcataagttatcatatgcagttcatataatgtcttctaaattagcaggaagaaataacaaatcatatgaatggattcgcaaaagggtttctattgctaactctgccgtattaacaggaaagaagcgaagtccaaggtcaaaggagtggtcagctaaactgtctgcagctcttactggaaagtctcagacgctagaatcaaatgaaaagcgcagtatttctatgacaggtatttcaaaaagtgataccatgaagaaaaatatgtctactgcagccaaaaatagaactaaagagcaccaaactaaattaaatttagctaacaccggaaagaagagatcagaagaaacacgagcaaagcttagagctgtttcagaattgcagcctatagtaacatgtcctcactgtggtaaatcaggaaaacctcgtggaatgaagtgctggcattttgataaatgtaaggagaagcctaatggcttatagcggaaaatttttaccaaaaaacataagtaaatataagggggaccctcgtaagatcacatatcgatctacttgggagcaatttcatgatgcggtggttagataatcacccagacgtagtccaatggaattcagagtgcgtggtaattccatactttagtaatgcagatggaaagaaacgccggtatttcatggatttctgggctaagttttctaatggtcaacagttcttttttgaagttaagccaaagaaagaaactagacctccggtcaaacccacaaagttgacgacatcagcgaagaaacggtacattgatgaaatttacacttggtctgtaaacgttgataagtggaaagcagctcaagctactgccagtaaaatgggtatagaatttaggttaattaccgaagattcacttaaaaaattaggatggaaaggctgatggctatatttgaatttatcactgaagctgcagaatcgcctaaagctaaatcccgtagtgaaaatcaatgggtagcattaggagttgaatactctgctgctcgtaaaaaaggcatgacgtctaaatcattcgctgaaagcaaaggaataaatcctgctacgttcagtaaagcaatggctcgtcatgcatcaagaattaaaacggcaattaaagtagcagaaattgagaaaaaacctgctaacaaaatgaccaaacaagagcgtgctcttgtgatggtaaattcatttcgaagctctatcaaagataaaattcgtaatgaaggcgcagcagtaaacaataaatctgctaaatggtttgcagaaactataaagaaaaatatacgtggtcattctgtaaccaagcctcaacctggaaagctatatgcttacatgtatgacgctaagcacaaagacactcttccattctgggataaatttcctttgatagtttatcttggtcttggaaagcaaggtacaaccacattgatgtatgggttaaaccttcactacattccgccaaaggctcgtcagcagtttttagaagaacttcttaaacagtatgctaatacgccagtgatatctaataagaccagattaaagataaactggagccaagttaaaggatttgctggcgctgacaaaatgattaaagcatatattcctggtaatataaagggtgctttaattgagataaaaccggctgattgggcgaatgtagtcatgttaccactgcagcagttcatgtcgaaaggcaaacgctactctgctacttctgtatggaaatcataatgtctactggactgtttaatcaaactaacacaactaactttatattagaggtccctgatgggggcctcacccaagcgtttaaagctaatcttcaaacagctgtagttcctggaattcatattcctgctactgatactgtaggttcgcctcaaggcatgcatcgtgctaaattgcctgggtctacttttgagtttgacgctgttcctgttagatttttagtagatgaaaatcttgattcatgggtacaaatgtacaaatggatgttaagctgtcaaaactacattgaccgagacaagtctggatggaataacggcggtgaaggatttcctggtgcagttttaatgcatgttcttgataacgataaacatgatatagtattaactgtccgctacatcggaggttgggtgagtgatttatctgaaattgagtattctttaaccgaagaatccgacccagcaatggtatgtgtagcaactttgcagtacaaatacattgaagttgaaaaagatggtataataattactggtagaccttctgtcaatgatactcgcgaatcccagtatcaacagaaagttatgggaatgcatccttctatgaggtaataatttgaagcttttatttttgattggtaaaaaacgtagtggcaaagatacaactgctgactacattatggataactataacgcaacaaagcatcagttagcaggtccaattaaagatgcgttggctgatgcaatgcttactgagtggtatcgcgatacatcacgtcagtttcctcgcattactcggtcaatgattgaaggtattgattacgatcgtgagcaggatttaaatctgtctactaaagacgtgattcgtattatggcgaatgctattgaatatgtccatcatgatttgcctttacctggggtggtttatgatagcaagcgtaaaattcttgacggcgatacgatggaagtcatccgtcaagttgtaataaataaacctgttgagccatggtcaattcgtcgtctcatgcagacccttgggactgacattgtctgtgataagctcgatcgcatgtattgggtgaaacgattcactttggttatggctgatacttttggtgattatgattatttcattgtcccagatacccgccaagaccatgaacttgatgtagccagggcgatgggtgctacagttattcatgtagttcgtcctgagcaagaaggttctaaaaaagatactcacgtcacagagcgtggacttccgattcgcgaaggcgatatcgtaataactaacgacggttctctagaagaactttattcaaaaatcaacactatattaggaattcaaaaatgactactgaacaactgcaagcccaagtcgatactttgaaagttcgtgtatttgacctgtctgaaaccatccaaggtctgtccgctctgcgtgcacagtatgaagaagtactacagaaactgattgctgtgtccggcgttgaaatcagtgaagacggtcaggttaaacttgatgacctggttgcaaaaatcgaagcacagttcgcagaagaaactactgaagaagctgatgcctaatgaacttcagtgattttagcactggtctatatgtagctgctaaattctctgagaaaactcttgatgctattgaggaccttcagcgtgagttgaaggtccctaatcctgtacctcgtcataagattcatacgacgatatgctattcaagagttcatgttccatacgtttgcgcttcaggaagttttgaagttgctacatcaggtaaacttgaagtatgggacacgcaagacggacgtacactagttcttaaactagattcagaatacttaaaattccgtcaccaatatgcaagagctctgggagcaactcacgatttcccagattactcaccgcacattactctcagctacaatgtcggtccagctcacttcgagggtgaagttcaagtacctgtagtgcttgatagagagtaccaagagccactaaaactgaactggtcagaagatttgaaatagaaatttatttcacaaagttgtttacaaccggtcctagtggtgatactatagctccatcaaaaacaaactaacaaaacggaagcaacatgaaaacgtaccaagaatttattacagaagctaaaagacaggatgatgaactgccgattgttacaaaaaccgttgacgggacattagccgattttaaaaaagttcctagtgataaactttctaaattgactggcagcatcggtgaaaaagatggtaaggtaactttttcagcccgaggttctgctaatcttaaaaagcttttaaaagccgctggcgctgaataaagttgtttacaacgggttgtagtagtgatactataaccctatcaacttgaggagaataaaatgaaacgttgtgaattaattagaaatgttgcatcaacaatctgcatgggagcattaggttttggcattataggtgcagcctttatgtctcttcctgaaacagtatcagtgttaagtgttgcatttctaatgggtatcatttctttcataatggataaaatagcacatgaaaaagattaagcagtggttcatcaaaaactatgatttaaaccgtgaagaagtaactaagtatgattatgttactttgggtgtaggactaggtgcactactggcagcactgcattcatcactacttgctattgcagtgcttcttattttggctcactacagctggaaacgtaagtaatgtacgcacttttaacttggtctaattattatcctgctcctggctctgaccaaatcagaggtgtctactctacggtagaagaatgctatgaagccctccagggaacgtatcaagactattttgagatactgaattcccgatttgagaccgttgctaaaggttcaactgaagcatacaaagattaattgtgaggaaattgtgatgaatatcagagctgcgtttaatactttctatcaagagaattataagcttcttgcccatgaatactatgatgcacaaggcgttccaattcctaatgatttagttacgcctaagcatgtcaaaactgattctcttgacaatgaaatccagcctggtgatttggtatcatactattgcggcgggtcactttctgcagcaagcgttggtattttgctaggatttacgcctaaaggttatcgtgtggttccgttccatacaagtccaattcctgagcaccgggtattgctctctcatatggattcaccgcatagggtattcctggttaaatcaaagagctcaccgattgtgtaatatgctttaggttttctttgttattattaatctatcaactgctctgattaattttagagcagtataaataaaattacccattggggagttagaccgtaggggtagcgggacagactgtaaatctgttgctcaaaaggctcgagtggttcgactccattactccccaccaaatttagggatactagctcagttggttagagcaccggacttttaatccgggtgtccgaagttcaaatcttcggtgtcccaccaattcgggtcgttggctgagagggtaagcgacggactgttaatccgtgtcagaaatgactaggcaggttcgatacctgcacggcccgccaaatgaagaagtcagaagacgttctgataaatcgtcggcatagaattccctgtgtacgagttccctcaacgataactacgtgcttataatttcttacggcgttgaaagttcgctttcagggatacatcttagaacagagtgctaaacaagattcatctggtaccaaggtgatgagagttctgttcccctttgcttcggcatcgtgccagagtatctctgaaagcgaattatggacctatagtttagttggttaaaatactcccctgtcacgggagagagcacgggttcgatccccgttaggtccgccaaataagaacgtggcagttcttgaagatgagtttgagtcctgtaagataatgccgaggacgaagctgtttgttcccacggaataagctctatattcgtaagattatatctttagcgtgttctacatcaagctacttgttagtacttcaagaacccggataaatgcggggtaacttcagttggtagaatgttgggctcatatcccgacacgcgcaggttcgagtcctgcctccgcctcttttgtttactttatccgtaccatgtgatataattatcacatagttggtatggagaataatttatgtactatttgatttataaaataaccaataacgtaaatggtaaatattatgttggagcccataaaactgatgacatcaatgatggctacatgggttcaggtgtattaattaaaaaggcaattctaaaatacggaattgagaactttaccaaggaagttattcattattgtgaatcatctgaggagatgtatttaaaggaatctgaaatagttacaccagaatttttattaggaaacgtatataatttaaaacttggtggcgaaggtggatttgactatgttaactcaacatattggactccgtcaaaaatgaaagcaagaggaatacttggaggaaattcaaccagtaataaaattagaaatgattctaaatttaaactgaatttttcggataagattaaatctggaattacaccagatgcacgttcccgcattgcagacgcagttaaagctaatatagctaaaaatggaaatccgtttttaggtaaaacacactcttctgaaactaaacgaaaaatttctgataaactgaaactagctcaatccggttcaaaaaattcacaatttggcacaatgtggattaataatggaatagaagctaaaaagatttcaaaagattcccctataccagaaggatggtataaaggaagaaaattagtaaataaataattggactatagacaagcggttaagtcaccggcctttgactccggtatctctggttcgaatccagatagtccagccaaattaatattcattcaacgcgtctacaggggttgaactgatcattcttctcttaatttcgtatgaagtcctcatgatggatggagtgaatattgatgtggccgtagttcagttggtagaactcgagattgtgattctcgtagtcatgggttcaactcccatcggtcaccccaacaatgaaggaatggtggaaaaatacacggtccgcaaaacgctgtggctgtcgctaagcgaattgtgtctatatgacacttccttcaccaattaatggagagtagcgctagtggtagcaaaccggacttgaaatccgggccatcggaaacggtgagggttcaactcctttactctccgccaaatttatgaaagttaaacgctgcccatagcagtggtacatcaacaatcagatgattagctttccatgggagtatagctcatttggtagagctctcgaccgataatcgagcggtgactggttcgagtccagttactcccaccaaataacaggttcttagtataacggctattatgctgggctccaaacccagtgatgagggttcgattccttcagggcctgccaaatttgcatccatcgtataacggctattataggtgacttccactcacttgataagggttcgattccctttggatgctccaaattactccgtatagctcagtctggtagagcgctccatttgggatggagaggtcgaatgttcgagtcattctatggagaccaaattaacggtatgacacaatacaagatggcgtaagctgagtagcgggattgcagtctcgttcagatatgctatcgagtatgggtgatatattaaacacatggattctgcaaagtcaatgtgactcggttcgaggccgggcataccgtccaatcgcttgccattgagaattatattatgaaatattacggcttcaaaacatcccatttcgggaaagcatatcgtacagaaaacattgatagacgccgagcatattacgaatcactgcataaagcaggacgttctcgtgcacgacaagaaggccaaaaacaagcgaaggaaatagaatgaatatttttattggtgttgcgaataaagtaaatgctattacggtgaaattacaatggaatcgtccaactaattttgctttaggattatgtaaatctgaacgtgatttaatgcttcatgctgattttgcatatacttttgatgaacgcaaaggtatgtgggtctggattaaatgcagatacgaagcattaatcaaatatgagtacttcagtgagcgtgatattcaagaagttattgcttatcattctggctgtaaagtaagtaaactgcgtcaagttattccgtttactaatgcttcaaatgtagaagagctaattactgattttaaacgaatttatcaggcgaaatatgatgaaagattctaaaggtcgagacgtacaagttggcgatatcgttttctacggagaacgtacatataataaaggtggtcgtggttctatgcgctgcggtcgtattactgatattgcttcaggattggctaaagtagataacgactacgttgcaatgcgaagcaaatcattcgttaaggtttctcctatgttcgcaacaatgtgggaaaacggaacgattttcgagatttaatgctacaagaataacctgttattattactacatcaaaacaaacaaggaaaaagaatgaaacgtatcgcactgattgttgaccaagaagctatgttcgctgctaccggcaaattccatccggtgagtaaatttgttgctcgcagcgagaaaatcgttggtctggtagaaactgtcgcaggtgatgtaattgtttctattaaaacgtctgaaatttcgccggtggttaaagtagcagttgaaaatgacttctgggaagtagctgattttatgtgtgagtaattctgcctagcaggtggataagcccgacaaggcgccctcttcggagggcttttataaaagtcataagatttctataaaggccctgtagctcaattggtagagcgttcccctcataagggattggttgcatgttcgagtctttgccagggtcaccaaattatcaactgaggaaattgaaatgcatattaaatttggacaagttattcctaaaggcttagcaatggcaattaccacttgggaaaatgatgccgatcggtattctacccaaatggtttatggcttagaaaaagaagagattaatcaagtaattcacgttcttgaatggttctcttctaatggtcgccgcggtgaataccttggaaataatgattacaaccatgaagcaattcttgaaaagcttcatactgaacagaagtatgtaactcctgaattttccaagaaattctttggtgttgatgttcctgcatatgattgctcagacgaagagtttgatgcttatttagataatcattattcttgttcaaatgaagttatgtatgctattcaggcttggctaggtaatccaattgaatatgactatgatttcatgcgagtatttgagaaagtagaaatctttgacattaaagaagaaattcgtattcctgatgctccggttgcattccatattggaattacgtataagcagaaagaaagcccattaaaagttgattggttgaaatacgtgaaggaaaagtaatggatattggttcaggtagttcatatccatcatgtgctttgagtaattttgctcctcataaatttatctatgatggcgtagaatgtgcctcaatggagggattcttgcagtccctcaaattttcttcgcctgaaatgcaagcacatgtatgtacattagttggtaaatcggctaagttcaaaggtaaaaagaaacggtggtggccaactcaaacactttattggaaaggtgttcctattcaccgtgcctcagaagcgtatcagaatttactaacaggagcatacgatgcacttagtaaaaatgaaggattcagaaaagctttggctgctacccggaatgctacgctcactcacagtatgggtaaaaataaaatttctgaaacgattttgactgaacgcgaattctgtaatcaactttatcgtttaagaaatgctataaataatcagtaatataattatcttgttcagtgttgaaatcggtagacatggtgacggacaccttttgagctcgcatattgcatcatatgctggcgacggtggtaaatcgctgacggaatcagtcgtgcaggttcaagtcctgcctgaacaatctcggggcatagctcagctggatagagcagcggacttctaatccgcaggtcgaaggttcgaatccttctgcctcgaccatttcgcatcgatggtggaactggtatacacaggagacttaaaatctcccgccgcgaggattgagggttcgaatccctctcggtgcaccaaattatgaagaatgtctcagtcgtgagaggatcaatggtgaaaagccatggtgttcctgctgcaagccttaagtggacagaacagccaacctagtgacgtaggtaattcttcaccaaatatgccgatttagctcagttggtagagcgcttcacttgtaatgaagatgccgcgggttcgactcctgcaatcggcaccaaattctggtatgtgatagctcaaataggtagagcgtgaggccctggtgctgaatggcttgtaggttcgattcctacccataccaaaaattaatgaggaaaatatgaaagtatatgctgtagtaaaaaataactggaactgtgaatatggctatgaagaatattctttgcctcttaagatttttcacactaaatccgaagcaacatcatatgcggaagaacttgaagcaaacgattcctattatcagtatctagttgaagaatacgatgtaatgtaattcgaagggaaacttgcgtataccctcgttgagtcgtcagatagaagagaatggttcgtccattgccgctagtcggttgttcactgtcgcaagcataacctcctgacgctatacttctttggatgagactgatgcctccgagtccaaagaaatgaatttcgcaggtcatctgccagtgggtgatgctgtcgattattagagccctgtcttcggacggggctttttagtataaatagtaatttaatcgacactaaggatttttttgcaatgaaatttaaagattttttaaccgaagaagagctttttgaagcagctcctggccgcatgactaaatcgaaatggcgtgacgctctggtattggttccacgtggtgaacgccatgattttagcaaatttgcggcttctgtggaaaagatttatggtattgggattagcgatcctaaagactatgctaaggtagcagctgcctttgaaagtttaggcggaaaggttactacacctgcacgtggagcttctccggcacaagcaccggccgcaaaaccggctccggttaaagcgaaacctaaaaatattcctggccttaaaattagtggagaccatggagacatcattggttcaggtgaactgtttaaagctatcgataaagctcttccgctagtaagagataatggtcctctttataaggcagttcaattctatttcgataatctgtggaagtatcgtgaatcccaaggtgctaaaccttctgcacgtgaaactcagcatatcggtgaagtgaaaacgcttttagctaaactgaatcatcaccttgttgaactcagtcgtcagacagaattatcgtacaatgtataataaaatgtaatcctacagccctagaattcatctagggcatttttgtatccccggctgtataaatccattctaacttccagaaagttcctccagatgccctaaaatttttgcacaaagttgtttacttcctctatcaactcggttactatagctccatcaaaacaaagcagagtaacggagaataaaatgtctaaattcaactttatccaaattgaacgtggttataacaattacggtactcctgatcgttatcgcgcgatttggattaaaggtgaacatgaacacgcagtgttcaacgtagcagaaactcgtgaactgaaagatttgattaagcatgttcgcaaagattggcctgctgttgaagagtactacgttcgagtttaccatgaagaagctgctaccgaaactgttcaaattaaattcgcaaaaactgctagtgctttaaccaaacgaattgaagcggtaattaactgctaataattttggggagttataatgaactccccacctactgaggaaatagtaatggatacagcaaatatagttccaaaaactcttgctgatatacgtcttgaagctaaaatagctatcgagcgcctaattaaggcaacagtagaagaaggcaaagaaactgttcttattctcgggttagagtcatacgttactgattacatcgagatattcgagcgcagcaaaaatgaacagggtctaatcattaaaccatatgtttatgattggattaatccgtacgaataaaaccaccataactattgaaaggaaataaaatgtctattctgaaaaaacttgttgaattcatccgttctaaattcggtacctttgttgcacagaacacttctgttgaagaccagtataccactgcggcaaatcgtattattgatgaaatcactaaactgcgtaccacgcatgttaaatcggtaaatgaagaaaagcgtctgctgaaacttgctgacgaaaaagaccaggcaggtgcttccaaagagcgtgaaattcgtcgcttgatggcagaaggtatgaatgtagaaacccatgctaaactaggtcttctgtatcgtcgtactgctaaggctttacgtgataaagctgccgaatataaagaaatgcgagcccaaattgaagaaaccgtagttaagcttgatgaccaacgtcttgatttggcagtgaaactcgaatacatccgtgagacccgtaatgcttctgctctgggtattacctctgctgatgacgtgattgaaatcgcggaactcgctaaagtagatgtacaagacatcatgatgaaagttgaaaccttcagcggtactcagcctggtattgaaaccaccactgctgatgtccaggaatatctggaaagtctgaagtaattttatcggggccttcgggcccctaacttggataataaaatgttatatgaatgcgctggagatattccaatggcaacacctcaaattaaagaattaattgcagcaggattcccaaaagaaatcactgatattcttgagaaatttgcttattctgatactcggcctgaaaattggaaaactcgctataacgggtataacaccacagttttaccgcgggctatcgttcttaaagactattccaagctgaaaaacttaatttctaatatttcgtctatttccgacggagttaagcttgtagatatctttgcacttcggtacggaatttattctttcaacgattctccatcaaatctaacatcagctcgtactaatgccgatggatattttacttctagctccacaacatatacagtagttatcgagattatctataataaaactagttatcgtctcggtattaatctggttaaatacgtgacatctcaggatgattatagcaattatttaaattactgtgttaatgaattaccaccaaaagtcatgggtatgtttgactctaacaacatggtaggcaaacaattaatcattgatgaatttatcaaatactgccgtgagagggtgcagaaatgagtaacttatatctgccaagtgaacctcccgtttataattatgtctataaatttgatcagattgattatgcccttgttcctggtattggtgcaactgtcggcgcaatgtgtacctttgccgcgattgatatcatgcatttaactgatattacaccggcagtgttattcggaattctgcttgcatggtggggaactagtttgctcatcatgggattaattgaatgttcccgatgggttaaatggtctcgcaataattataagcgtaaagctgaatggaaagaacagtgcaagaatttaactcttgaatggaaccgcaaaaagtcgtttgagtttattaaagaggtgagaagaaaatgaatgaatgtaaacctgacgggttttggaaccaagatgggctggcgccagcttttggaatcgtgacatggattttatattgtgcttttgtaattgttggagggacattctttggattgaacgtctcagagtttatgattatgcttttatttttaggtgttttcgcattcagcctcatgtggatgctaattatcgcgttgattaattgctgcacatttttagcttaccgtatgaaatacaagaagtggaaagaaaaagaagatttcaacacctggattaggagctgcagaaaatgattaaaacttgttatcgtggaatgattaaagatgatgatttcttgtatttcttcctatttctgcttatcctgttttccttctcaacatttgttggtgttgggatattctgggggttctacttcttttcaccagtatttggtgatacgctgtactatctaggttggatgtcaggggttggaacttggtttgcaatgcttgctcgttggttgcaattcgtttcccagcggcagcggggtgtatttgataaacccaaagtaaagaaagaaaaatctaaagatgattctcgtaatgaaactttatcctggattaaggagatgaaataatggctgttgcagtgcatgtaaaatttgaaaatggtgatactcgccttctgtgttacagcgataatgaatcactgagcggtatcgagatttcacttaaagaagaactgcttggtattaatggacctatctgtgatttctcggtagagggttcatataattgtgatggtgtactagagtctatggtctatactgccatggaagatattcttgaagaaagttggaatgaatgccaatgaaagagctcagtgcaggaatcttattctttaccgatgacaaacggcttttcatgggtcgtatgacaaatacatatgtccagggcagaggctctagatgggatattccgaaaggacatgttgagcctggtgaaacaccaaaagaagctgctattcgcgaatgccaggaagaaacagggtttactgggtttgaccaggacctcttatatgacctcggacgacatgattatgccagcaataaggatatccatttgtttggatatatgctccctgtgagcccagaagtgtttaagaattgctgttgcacagcttaccataaagatgaaaatggaatttctttcccggaaatcgacgcatttgctttaattaaaccttctcaatggaaatatgtgatgggaccaagtttgtataaaatcatgacacagatgtatagcacagcccagtgaggttactatggaagaagctgttgaattaggcattccacacatttataagcatgaactacgatttgttcgtgacggaagatggattagcatatttcatcctcgagataagttgtcacgtacactaatgaagtcacggtatgtcttcggtgacggcgagtatacaaaatcagcatattatatagcagaacagctatatccgggatttagtgaattgcccgaggacgatagaagagattatgtgtggtggaaaggtaaatggacaccatacgagaagtgtagccttgaattattcatagccaagtgcagggccaaataaatactcctataattaataggaggtccttatggatatttttggcatgctgcgtattgatgaaggatacgatagcaaaatttataaagataccgaagggtattggactattggtattggccacttactgactaaagacccgtcaaaatctttggctatttctaacctggacaagcttgtaggtcgttctactggtggccaaattacccaggctgaggcagaagtaatttttgcaaaggatgttgaaaaagcaattaagggcattgtggctaatgctacattaagcccggtatataatatattagatgatgttcgtagagcagctctaattaacatggtattccaaatgggtgtaggtggtgtcgctggattccctgcttccatgaagctcttagctgctaaaaaatgggatgctgctgccaaagaactggcaaattcacgttggtatcgtcagacacctaatcgtgctcgtcgtgtaattgaaactatgcggaccggaacttgggccgcttatcaaggaaaataaatgaaaacttatcaagaatttttaaatgaatcccgtttagcaacagttggcgtaatgactgaatctgttggaagtaatcttctgaaatttaaaaaaggtcagaagatgacagccacgctagaagatggtacagaaattgaaatggacgttgttggatataactacgtagtagacggcaagttatataataagagccatgctaagtttgattcattcgatgatttcacctcttctattgaagatgagtcttctcgcaaagcagtagcatctggcgatgcacgctccttaatggcatttggtcatgagcgtattaagtctaagcagaacaaacctggtgaagataactttgcattagtaggttatcagtctggcaaaacttctaacggttaccaacgtactgttaccatgtacatgcgtaatggtaaaattgcattcgtaaacgatcgcggcgctattcgttacgctaaatcaattaagtaagcaatttcctaataaagccgaacacgacctctcctcatgaacgtcgagtcctctgagtgaagtagcttttcctacctgtaataaggtcgagcccaagtgcggtaaggggtttacatagtgtgtcgatggattaaacatgtgccaaggaatggcccctttaactggaatctaaaatgaaacacttaactcccatttatttgaccctgatgcatgctttcagagacgctgcagacagacgattgaataatcccaactacagtttttatgaaccgtcttgccttatgcgagagtacggtacccttcgtctagacggtggaagacaaaccggaaagaccgcagccttatgccaattcgctaccgattggttgcttgaagatggttcggttataatcttatctactcgatacacacaatcatctgaactgatggaaggtattctacgagaatataattcatcgcatttaattaataaattaccggctaacgagatagctaaatcaattgttccgatgacaatcagggaatttctatccaatgattcctcttataagtttagaggaagaaagtttggaagagcattaattatcattgaagaaccaatgaaagttcccgatatgatgaagttctatgatatgtaccaggaagctatcagatggtctatgcctaatgataccttacctttatttttcgtgataggaatgcaatgatgacacagacagaaattgttgatatgattacagtaatggaaaatacaggattttccgatatgaagcaattaataacaatggttacggctggaaacctgcttgagtacaagcgctacaagtttctgtctggtccgtttaaaggtgcagaattcatttctaatgctcctaacacgaagtggatgaatcgctatcctaattttagaattgagtttatatctggcaagctcaaaggcgtgattagttcaagcttaatcacatatgaccaacgcattcaagagaaaacaatgcaatggctgaaattgttataaagtgtcctccacatttagttgaaagcttctgtgattggttcagtaattctggtgagcaagatttttatgaagctcatcagaatggaacttggaatgaagccacaaaacagtgggaagaagctacaacgtatataggcactcgtggatatggagttgatgagcctattgaaattgtagagtacgataaagaaactgatgaagaaatactttatgctaatgatgccagagaacgcttatggcgagaatctgaattagaagcagaagttattcgtcttaaagaagaattaaaaggaccaacgggttttgctacatggaaagacgctgctatttctgaacgtttagcacgggtaaaattaatgccagaaggtaaaatctcgtacttgcaggctgcatccaagttccattctactgagtggaatactatggacgtaattaccgcgtacatgcgtggttggaataaagaatctaattaagaggaaatatgaaagcatatcaaattcttgaaggtgaacttaaaggcaccatttacatcgaagatggtgatgacgcacgagtaatcgtttcaaaagttcttaaagaagatactattacggatgctgaaactttttatggctacaaggcgcgtgaagtagaaattgaataccagccaacggtaaaagttgaaggcggtcagcacctgaacgttaacgtgctgcgtcgcgaaaccctgctggacgcggttgagcatccggaaaaatatccgcagctgaccattcgtgtttccggctacgcggtacgcttcaactctctgactccggaacagcaacgcgacgttatcgctcgtactttcacagaggcactataatgtcaatcgaagatattaaaggatacaagccacataccaatgaaaaaattggtaaagtgaatgctatcaaagacgctgaaacccgtcttggtcttatctttactgctcttgaagaagaggcattaatcaactaccaagagtcagccaatgaacccaagcaggtactcgatgaagcatacgaacgtattgcccagattcgtacagcaaaacagaaactgaaggaagcttctatgtgggcttgccgggcagtgttctgtccagaagaaaaatattaaaaagtagtttactttccttacgggccatgatactatggccctacaaacaaaggagaatgaactatgtcaactaacccagaagtattcattcgcagaactaaactgcgtcgtaagtttgaggaagcttttcgctctttgaatttatctgttcgtgcccgggcgaaagccgagggtaaagagcctttcttcactaagtactctgatcatttgttggaccgtgctattcaacgtgaaattgatgaagagtatgtattctctgttctttccaaaattcctaatcatcttaaagaaattaatgaattcttagcaatgccttggcttccaattgacccaaaagacattgatgaaaacatcgagtataagccaatgcggttagaaattacggatggaaatctgtggctagggtttaccatggatattccaagaccaggaaaaggacctagtataaagtgtcgtatggcattcgttaatgataaacgtttgaaaggtaaaatcagcacaaaagttatacacattaattgaggtaaacatgaaaaaagcgcttatcggtctaatggccttatgttcaacggcctttgggtctgagccaactttcagtaatgttcaacttgacaacttacattacgcatataattttggtgagcaatatcaaaaatccggaaaggaaaaatctccgcataaccgatatgataataacggcttaggatatataatggctgctatatcatggaaagaatcttcggcaggagccaatttaaaagcaggaaaggggcatcattcttatggggtatttcaaaattacttgcctacggttaaagccagagctaaattagaaggcaaaaaccttagtgattctgaaataagaaaaatgcttaaatctagacagaattccgcggaatgggcatatattgagctttcatattggttaaatatacataacggcaatatgcgaaaagctcttgctagttataatgcaggatggaatgtcaaaaggggaaactcttatgcgtcagatgtcctagagaaagctaatttcttaaagaaacataaaatgctacatataaaggtggaataatggtaaagtacgccgcgcttcttggattggtactggcattctctgctaatgctgaaaattcaatgacagattcacttcgtatcgctaaaacattttgcaatacgaactctgaatgtgttgatatattagcgcttgaattagattcagcattcagcgatggagtaaaagattcacgtagcccggcccagtggacaacactaataaatcgtaaggctaagagcatgaaagatttatgtgtcaatgctcctaacgaaaatatatgtttaatgtatcgtgaccaattaatggctcgttatatgtcaggactatcatcaaaatgaaaaaagcagctattttattatgctgcgcattttcagttaatgcctgggaaaagctcccaggctatcctgaacctgtactagcggcgcaggggactaaaatagaaagcaacggtccattcaagaacaatattgaaatagcatttgtgcctagcagtagaaaattgctaatgtcattttataattaccaagataaagatgaccaggtaatagttccacttgtcgaatataatgctcgcggatgtggaatgcagagcgatggcgtttctattgacggagtaatgcatcctaaagaacaaggagtgctgaaccctatccttaattgtaacaatgctatatttttaagagtatacaataatcttaatgaatatgcaacatataaaattccataggtgaataaatgattactggatatattaagggtaatattgtagaattattcatgaagcatgaatgcgatattgctcatggatgtaattgctttactacaatgggtgctggtgtagcaggacaacttgctaaagcatatcctccaattctcgatattgacatcgatgaagaccgttattatgacaataatttagctaagcttggaactcatactcgagccattcacaagaatggcactgcatattgctataatttgtatactcagtatgctccaggtccaaatgttgattacggcgcaatttttaatgcattccatgaactaaattctggtcgtattgtttataatcgtcctctatacattccaaagattggtgctggtattgctggcggtgattgggaactaattgagaaacttattaatttagcaacccctgatattgacattacagtggtagaatatgaagaggctaaaagctaaatacgtcttgttagaggtaaatagatgattactaaagagcaaaaaaataaactgtggcagttgattgacgattatgcaggtgccgagcaagtagtagctattagtgccatttacggaaatggtctacctgaagaatacgatgaactcattcgttctaagaatgctatttctgattttatggagacactttaatggcacagctttatttcaactacgcgagtatgaatgcaggcaaatcagctaaccttcttacagcagcccataactataaagaacgaggaatgggaactctcattctgaaacctgctattgatactcgggattcggcaacggaagttacttctcgtattggtcttcgtcatgaagctaatacagtagacgaatctattgacatacttgaatttttcaagtgggcacaaacacaacgtgatattcattgtgtatttgtagatgaagcacaattcttgactgctgaacatgttcttcagctatgtaaaatcgttgacttgtatgatgttccagtaatggcatatgggcttcgcactgattttcgcggcgagttattcgaaggttctaaagctcttctttctgtagccgataaacttgttgagctcaagggcgtttgccattgtgggcgtaaagctactatggtagctcgtattgatgaaaacggaaatgctattaccgacggtgaagtagtagaacttggtggtgaagacaaatacgtttctctttgtcgtaaacactggtgcgaactggtaggtgtttataatgaagccaagaacgtataatactctcctgatgctagttttaagtatgttattcatttggattggtgtggcagcatctatacaaagtgatagacgagaagaaatgcaaaatcgtcttaattccgaatgtaaagtattggcacagggtaaagactttattgctaatatgaatgggtgttatattaaacatgagtagcttatttgctatagcgggtggtatagtactagtactcgtgattgggtttttactatacgtaatattgctttcgttattggtttaatatgaaaaaatatgtgatgtgctatcgttgtcttcatgtatatgattacaacactgctccaaagactgctaccaagcgtcttaaaaccaaagaacctgaatgtccaaaatgtaaatgtaaggtcatctattcatgaatattaaattttttaaatcaggattttactatcgttgaggtactttaacttaacgaggtaataatgtctagaacaattcgccgtaaaggctggcatgtagtaaaatcttccaaatggaacgatcagaataataacgaatttgcttatattaaaagctataacgaatacgttaaaactcagaaagataaagaaacccaacagaaatatgttgaactgcgtatttctgaaaatcgggaaagaccgctagaggccaagaaactgattgctaaatcaaagcgcgatggattctggaaaactctacgttggacccgttatgctatgccgatcccacgtctatttcataaagccgaaattaaacgcgcattgaagtatgacgaagaatataactgggacgaagctggtgctagaaccattgagcaaggcatctgcgaatggctttgggattaagtaacacatacttatataaatactattactaactgatgaggtgtatatgcagcatttaagtgaaaagcaacttcgtaatcttactgtagaacaactggacgaacttcgtcgtgagattgggcatggtatttcgcaccttcaggaagaaattcgtcagcacagttcaaaagcagattatacccgtaaacgtaagctggacaaatacctcaaagaagttaaggctgtacttcagcacaaacgtaatactggacaaaaataataggaggccgtatggcctttaatcacatttgcttagccctggtgttgggctgcgggatttcactcccagctgcatcacacaacgacatttcggattataactcgtatgttgagggagctctacaagtttatgctaaatttaaggagcctagtaagcaagagtctgaacagttctattcttttatacaaagtaaatggaagagtgagtcttgttctaaagattgcgattctttaggacgttcagcaggtgaagaatatgctaaccgcatgaggatacaactcgataatgaaattcaatgattttgtaaaggacggtaaacttactccacaagatgaattcatcggtttacttatggcgtctcaggcgtattttcattcagcgcattttgataccaaatcgtatgccagacataaagcgtatgaagttttctttaacgagattccagatttgatagatgcttttggtgagcagtggttaggattctcaggtaagagttatacaccggctttaccatcgcagaaagagctgccaaaggacaccattgaaatgctagacctcattctggctaaggccgatggtatctacaagtcagttcctgccgccctccaaagtgttctggatgacattacaggtctatgctacaagactaagtatttgttatcattgcagtaataccctccgcctcctccgggaggcattttcttttcaaaaagttgtttacttcccttcattacatgatactatagacatatcaacaaccaaacgagaaaaacattatgattaagttaactactgaacttcaacctggaaaaatcttttatcacgtgtgtggtgttaatcgcacagaaactaaaagcggcgaaataacgcgttacattgttgcttcaggcacgtatgatgttgaactcggtcttcgcggtgtatattcgcgaaaatctcctttcttccgggtgatttgtgaatatgaaaactatgctggtcaaactgaaagttattcaactgagcgttctgctcatgatatgggcgtattcaagccaggtgaaaagcgttcggttcataatcttaatcgtgggttttggacgcgtgaagaagctgaacagttcattaaagaacttcaggaagacaagttcagcgatccagatgatcaagcatatgcagacagactgaccccttctgaagatttccgccgtcaacaagaatttatggattcttatcttgacagttgtgattatgattactacgactttgatgatggcgaagaatgagaaacgttttacttatcatctacattgtggtacaataccagcatccgatgtttacatataatttggtgcaaatgattctggagagtttgaaatgaatggatggggcccatcagatgacggatttgcaactcgcgaagctacaatagcagacgggattgaatgggcccgtcttcagaaacaactccaagaacagcgggaatccgaagagttctgtgttgattgtgatgaggaaatcccagtagctcgtcgtctgttggttaaaggctgtcaacggtgtgtagaatgtcaaggaaagtgggacattgtaatgacttctgcttataatcgtcgtggttcaaaagattcacaattgaggtaattatggaaagtattcttgatagtaccaatttagataatccgtacagtgatgtgcgtgtaaaggttgtgaattcatatttcactaaaaagttgagtcgtatcgtgctaaaacaaggcaatgatataattcatcttgatactaaacaaattgattcattaattcaattcttgatagaggcaaaagatggcgagtaaattagtatgggacggaaaatcccgtaaaggcgatgcagtaattgaagatgaaagcccgcatgttattgatttgtatcttacggtattccacacgtatgaacataatactatcatcgaaattgaacgtgacggagattgtgtagctattgataaaagcgacgctattgaactggtcaaatatcttgtaactatgattccaactatgaaggactgataatgaatattaataaaaactcttggcatttcaaaatgaacctgtggtttaaatctggcagcatgtggaaaatgccaaaaactctatgtggatacttctggacgacagttcttcatgttgtgttttcttcggcgattatcacgttcatcggttctgttgcatggatgttcggttggccgattgtggcagagacaggaattctctcttggataggtattagtttatccgcgttttggttaaacgttgtagcagtaccagttggcgcagtggttatagcagcatttgtgcttttatttgcagctatagcgtttggatttattttcggtttagaaaaatttaaagaataccgtaaaaataaacaatttacgaagaaacttgctcgagtaaaagcgggtcttcctgcagaagccgaaccatcggtatttgtccagtatttaaaagcccgtaagcggaaagtctgcccaatgattgattatgtagaaggtgataaatgaaacgttttattcgcatgaaatttgaagaaagccttattgaaaaacccttaaaggttggtgataaagtagaaattgggtttgataaccaaagcaatcgatttgagcttgaagttgaatttatttctatcttcaaatgcagctcagcgcatacggtatcgattttctttaaaagtaaagacagcaaaatcgtagtatattacgaccatagcagccgagaaacaactactgtagtatatccaaaagacggctaccgtggaatgtatatcgatgattacctaaatgaatcggcagacgatggattttatatctgcaaacttttaccgggtagttctaagtcggtaattaatctcagcagccttaaatacacagtttatgagaagtgtaaagttaatgttcctcttgtagtgggtgataaattctctacaactaataactgctatgaagtactagcaattgcagcagatggaagcatgttttgtcagaacgataaaagaaaagctcacgtgtttagtacaaatgacatctcgctcgttaaatctatgcttgatgttacagtaggtgaacctagtgaagaatgatcaagtttatattgtgaacggccttcgggccgtatttcgtgctaaaaccgaacgtggtataatttctacataccctattgccgaatttacttttgatgacggcgaaaaggttacggttaaatttattcctttgactggcaagtacagcggcaaagataacattgatttagacatacattatgagggcgggtcatggaaattgaaatcgtaactactaagaaaaaacttagtatgagcattgtgaaacagatgccgttagcttcagccgaaaacattaaattcgcaatgatggacccggaatcacgggtcctaggatatatcaatgcatttcgctggaacagacttgacattcaggtggcaatcattagcacaggaattgattgggcattagttcctatgtatgaaaccacactgcgtgaagaaacctgtcgtgaacagcatcctgatggacaagagtaccatacccacgaagtggtgtattattacaccagtcaaaaaattggtaatgtttaccgtacatcaaaaagaactacagataaaactcgagcagaagaagcagccaagcgttctaatgcattagttaaattcgctaaagggaatcatatttacttatgaaaacaatcgtaaaatcttattttggttcacatctgtatggtacttcaactcccgagtcagatgtggattttaaagaaatctttgtacctcatccgcgtgatattctaatgtgtcaggcgatgaaccacaccaatcgtaatactaacaacagcgcaaccaaaaataccaaagacgatattgaccatgagttgttcagcttaaagtatttcttcaagctcgctgctgacggtgaaactgtcgcgttggatatgctgcatactccaccggaattggtagttgcatctgaccttcctgaagtatggaaattcattcaagacaaccgagctcgtttctataccactgacatgaaggcttatcttggatatgtccgtaagcaagcaggtaagtatggcgttaagggttctcgtttagcagatttacataaagtcctggatgttatcagagatgttcctgaatggaaatatgacgatcgtcctcagcagaagggtatcaatgagcgttggaaagtacaggatatcgcagagaaacttcctctaggtgaattcctcaaatggaccaccttcgttgaccacaaatcaggcgagcagaagttttataacgttctgggtcgtaaattccagacgactatcactatcaaagagatgaagtattctcttgagaaacttgatgctgaatatggtgaacgtgctcgtaaggcagaagctaacgaaggcgttgactggaaagcactgagtcatgctcttcgtgcaggtctgcagcttcaggaaatctatatgactggtgaccttcaattccctctgacccatgctaaaatggtcaagatggtcaaagcaggtgagttaccgttcaaagaagtacaggagcttctcgagtctgtagtagatgaagtagaaattctagctcatactgctgaaaagaacggaatgcctaagaaagtagacatgaagttctgggacgatttcgtcgagaaggtttatcttgaaaaccacaattcttactacaaatgatacaatgaaggtcttcttgaattacggaagacctcataaaggtagacggtggtatttggaagcagtttgcagagagactggtcgtagagaaaatgctaaattctctgctcgaccaactcgaaaacaaatccaccgatttatgtcatgggccggagaagagctccggttctcactttattgggctgaaatatgattttactgtggagcgtagtagtgccaatcgttgttgcaataatttactttgtcgtgggttggtctgtctgtaagcatctaatcaaaaatggaaccatcgagaaagcaggagagtattggttttatctcatcttttggttccctgcgtttattgccggagcgattatcatgttcttccgctgggcaggtaaacttccaaaacgtatagcagaaaatgctatcaacaagcacgcataactgaggagccttcgggctcctctttttgtttcaaaagaatgaaaaaagtagtttacaagctcgcgagctggtgatactatagctccatcaaaacaaaacagagtaacggagaataaaatgtcaactatcaccatcaagaaagggatttacttcggcaaagagatttcaggtacttatgagttactcggtgagtggttcccggatagcttaagtgctgaagattctcgccagggtgatggtaaagtctttgttgaactgaatggcaaaaagcgcggtgtttgggtattcaaagatgatatcacaattgacggagtagctgctaaaattgaagttgttgaatccgttgatgaaatgaaagagcgtatcaagaaacgctttaacgtcatgggattaatgactaacggcttaatccacgggaatattcgttctctgattatctccggagcagcaggtatcggtaagacttactctttggataaagcattacaacatgctcatgatactaacgctattgattacaaatcagtgaacggtaaaatctcaggaattggtttatactgccgtctctgggaatcacgtgaagcaaattcagttcttctgattgatgatgtggatgtattctctgatatggatattttgaaccttctgaaagctgctttggattcaggggagaaacgtaaagtatgctggagcactgcatcttctttcttggaagataaaggaattcctaatgagtttgagtttgaaggtactgtggtctttatcactaacgttgatattgaccgtgaattagagcgcggttctaaacttgctccgcatcttcaagccttggtatcacgttcagtttatcttgaccttggtgttcacactaatgaagagattatggttcgtgttcaagatgtaataatgactacttctatgttacagaaccgtgggttaagaaattctgaagttattgaagttttggaatttatgaaagataacgtaaatcgtctgcgtaacgtatctctccgtactgctctttatattggtgatttcgtcgcgactgaccgtaaaaactggcgtgaaattgctgaagtaacaatgctgaaataattttaatgggaggagaaatcctccctaactgaggaaaatataatggctactttaatttctaatgatgtaaaacgtgttttgtttaaaggcggaatgtatatcgttgatactcctaaaggtgatacctcttcctggactattaacgagtggattaattacattgatgaaaatggagcgtgggtacaatgagtttagcagctattaaagatattgaatgttggttaaacgatattaaagtatatccgcctggtcatatctttgcaggtaaacccaagggtaaagcagagaaagcctgtgaagcaatctgtgaaaaactttataagtttaactttggcgataagaaaaatgtattagctgaagtccattcttcttatcatgaactacgtgtaatggtaaacgtatttcgtgctcctccgttcattgagctcaggaaagaatacgctaataaagtatttgatactttccttgcaaatgtgcaggatgcagtaaagcatttagacgaaatgcataaacaacaccaagatttaaatgcctattataagccttggcgtaaatcataccaagagcttaaaaaccgtattgaacttattcgttatgaggtgctaaaatgaaatgggtaatgacagaaagtgaagcctatgcagcgtatgtctctccagacgatcgccgtagtgagttgtttggttattatggttcatattgcgttgccgaagaagcagttaaggggcagtcttggtggggctcagatggtacagttaatcgtaagccaacggaactaattacattcaccgatgaaaatggcgaatcatggacttttcctaaaagcgctgctattagtgttcaggaagaaacacctgaagctaagcgtaaacggttggaaaaaattaaagaagccgctttggctaaattaaatcctgatgaacgcgaggcgctcggattatgaacaaagaatttagtactgctcgtatggtagatgcttttggatatccgtgcagcggatatcgtgaatttattcacccggaagttgaaaatcaatttaaagaagttgtaagaaatattttgctcaatgcatttaaaactcaaggaactaacccgagagatttaggcatttatcttgaagaagccatcagagacgtacaaaagagcgtatcggctaaacttcattgggctgaagaaaatattgcgtggtcaaacaagaaacgttctgatttaaattggcccgctgatcgtgaacaaatcgtcaattatgctaaggtgtaataatgttaaaaacctatgaagttaaatttaaacgctttattgatggcaaatgctatgacaataaagaacgttcaacccgaatttctgcgccgtcagcgtaccaagcagtatttcagcatgggcagaccaatggcgtggcattccctgagcaagacgttgaagatattatcttagatgttattgaggtaaaatgtgtttagtactatagtgtctatacatgcgtattacgaagggcagttaaatgctgcccgaaccaagtataaacgagggatggaggaatctgtggaaggtctcaaaggtattcagacacttgctcagaagacccagaacctcatcctgatggaccgtaaacagttattattggctgaagagctaaaagcctctaagatgcttatagaagacaataggaaacatcaagtgaaattgcttaagcagcgacagcaccagtcgccatggtttaacagtgatttccgatctttttaagggccttcgggcccttttgttgtttacatcttagaaaagccatgataagatagcttcgttaactaatgaggagattgaaatgaaagcacctacttggaacgaacttcaagaaatgttcaatactgaagaagcttttggaactatttctgaaatggttgagaatttagtagattctccttcagaagataatcttctgtgtttagcacagttcatcattgaaacctacatcgagaatcagaaatgacagtatacgtagatgtcttgatgaatcatggttggaaaatgagaggtcatcaagtaaagaactgtcatatgtttagcgacaaccttgatgagttacacgctatggcagaagccatcggaatgaaacgttcttggttccaggataagcgagttccacactatgatttgcgcgatgttcgtcgcaagcaagcagttgctctaggagcagtagaagtatctcgtagagatgcagttctgctttggagaaaatttttcacaaagtagtttactttcggcgaggctgttgataagatggtctcgtcaaccaaactggagaataaaatgaaaactttaaccgagattatctctgcacttgttgaagaaaatcgtgtagcccgccaagcacaccgagcgaaagttgaaaaacgcgccgaggagttgaatgctggatgggcgaagacccgtttcggtcgtgaatactttgataaagttgtagctcctacttggggcaaagatgatcgtcctcatgctccctttgatggttatctttgggaaaatgaattaggtgaagttgaagcttatcacgcaggcagttacttgccgtatgttacagaatttgattcactggataagcctgagtatacaggtgaccacggttggtggaaactccgcttaactcaagaagagtataaagaacttcgtgagtatggttatcctcttgaagtacgcgttccatataaagagtggaaattgcaagacggaacggatgttgttatggcagaagttagagcccataagagcatcttagaggctatccaggaacattcaaaagaggtctttgataatatattcaatgagctgaataagaataaaggggatgcaccagaaggacgagtgactgtctccggtaccgtaacgtcagtaaaagtttatgaagactattacggcgtacaatgtaagatgatggttgtacttgagaatggagctacggtttacggctcccttccaaaaagtattccgtttgaatacagaggcaaagtacagtttactgctacatttgaattagcgaaagatgataaaactcatgctttctataagcgcccaagcaaagttataatgcttgaggaataattgttgtataatgggttcagggagattttgagatactctttgagcccagtccaaaatagaggaaaagataatgaataagaatgaattaaagatgtttgtagccggtgaatttgataagcataatggaaagggcttgtcaaagcgtgagaagcacgtaaaggttttggcagctttacatgatttaaatccagctgcttataacgtagcaattgctggtaacgtagctcgtcgtgtgctaaatagcatggcagcacacgaagcaaactatgtcagttttgttgtagaaaacattcgtcgttctcgctggttaggtgcaatgtcagcagagaagcagctcaaaaagtttgctatcggcaatgctaaaatttatggtcagcgttatagctttgcggcaggggcgtttaaaactgaagaaagacacgaccgcagcgctgcccaaatcttctgctctgaatttaatgcaaacctgcgtcgtattcttaatcgttcaatttgcttacttaaaggcgatgaccgtgtgaaataccaggtatcttctactagttctagaaatcctaagggtgtttcatttattcgtgccgaagaacttgacaatgtaactgtacgaattcatattaacagccatttgtccagcggaaagtatccggcccgggcgcttttagcgcaagttcgtactgctttagaccatatggatgtagttaaaaaatcatgctgtaaacagcagggtgaaaactcatctgttcttgaagtacatttggacccatttaagatttttcctaaaacattgagcacacaggttattgatgaagatgtagcgcatatgtatctcaatgttgttaagcctcttccgttaacaccagtaaatcatgttgaaattgccaaaaacagtattacagctgaaatggaatcagttaagcggtttattgatacaaaagaagctgaattaagtaagcatgaattgatgatggcggatttagtcaaatcgcttaatgagtacaaagagcggtatgaatctctcgagtatgcccggagcttactgtgaaaaatcaattaaaagaagacatggtcgttgatgataacgaccttgaaattgagtttgagtatccacctgtacctgaatttaaaattgattgggatgcctgtcttgaaatggtagaccgtcgagaagctgcagctaaacaagttgtgccttgtgaaaaatgtggtagtattcaagtacagcttgttgattggacaaccgatattctgaaaatgaaatgccggacttgtaagcataaatttgagagaaaattaaaatgattactaaaactattactggtgctaatactaagttttttgtcgagtatgctaataacctcataaaagacaaaaactttgataacatcattgcagatatgattcttgacgcatacgaaagtggcatcgaccctatgcagcttaaagaatatcttcgagcgacaatggattttacagttcttaacatgatgcttagaactgatactgaattcaatgaaatgattgctcgtcgtaatgaaggcaagttcaatttgactgatgacgaagtattagcgtgtgctgctcacgaagcttggaagaaggtgattaaatgaaaaccactggcgcgctttggaaagaattttataacgatgaagccttctgggaaggctattatcatgatgacactttaatactctttgatgatgttgaagtagaagaatatgaagacccttcgcctgatgcggtagtaaaaattgaaagcggatatgtttacaaaaccgatgatttcttcacttcccatgatttgagtcttgccactttctttaaacgttggaaaaagaaacagaccgctcgcactattgtagtcaccgttgataaagataactttgacgaagtatttgaaactatctctaatattcctggagtgaaaaaggtaaaatgattgacattaaattagatacacatgcagtacgacagttatttccagaaggtacagaagctcgtgcccagcttcagcagtcggtaatcaataacatcgttaaagaaatggtgttaaaagattcccagaataaactaaaacaagcagtacaatctgaagttaatattgctgctgtgactattccagatgtccgagcagaagttaagaagcaggttcagcagatgttccatactcgcggttggaatgatatgtctgctaaagaagaaatgtcacagatgatgcgtaacgctgcccaatcatgcgctaaaaatgctattgatgatatggttcgtcaaactattgatgacgctgttaagcaagctgaaggccgtattaagatgtctattgaaagagctaatctccgaattcaagaaatcattgttaatgcaatgaataagaatttcgctgatcaaattaacgctgccattgctgctaaattggcagaacacttcccggtaactgctaatggataaaattgattttagcaaattaaatattcctcgcatgggaattcctgatgatattgccaagcaattagctagcgttcaaccaatgccagataattgcatcaaagatattctcgatgcgttagatggtaaaacattagttataactactaaggctgaaaatggctcgtaaacgatatatggaagaagccgaacgagtaatgctactcatgtattcggtttattataatgagactggtcaaatagttgatagttctaaactcaaaggagctatgactcgtggaagaaattttgcccaagctgcaattgatggcgaagtaatgaagcgtcttggtatgacaaattacgttaaagcagtatgccatccagattggaaccaagttcaagctcaagtatttaaggaaatagaagaagatgttcacggtttttggttacgacagcaacattcataagtgtgtgttttgcgataatgcaaagcgtctgctcgatgttaagaaacaagagtatgcattcatcaatgtaatgccagaaaaaggtgtatttgatgaagtagttatcagtgatttgcttcgtcgtctaggtcgcgaatcgcaggttggattaactatgcctcagatttttgctcctgatggcacacatatcggcggttttgatgaactccgtaaattcaaattcaatgcatgattatcgcggaaccctccttcgggagggtgatattgtagctctttattacggctatggcggattagaaaccggtgaaattaagcagattaagaatcaccgagcaaaggtagaggtaacttactctaatggagttaaggttatgtctaaatggaaatacggcgagtgtatggtgaaattatgaaatacccaattgagtttgtttttcctgaaggcgaccaagtagatttagaacgtaatcttcgtaaagcaatgattgaaagagctatatctgatccgcagtatgctttcatgcaccaatggggtgaattctttgtaaagcaaggaaatatcattcatggtgttcagtggagttatattggtcttgaagttgattacgatgctggtaatccattagggtcttggcgttgggaagatgaagagctcggaccagattttgaagttgattgttcttggcatgaggaagagttatgagttatgatattgatgatttaaaaactccacgaatggtaacagttccagctgaagagattgatcgtctccatgctattgaagaactgttatgggaaattgaatgctcacttccatctggtttagaaagctggattgacgatgaagacttacaaaaactgcgaggctaaaatgactaacgctgaattgcttaaagaaatcaaacatattgctggtgtcactggcgaatgggacgacaactatgatttcgaatatccaccgaacggtgatgatgaagaggaagaaatctttgttttagtagaagatggagattggacacaggaccataagtatcaaagccgttctcagatttggtattatccagcacgcggcgtccatttcatggtatcagagtctcgttcaggttcatatcataccgattggtattataatcctcctgaagtagatatcgtcactcgtcacgagaaagtagttactcgtactgaagttgaatggcgtattgaatacgattctgttaatgattccgctccggcaccatgcaaagcagcaaaggcataaaaccttggtatgcggctcggtgggaaactgtcgagccagaggaagatgctattcctgaagaagattataatacttctgaacctaccattaacgaactacttgattatgaggacaaagtgaatggaacttattggtaagcagtttgaagttatagaaaatgatgatgaattaactgaacaatttccccagtttgttcctggatttaaatttcaggttatcaatgcagttaatgaagatgaccttgaaacatgtggcattacagcagtaattgatttgctcacaaataaaatcatcacaattaatgacccaactccacacggcgaatcttggttctggtgtttctacagcgaagatacgatgcaccaaattaaagaaattggtcaaggtgaagatgttcctctgatttctgaaattaaacttaaccatttccaaggtgcaatcgttccaattaccagagctctttatgcctttgctggacaggaaaattgcgattcagaagagtatgctttaatgcaaaaagcagcagattatatcgtcgcacttgaacaacgtcttggagttcgccatgtctaaatcgtgcattactaaaactattacagtaaaaattctcgatttcgctgatattcatcgtgttacaagagaaattttacgcagtcattggtatgaagttggcgatgtagtagaatttagtggaggctattacgacgatgacatcaatggaatggcttggactaaaatgagtcttcttcatgaagaaactaattcatatattgagttcaatgcggatgattatgaaggcatctatgctttctgtacttctttctgcataaaagagtctaatcataacatctatagtagttactcgttaatttaactataaatactcttatctaatcgctgaggtaagagtatgttattaaccggtaagttatataaagaagaaaaagaaaaactatatcaggcacagaacggattatgtccttgctgcaaacgtcctttagatgaggatattcaaaagaatcacctcgaccatgaccatgcgttagaaggtgacaatgcaggaaaggtcagaggcttgctctgtaacctgtgtaatgcggcagaaggccaaatgaagcataagttcaaccgctctggtttaaaaggtcaagatattgactacctcgaatggttagagaatttgctggtctatctccgccagaatcgtaaagacagtaatattcacccgcaatatgttgccgatatggctaaacgcttttcacgtcttggtaagcctgagatgattgctgaaatggaattgcatgggtttacatacgaggaaagtgatggaaaatcacaacttgcttcaaaatacaagaagcagcttcgtaagagtttaaaatgaatatcgaattagaaatccagggacttattaataaaaccaacaaggaccttttaaacgagaatgctaacaaagattctcgtgtttttcctacccaacgtgacctgatggctggtatcgtatctaaacatatcgccaatcaggtcattcctgcctctgtaatggaagcacacaaagaaggtgttatccattttcatgatatggactatagtccagctttgcctttcaccaactgctgtttggtagatttgaaaggtatgttgcagaatggctttaaacttggtaacgctcaaattgaaactcctaagagtattggagtagctactgctatcatggcgcaaatcactgcacaagtagcatctcaccaatatggtggaactacgtttgctaacgtcgatttagtattggctccttatgtagagaagacattcgctaaacacgtacgtgatgctcgcaaatatcaagtagcattagtaaaagattatgctatttcaaaaacagaaaaagacgtgtttgatgctttccaggcgtatgaatatgaagtgaatactttgttcagttcaaatggccaaacaccgtttgtgactatcacatttggtatgggaacgtcatgggaagaaaaattaattcaacgagctattcttgataatcgtattcgtggattaggacgtgatggaattactccaatttttccaaagcttgtgatgtttgtagaagaaggcattaatctacgtaaagaagacccgaactatgatattaagcagcttgcattagaatgtgcagctaaacgcatgtatcctgatatcatcagtgctcgaaataatagagcaattaccggttcagaaactcctgtatctccaatgggctgtagaagtttccttggtgcttggagagactcttctggcaaacccgttcttgatggccgtaataatctaggggtagtaacactgaacctccctaggatagctctggatgcaaattataaaagttcggatgacagtaataaactgttcaaactattggatgaacgccttgatatttgtaaagaagcccttttaactagaattaaatcccttgaaggcgttactgcatcagttgctcctattctttaccaggaaggtgcttttggtgtgcgtatgaaacctgatgatgaaattcttgagctattcaaaaatggacgtagttcaatttcattaggatatattggcattcacgaatttgatatgcttacttttaaaggaagcggtaaactcgtcctgaagtacatcaacactaagctaaacaagtggacggaagaaaccggctatgcctttagtctgtactcaactccggctgaaagtctgtgctatcgtttctgtaagattgaccaagccaagtttggcgatgtaaagggcgtaactgataaaggctggtacactaatagcttccatgtgtcagtagaagaaaacctgtcaccttttgaaaagattgaccgtgaagcaccatatcattccattgctaaaggtggtcatatttcttatgttgaacttcctgacatgaagcgcaaccttgaaggtcttgaagcggtatgggactatgctatcgagaagttggattattttggtgttaacatgccagtagataaatgtctttcctgtggttctactcatgagatgacacctactgaaaacggattcacgtgttcaatttgtggtgaaactgatccaaagaaaatgaatacaatccgtaggacttgtggctatcttggtaatccttctgagcgtgggttcaatcttggtaagaacaaagaaattatgcatagggtaaaacatgttagagaaaccaatgaagcaagttgattggaaccaacttagcgaatggggattgatttggaaaatcaacaaagaggttctgcacccgcttggaattgctataacccgtgaccccgaaagtggattatcggctggggctattcaaactgatgagccctggaaatatgatgcagaagtagaagcacgtaatgaggtaaggttcaatgaatttcgacagaatctacccttctgactttgtgaatggccctggatgcagggtcgttctttttgtcaccgggtgtttgcataaatgcgaagggtgttataataaatctacttggaatgctagaaatggccagttattcactatgaatactgttaaagagcttgcatcccatttaagcaaatcgtatattcaaggtcttaccttaaccggtggagacccgctttatccacagaatcgggaagagatttcaaatttagtttcttgggttaaagcaagatttccggagaaagatatctggatgtggacaggatataagtttgaagatatcaaagatttagatttgctacaacacatcgatgttataattgatgggaaatatgagaaatcactgccaactactaaaaactggcgtggttctgacaaccaaagactctgggtaagaaatggttctacctggacacacgattgaggaaatagatatgctgacttacaaaattatgtttaccctgaaccacatggctactgaactgtttggaccggaatttctggctatgacagcgttcatctttactatttaaggaaaattatgaaattcattaatgctattcgtaaatttatttctaacgttatcgctttggttgcattaacggcaggtgctttcgtagcaattccgttcattgtccttattatcatcgcagattggattaatcctaccaagaaagatgaaaagttatctaatgaagaatttcagaaacgagttaacactctgactgctaaactccaacaggtcatgaaatgatagaaatctatggcatccctgaagaagtttggagatgccctggatgtaaagcagttcgtgacttgctcgataagctgcaacttccgtatgagttctataacgtaatcaacgaggttgacggtcaaccggtttatgaccgtccgttgattgagtcacttgctaaacgcatcgggtgctatccatcgcttgctattcggtatcctgtcatttttatggataacgttaagcagtatgacattccaacattcaaaaccaatcttattgctgctgggcatgacccagatatcatagaagattaaccagttcctttctaaggtcatcttgaccaccttctgtatatttctatacccttcatttagaggttcctatgggacctctcttttattttaaatccatttcacaaagttgtttacaagctagctgatgagtgatactatagccctatcaacggataacagcataccgtttaactcgagaggaaaatatgaactggttaaattggcaagaagctctagaagctatgagtaaaggctgtaaagtaaagcatgtgcattttactgatgatgaatacttcttgatgaagaacaaggtcatctgtgacgaaaacggatatgatatgactcgctggtacaagggtgagtcttggcaaaacgaacattggtacatcgcatgaaaacttttgctgtaggtgatatcgtccgtaccagaatttgggatgggcttcaatttgaagtagttgtctacgtcggttcagatggggttctgcttcaccgaattaacaatctgattaagtggcacctagaacgcttcgtgaaataccatgaattcaatagctaccactgcactgtagctccggttgctagtaaagaatactacgatatgctcgaagagctaaaatctctcaaagattgatttgctacaggagatttgatttaaaatctcctctgtcaaaacaatcgttactgaggaaattaatatgtcccaagcaatcaaaaacgtactgaactcttttgcttatgataaagtatctgcaatgctggaagaaggacgttgtgtaactccgtctttgcttgatcagtgggaagttgagcttcacggtacgatgaaagaagaaggtcaaaaaattggtaaagctcgcatccgtgaattagttgttgcttatcttctgtctgaatttggcatcaaagcctttggtgtagaaccaatcactccgggtatcggtgaaatttctgaaagcactattcgcaagatgaagaatcaacgtaagaaaggcttccgcgatgttaaagcggttaaggcggcgaaatgatttcatatatcgtgtgcgcatctattcctaccggtgtatggcatagaaggattaagtatatccgggctcattctgagcctgacattagtcaagctaaacggatactcgcaaatcaatgggatgaagatactagcgtaattatcagagtatttccaattgattcatccactctagacagccaacttccatctccgtcagagatgtggcaagaagggttaaacgagcaggaactgcgagagtatcttgatgcgtaaggttattctatacacagaaatttttactaaccgttgggtatttgatagtattttgcttgctgataccaagtttgccgatgatattggcagagctagaaaactggcgtatgaattggcagaaaaatccccaacatttgtacgtatttcatacattataacaacttctgattatgtgtataaagtatcaaaagaagcattatacagattttgtaatgttatgatttcttctggaaaggcattaaactataatcaattggtggaaattctaaatgactgaagaacaaattgtagaagttggtttgcttggatggttcatatctaaaacgcctgatggcagaaacaatattgaaactcctaacggagaattcattattgaagaagattttgatgcgttttggatttatgaacgttctggagagaatgaatacacatccgtggatgctttctctaaatttgaagacgctattgatacggtgaaagcatggctaaaataaaccaaattatgattgtggtagaaggcattggcggatttactatagattcttatatgggtgtttggtttgacaatgaagagggcatgtattgggaaacgcatgcctctatgttaaatgaaactcattatgaaagtttatactcttcattcatggaaatgatgcatgaagtagatgaatctgattggtttgaacttagtttggttgagttcaaacgtatcatggaacagctgttccaatgctatcgcattatgaagggtgaactatgaaaatccagctgactcttacccatgaaaatatcaatggtgtgttttgtcttgaaaatagccaaattacttttgcacaagatggaacgtactggtatgcagaatcagatgatatcgctggttatggaatggagcgggtgtttgaagattttgaagccgttattgatgttccgctaaatttcacatataacgatttttatcgtatcatgatgaaattaattgcatgcgctgaattgattaagtaatgctttaatcctctcgcttcccaaatttgatataatagatattattaattgaagcgaagaggcaatatgagtaattatgtaaataacaaggaactgtataaatcaatctgtgcatggaaagagaagtgccgggagtctgaagctgctggcggccctcgagtagtaaaacagaacgatacgatcggccttgctattatgctgatcgcggaaggtctgagtaagcgtttcaacttttcaggatacacccaatcctggaagcaagaaatgatttcagacgggattgaagccgcaattaaaggcttaatcaacttcgatgaaactaagtatgataacccgcatgcgtatataacccaagcttgtttcaatgcattcgttcagcgtatcaaaaaagaacgcaaagaaatggcaaagaaatacagctattttgtccataacgtgtatgattcacgggacgatgatatggttgcgttagcagatgaaacctttattcaggacatctacgataaaatgacgcagtatgaatccaccgcttataaggcgccagggtctgctaaaaagagcgaacctacaagcgatggacctaatctggaatttttatatgaggctgaagattaacctcgacgggtttttagaagatgtgcaagacctagacgctatcccttatttgctaaagatgtatttaagggaggtgcttgatcttgatattcacattgacccgaaaaatccacatgacgctgatttcaggtcagattctgctataattgaacatagttataattggactgatactgaattcacatttgaaataaattaccatccaaaggaataacatgaacaatattacccaggaagagcgcgacgagctgcaacagaaactaatggaagcggcagaagaacaagctattgctcgagccaacaaagttgttcgtaaaaaccgtcgtgaacttgagcgattacgagctcatgctggagacgcggtattagacaataatttccctgcttacaagtatgctattgaaaaactgcgtactattttaaaacaaccttttaatgatgagattattctgacttgttggaatacctctcgtaaatctgtttgggacattctaaatgctggtacaagtaaaatttaaacgtgttcgtaaagacgcaggatttactttaaacactgcgactggtacgatggcagtaaaggtagcagataatcaatatcgcgtgttaggctctaccgaaggatgtaagctaattgataagaactctcttgtctgggttgacaccttccaagttaaacggtggtatgaatggtaaatgaagagaactggggattcattgatttagatgaacaccctgattttattactagtgaagagaattgggatgtatgacgaatttgatgggttctaatcctggacatgattggccggaaggaaattacacgtgccggtgcagtaattgttcagaacgttatacaggaccaaagcgtagttacttctgttataaatgtgatactgctcggagagaagcacctgctcccgattatgaagcgattcataatgctaaggtagatatgcttagacgctttgaagaagctaagcgtatatgtgaagcagtgggttatgttgtatacaagaaaatttaaagggcttcggcccttttgctttattacgggaatggtaaaatatccaaaattaacaacaaaggtcaatatatgaagattaatattttaatggctcgcggacttgagggatgcggcgtaaccaagttcagtctcgagcaccgtgagtggttagtaaaacatggccatgaagtaaatatcatttacgctaaagataaagcgtttactcgtaatagagcacatagctataaagatgtaactattcctgtgtctcttgcagatgactatgataagactttatctctgcttaacgcatgtgacattcttatcattaactcagtacctgctatcaatgctccagaagcagcgattgataactataagaagctcatagagaacattaaacctgaagttagggtagtcgtatatcaacatgaccatagagcattgtcacttcgtagaaatgctggtcttgaagaaaccgttaagcgtgctgatgtactgtttagtcatagctcaaacggcgattttaataccgtgctaatggaagaatattttccaagcggcgggttgagtttctttgatgattctgactcagctcctccggtttataactttcaacctgctatgaacatcaaagcaattcgtgataagtattggaaagacttctctgctattgattttgatattcatcgttggattggtcgtactactacgtggaaaggctatttcttgatgtttgactttcatgaaagtcatctgcgccccgcaggcaaaacgactatcttggaagggttagaacgcagtcctgcatttattaacatcaaagaacgctatgaaattgattattgccgtcattatcatcaggttaaaactggaccaggtctgaatcctcaagttcttgaccgatatgttaactctgaaatgcttgagcgtatgtctcagtctggatttggttatcagctgtcacgtcttccagataaattccttgagcgttcgctggaatacacgcatttagaactaggcgcttgtggaactattcctgtgttccataaagctactggtgatgctttgaaattccgggttgatggaaagccgttgacttctcatgattctggcattctgtggttgaatgatgaaaataaaaatgaagtctttgaacgaatgaaacatctgtcatctgaccagaagctctatgataaagagcgaaataaagcatttgaattcctggtagaacaccaagattctgagcattgctttaaagaacaatttgagttaatgacaaaataagtaatgggccttcgggccctttttgctattcatggaataatataaaattaaactctactagagaggttatatgaaaattattcactcaggcgattggcatttaggtgtccgcgcagatgacccgtgggtacaggatgtacaacgacacggaattaagcagcatattgattatgccaaaaagcatggaattaaaactatcattcaatacggtgatatttttgacgttcgtaaagctatcactcataagacaatggaattcgctcgtgaaattgcggagtctcttgagaaagaaggaattaacttaattacgatcgtcggaaatcatgacatgcactacaagaatacgttgacgcctaatgcatcaaccgaagttcttggtaagtataagcatattactgttattgaaaagcccgtgactatggattttgatgggactttgattgacttgtgtccatggatgtgtgaagagaacacatcagaaatcatgaagcatatcaaagaatcgtctgctgaatactgtattggtcactgggagcttaatggcttttatttttataaaggaatgaagtctcatgggctggaaccagatttcctcaaaaagtacaaacaagtatggtctgggcacttccataccatatcaagcgcagcaaacgttaagtacatcggaacgccttggacgcttacagcgggtgacgagaacgacccacgtggcttctgggttcaagacactgaattatcaacctttgatttcgtccctaatgaaatcacttggcatagaaaactgatttatcctgttactggaaaaattgactttgaagagtttcgtaatctcgcagtacgcattattatcactgcggtcgatgaagaccttcctaagtttgaatcagaacttgaaaaggtagtacatgaattaagaactgtttctaaagttgacaactcggttgagtctgaagatggcgaagaagtagaagttaaaagcttattggatttaatggaagaatatatccaagcacttgaagacctatccgcagatgatatcaaagccttaaaggttatgtctaaacagttatacattgaggcacaaaatcagtgaagacttttaaactaaatcgtgtcaagtataagaatataatgtcagttggccaagcggccattgacattcaacttgataaatgccaaaagaccttaatcacaggtaagaatggtggtggcaaaagtactatgcttgaagctattacttttgccttatttggtaaaccattccgtgatattaagaaaggtcaattaattaactcattcaataagaaggactctgtagtagaactgtggatggagtatgatggtcatagtttctacattaaacgtggacaaaaaccgaatgtctttgagattttacgagatggcaataagcttgatgaagccgcaagttcaaaggattttcaatcctactttgaaagtctcatcggcatgtcatacacatcgtttaagcagattgtcgtattaggaacggcaggatatactccgttcatggggttatcaactgctaatagacgaaagctcgttgaagatttgcttgaagtgtctcttttggctgatatggacaaactgaacaagacacagataagagaaatcaatcagcaaatccaggttaatgatgttcagcgtgaagcattgactaatgaaattaaaactcatcatgagtatgcagaaaagcagaagaaactttctggtgataacgtagctcgcctgcaggcgatgtatgatgagcaggtgaaagaggcacgaggatataaagcagaattagaaactcttcaaagcgaactgcttgaactcgtgattggtgatgacccagcagagtcaattcaagaagttcaaggtaaaatctttaagattcgttctaaaattgaatcatactcaaaggttcttgggttgtatgataaaggcggtcattgcccaacgtgcttgcaggatttgcattctaatgacactctaatcactaagattaatcatcatgttgaagaatgtaataccattcttggcgagttaaagacgcgccagagtgaactggatgaactagctcgcgagtataatactattcgtacgcgtgcaagagacatcaaaaatcaaatgagtaatttgaaacagatgactttaactgcagttgataaagcacgtcgtattaaagcagcaattgataaagcatcacaggagttcattgataactctgacaagattgaactgctacaagaagaattagataaaattattctcgtcaaaactaatttggttatggaaaaatatcgtcgtggtattttaactgaaatgctgaaagactccggtattaaaggagctatcatcaagaagtacatcccgatgttcaataagcaaattaacagctacctaaaaattatggaagctgattattcgttcacgttgaacgaagagttctctgaaacgattaaatctcgcggacgagaagagtttagttatgcctcgtttagtcaaggtgaaaaagccagaattgatatagcattactattcacgtggcgtgatattgctgaaaaagtttctggtgttaaaataaactgtttgttccttgatgaagtctacgattcggctaccgacgcagaaggtgttaaggcaataactgctattcttaataagatggtagatgccaatgtgtttattatttctcaccgtgaccacgacccgcaggcatatggccaacaccttcaaatgaagaaggtcggacgattcacggtgatggaatgaatgagtttactacgggtcaacatctgttggcctttcctgaagtaaagcgatatgtgttaactaatttgttttctgatgaaaaacacttagtaacagaagaaatgttacgagatgcttttacaggaaatgaatataatagagtcatgtccagcaggaatcccggttggatggttgaagattattacgattaaggtaaatataatgattaattttgttgatgtgaaagatatccaggttaaaaacgtacgtgcagattccaacccgaataaccaaaatcgtattcgtaagtcttgggttctggctctaactgaagaaactaaagcagctattaaagataagattaaagattctgaagctcgctttgctttctataaatctattgacgacgaagttgcagaaaaatggattgaattgatgcgtaagcattacaacgaatcaatcaaggctggtgctaaaattgttactgaccgtcatggtggcgaacgtctagaaaatgattactgcgtagatgctgatgagcaactcgttgcggcaggtcagattgttgcagaagaattaactgctacattcgcagcttgatataattatcctgaacttaattaaaaggtattgaaatgaaattctctaaagaaactctgaacattctgaaaaacttctccaccatcaactccggtatcatgctgaaacctggcaattttatcatgactcgtgctgttaatggtacgacttatgctgaagccacaatctctgatactatcgatactgatgtagcaatttatgacctgaacagtttcctgagcattctgtctctggttggtgatgatgcagatattatcatgcaggaagatggtaacctggcaattaaagatgctcgctcaactatcttctggccagcagctgacccgagcacaatcgtgttcccgactaaaccaatcccattcccggtggcaaacgtaattatcgattttaaaggtgaagacctgcaacagctgatgcgagtatctcgtggcatgcagattgacacaattgctatcaccaatgttgatggtaaaattgttctgcgcggttataacaaagtagaagatgctgcactgacccgtccgaagtattccctgaccctcggtgattatgatggcgaaggtaactttaactttatcatcaacatgagcaatatgaagatgactgttggtgattacaagctgatgctgtgggcaaaaatgaacggttccaagaaacagactgcagcaaaatttgaaggtgcatcagcctcttatgtggtagcaatggaagcagatagtacctttgactttgagtaataacttcggggcttcggccccatctttaatctgaatgaggaaatataaatgaaattgacagtaaacgaagcagactttatgtgggaacagaaatatcgtccaggtactatttctgagtgtgtattgcctgctgaagataaagaaattttttcggctttagtagctaaaggaaaaattcctcatttaattctccatagtacttctcctggcaccggtaagaccacagtagctaaagcattatgtaatgacattaatgctgaaatgatgttcgtgaatggttctgattgtaaaattgatttcgttcgtggaccgttaactgcattcgcaagttctgcatccattgcaggcaagcagaaaattatcgtgattgacgaatttgatcgtgcaggtcttgcagaatctcaacgacatctgcgttcattcatggaagcgtatagcacaaactgtactattatcattactgcaaacaaccttgatggtatcattaaacctcttcagtctcgttgccgtgtaattaattttggtaaaccatctccatctgatgttaagccaatgcaaatcgagatgctcaagcgttgtctcgcaatttgtgaaaatgaaggcgtggtggttgaagataagaaagttgtagctgctttggtcaaaaagaattttccagaattccgtaagaccattaacatgcttgatcattattcttctaagggtgtgattgatgcaggtatcttgtctatcgttctgaatgaccgtggttcaattgaagatgtcatcgaagctattaaaactaagaacatcaaagaactccgtgctcttgctccaaaatatgcagcagactatacttggtttgtagataaactttcttctgagctgtatacaatggttactggcccaagcattatcagaatgtatgaaatcatcggtgaaaataaccagtatcatggcatagcagcttcgattgaattacatttggtttatatgcttattcaacttgttgtagagatgcagtggaaatgatgagtttatttgaagatgatgatcagtataatgagcaccaaatagcttggttaggtaaagactggacgaaagtccaggaattatctgattcatataaagaaaaagcagaaaatcaattcttcacaattattgggtctattaacgaaaagcaagagcatttgaatatctcgacgatggattattcaaaattcatggttgaaaacgctctttctcagcacgctgactgtatgcctgcggtttatgttatgaaccttgttggtcaagggttatctgaccaagcacactataactatatgatggcctctgttcctagaggtcgtcggtatggtaaatgggctaagttaacagaaaacatccaggatgcattgattcttcaagttataatgacatattacaaggtcaatgcgattgatgctaggatgtatagagagaccctggaagctaaaaacaagcttaaacctgctctcaagaaaatgaaaggtcttgtgactgatgaattggtcaagacaatcacgaaaaacgtgaaagaacagaaaaatcttaagaaaacagcattggaatggtaaagatgattgaaattacactgaaacagcctgaagacttcctgaaagttaaagaaactctgacccgtatgggaattgctaataacaaagataaggtactatatcaaagctgccacattcttcagaaacagggtcgttactatatcgtccattttaaagagatgttaaagcttgatggtcgccctgttactattgacttagaagatgaaattcgtcgagactcaatcgcacaactgctctctgactggggtctactgagtattaatcgtggtcaaactcttgcacagatgcagaataacttccgagtaattacattcaaacagaaacatgaatggactttaaaatctaagtacacaatcggtgcgtaagaaaagggcttcggcccttttactttataaaaatcggagtataattatcccacctaaagactaataactcggtctataaacaaaggaaacccatgaaagaattttatatcagcgttgaaactctaggcaatgacattgtagaacgttatatcgattctactggtgaggaacgcatgcgtcgtgttccgtattctcctgttatgtttagtcattgcatggaagaaacaaagtacaaagacatctatggcaagtattgcaagaagaatacattcccaactatgaaagatgcacgcgattggatgcgtcgtatggaagatatgggaatggaagcaatgggtatggatgatttcaaacttgcttatatcagtgatacttacggttcagaaatcgtctataataaaaaattcatccgaattgcaaactgtgacattgaggttactgcatctcaattcccagacccgatgaaagcagaatatgaaattgatgctatcacccattacgattcggttgatgataagttctacgtatttgatttactgcattctctttatggttctgtttccgagtgggacaagaaactcgctgctcgtttagattccgaaggcggtgatgaagttccacaacatattcttgatcgtgtggtgtatatgccattcaattcagaaaaagaaatgatgcttgagtacatcaatctttgggaacagaaatgcccagcaatctttactggctggaacattgaaggatttgatattccgtacatcatgaatcgtgtgaaacagattcttggtgagcgtgcgatgaaacggttctctcctctgaataaagtttcatctaagattatcacaaacatgtatggtgataaagaaatttattctatcatgggtgtgactattcttgattacatggatttgtataagaagtttagtttcacgaaccaaccgacgtataagttggatttcattgcttattatgaaaccaagaaaggtaaattagcatatgacggtccaatcaataaattgcgtgaaactaaccaccaacggtatatttcgtataacatcatcgacgttgaatcagtacaagcgattgatgctgttcgcggatttattgacctggctatctcgatgtcttattatgcgaagatgccgtatcaaggtgtaatgagtccgattaaaacatgggacgcaatcatctttaacagtctgaaagaacaggacaaggttattccgcaaagtcgttctcatgttaaacagtcatatcctggtgcgtatgttaaggaaccagttcctgctgcatatcgttatatcatgtcgtttgacttgacatctctgtatccgtcaatcatccgacaagttaatatttcaccagaaaccatcgttggacagtttaaacttcatccattgggtgagtacattaacaagactgcaccacgtccgtctgacgaatattcatgttcacccaatggttggatgtatcgtaaagatgtagatggtgtcattccagttgaaatcgcgaaggtattttatcagcgtaaagagtggaaaaataaaatgatgggtgccaaacgaaatcaagaactgattaaaaaggttctgaatgataagaagtttggaactatcgataaattcgcagaagttaatgtctatgaagatttctctgatgatatgaaagcagaactgctgacatataccgaagagtgccttgacaaactgatgtttgaatgtaaacatgctgaaatcttgggtaatactaatcagttaaaccgtaagattctgatcaactcactttatggtgcattgggtaacatttacttccgttattatgatttgcgtaacgcatcagcaatcacgttgtttggtcaaatggcaattcaatggattgaacgtaaagttaatgaatatctcaacaaggtatgtggtactgaaggacattcgtttgtagtagctggtgatactgactcaatttacgtttgtgttgataaggttatcgagaaggtaggtcttgagcgtttcaaagaaactaacgatttggtcgaattcctgaaccaattcggcaagaagaaaatggaaccttggattgaccaatcatatcgtgagatgtgtgaatacatgaacaataaagaacatttaatgttcatggaccgtgaagctatttcttgtcctccgttggggtcaaacggcattggcggattctggaaagcgaagaaacgatatgctctgaatgtgtatgatatggaaggtactcgatatgcagaaccgcatctgaaaatcatgggtatggaaactcagcaaagttctacaccaactgctgttcagaatgcgttggaagaatctattcggcgtatgctgcaggaaggtgaagaatctttacagcaatattataagcagtttgagtctgagtatcgtgaacttgactataaagtaatagcagaagttaagaccgccaacaacatcggtaagtatgatgatggtgcaggatatccagataaaggtacgccatatcacgtcaaaggtgctttagcgtataaccgagctaccgcgggctttgaaggtataacaccaatcatggaaggcgagaaggtgatggtcatcccgctgcgtgaaggtaacccgtacggtgagaaatgcatggcatggccatcgggcactgagctgccacaagaaatccgacaggaagttctagtgtggcttgaccacagtgttctgttccaaaaatcgtttgttaaacctctgacgggtatgtctgaagcggcagggttagactatgaagagaaatcgtctcttcttgacatgttcgatttttaaaaaagttgtttactttgccacaaggatgtggtaccattgttctcgaaataacatactgaggagattacaatgaaatcgttacttgctgttatcgttgctctcacgctgactggttgtcaaatgccacaaggtgatatcgtcccggcttcttctgttggacaggtgcgagcaattggcggtactgtaggatactatcgtgctagcaaccaggtctctgctgaatcgctcgcggttgagcgtcggttggcgaaagaaaaagctaatcctaatcgtcagctatctgcgatggaactcgacatgattgagcagaataagcatgagctggaagaaattaagcgtctgcgtaaaactcaaaaagaacgtacatgcactgctcaagcggcagcagtgaatgaccagattcgtttaactgattttgctaacggcggattgagttataatgagcataaacaacgtatggagcagttaaaatctctccaaaatcacatctacaacaaatgcatgtctaactgaggagattaacatggaagcagtatttggtttaatcattcttttcttcatctattttttgccgacctttgtagcttgcagtcgtaagcataaatcacggggtggaatctttatcacaaatctagtattcggttggtccattatcggttggttaattgcgctgatttggtctgcttctaacgcacagcagaatacaattattatccagcaagttaaataagaggtctcatgattgtaactccaatgacagtacaagatatccgtcaagaattcgctgatgctttgctcaacaaagaatttgtgattgataagacgggtgtgaagactattgaaatcgtaggtgcatcatttattgcagatgagcccctgatttttggtgcagttaatgatgggtacattgcccgtgaacttgagtggtataaatctcaaagtttattcgttaaagatattccaggtgaaaccccagctatttggaaagcaattgcatccaaacatggtgagattaattctaactatggctgggcagtttggtcatcacaaaactattcgcagtttgctaactgcgcaaaggaacttatcagtaatcctgattctcgccgcggaattatgatttatacacgacctcaaatgcagtatgattttgagcgcgatggcatgagtgatttcatgtgtactaacaatgttcagtatctgattcgtgataataaagttcatgctgttgtaaacatgcgctctaatgatgtcgtctttggatatcgtaatgactatgcgtggcagctctatgttctggaacagttaaccaaacttctgaatgcatcaggtaaaaattattcagttggtgacattatttggaacgtcgggtctttgcacgtgtatgagcgtcatttctatcttgtagataactatgcttatactggtgaaactcatattgcaaagaaagactataaaggtgagtggaaatgattcagtttgtaattccaagttataagcgtgccggggcagttactgccctgactatgtttcctgaaggttatgttccgcatcttgtagtacgtgaatcagaaaaagaagcatacgaaacttggcacggtcatgctgctaaaatcgttactgtccccgatgatgttgatggaattgcaggaactcgccgtctgattactgaaatgtatgcaggacaacgaatttggatgcttgatgatgatacgaccattcatctgactgaaattcgtgaacgcgacgatcgccgtgttccacttggtgccggcgaggcaatgagtcaagaggtatttgatgatatggtcaaatacgtagagactgctatggattgtggttattatcacggtcatgctcgcttgccgattttcaaaatcacatcaagctggggtcattatcgcgagaatagttttgggttcaccaatactttctatgatttgactaaacttaccgcagaagatattggttacggagttattgaccttaacgaagatgcttatgcttttctaaaattaattaacatgggtcatcctcatctggctctgtttaagtatctcgttaaatccggcaaagtgcagtctcctggtggttgttctacacagcgtgatactgctcgtcagaatagagcccttgaacagctacatgctgctttcccaaatcaagcccgttggaaatctaaagacggcgaaagacgtgggttattcggtgataatgaacctctgaaatcaattcgtatgtgtattaacactcgagtgaaatctcaggccttccatgaatttggtaaggtagaaccatatctgtgagggcgaaagccctccaaggacctcttatgaacatctatgataaatctgacgtagctggtaatatattcaaggctgaagaattcagatgcttcgtatgtaaatctgatgagtttgttcatgaaggaactactggctcagatggaatgcattgctggtggcatggcatgtgcgttggatgtaaaatacactatgaaatagatatggaaacagtggtttataacaccaagaagaaatggaacttctgataatagcttcaagaacaaagtaatataattactctatcctttaacctgtgagaaaaatataatggagacttatggaatataatgaatgtctgacttaaaatctcgcctgattaaagcatccacttctaaaatgacagcagaactgactaaatcaaaattctttaacgagaaagatgtagttagaactaaaattccgatgcttaatatcgcaatcagtggagcgttggatggtggtatgcagtccgggttgactatcttcgcaggtccatctaaacacttcaaatctaacatgtctctgacaatggttagtgcttatcttaataagtatcctgatgcagtctgtttgttctatgattcagaatttggtatcactccagcttatctgaaatctatgggtgttgaccctgaccgcgtaattcatacaccggttcagtcggttgaacaattaaaaatcgatatggttaaccagcttgaagctattgagcgtggtgaaaaagtcatcgtgtttatcgactctattggtaacatggcgtctaaaaaggaaaccgaagatgctctgaacgagaaatctgttgcagatatgactcgtgcgaaaagtctgaagtctctcttccgtatcgtaactccttacttctctattaagaacattccttgtgtcgcggttaaccacacaatcgagactatcgagatgttcagtaagacggtaatgactggtggtacaggtcctatgtattctgcggatactgtgttcatcatcggtaaacgtcaaattaaagatggtactgagcttgaaggatatcagtttgtcctgaacgctgagaaatcgcgtactgtcaaagagaaaagtaagttcttcatcgatgttaaattcgatggcggtatcgatccatacagtggtctgcttgatatggctctggatatcggatttgtggttaaaccgaaaaacggatggtatgcacgagaattcctggatgttgaaaccggtgagatgattcgtgaagaaaaatcctggcgggcaaaagatacgagcagtacggaattttggggtcctctgtttaagcatgagccattccgtgacgctatcaaagcccgttatcagttgggtgctattgattcaaacgctgcggttgatgaagcggtagcagaaatgattaactcaaaagtttcaactaaggttgatggtgttaaacttcctgagagtggttcagtatcagctgctgaagttgaagatgaattagagaacttcatgaatgaagactgagtttgatttagaatctgaactcgagaaatttgaacaagaatctccctcggaagagggagacttcgagcgtcaagaacgagtgttcaagaaaagccatgaaataatccaagaagctatgaagactgttatccaagaaattgtgataaaattaaatggtcaatcacacttggtttatgttcataaattaaatatttctccttcgggggaagtaactattgagttcagtacaccatctgaagctcataaggatgaactttatcctcatgtggaagcttgtgttaaacaacaaatccagagtgcattaaagaccaagaaaaaatcattatggaaaatcttttaagaggttaaagtggtagaaacaatcttagctaatctgatttacaaccaggctttctttacgaaggtttggccatatatggacaaagagtacttcgagcaaggacctgctcagacggtgtttaacataattaagaaacacgttaatgaatacacagcaattccttcaaagactgcgttatgtgtagcactggataattcgtctataactgaaacggaacatgaaggcgcaaagaaacttattgataagttatctgatgctcctgaagatttgaattggttagttaaggaaactgaaaagtacgttcaagaaaaggctatgtataacgctacgtctcgaattattgaaattcaggctaatgcccagcttgagccaaataagcgagataagcgtcttcctgatatgggagctattcctgatatcatgcgcgaagcgttatcagtatcgtttgatagctatattggtcatgattggatggaagattatgaagctcgttggttatcataccagaataaagctcgtaaagttccgtttaaacttagcattctgaacaaaattactaaaggtggtgccgagactggtacgctgaacgtattgatggctggcgtcaacgttggtaaatcgttaggattgtgttcattggctgcagactatcttcagatggggcataatgtcctttatatttccatggaaatggccgaagaagtttgtgctaaacgcattgacgctaatttgcttgatgtatcacttgacgatattgatgatggctgtgtatcatacgccgaatataaaggcaaaatggaaaaatggcgtagttctagtactcttggtcgtttaatcattaaacagtatccgactggcggtgctaacgctaatacattccgagctcttctgaatgagttgaaactcaagaagaactttaaaccgactgttatcatcattgactatcttggtatttgtgcttcttgccgtattcgtcaatatactgaaaacagttacacgttagttaaagctattgcagaagaacttcgtgcattggctgtagaatctgaaactgttctttggaccgcagctcaggtaggtcgttcagcgtgggatgcttctgatatggacatgagtgatattgcagaatctgctggtctacctgctacagcagactttatgttggctgtgattgaaacccctgaacttgctcagatgaagcaacaattaattaagcagattaaatcacgttacggtgataagaacatcaacaataagttctctatgggtgtacataaggctaatcagcgttgggtagaaattgagcagcaaaacgacccaactaagcctaatccaagcaataccgtccgagaaggtgccggtgcacagaaccgtgtagccgaatctaatcgtcaagaacgagtatcacgttctaagcttgatgctctggcagaagagttaaaattctaaggaattctatgatttttgtgtttagcgcggtccgtgaccagtcaggtcactcttttgttgtaacagccacagataccattcatcgaggcattgaggcatataacaaagcagacctatctgtatgcgactatggagaggtcaaggtgtataacagcgatggcatctgggttaactctgctacatacctacctaccaagaatctgacctctgacattttgttgaaaaaattgttcaaaaggtagtttactttctccaaaggccatgatactatggccttactgaaacaaaacgagtagaggaaaacatcatgtggacaattgaaaaagcattagacgtagtctttaagagtaaagatgaatcagcggaaactgtaccgcattgcggtatggtagttggaagcaaagtagttaaatctccacatgctaatctgcgttgtgatggcgtagtacgaaaagcattagatgaaggcgatacagttttagtagttgttgagccattcaaaaacactgatggcaatgtgtcaatgttagtatacgcaaacggtgattatcgcctgatttctgctcttaacgtacaagctgcttgaggaaaccaaaatgaaaaagattgtacttgctttagtgttcgcagtatcaagttgctctgcagttcctgccatggccaactatgacaaagacttatgcgagtggtcaatgactgctgatgagtctgaagtagctcagcagattcgtgcagatgttggtcatattgtggaaaacgtagacccgagcaaacaaacagaagtgcaagcagaacttaaagacgacggcgcagcacttaagttgaattatgttctttactgtgatgcccagtttgataacttcaacatcgttaagtggattttaggatgattacatacgttttaataatggcgctatctacgggttcaggtggaatgtctactgaaaagatggcattcactggtaaagatgaagccgtgattaagcaaaagtgtgaagatacaggcaagcagtttatgcttatcaaagacaatccaaaatcaatgtctccgacgctgtatcctacatataaatgcttacgtattacgcatgaataaatagtaggaggctctatgaaaacatacaaagagtttgttactgagatggtcgcaggtgatgcgggcggcaatccacagaatattgcatcaggtacaacttccggggacatcgtcaataaaggacccgaaactcttccaaagaaacgaaaagcggataaagacgctgccaagaaaaagtgataaaatggccttattagtttaaggccagaggaaatattatgtcttgggttgataacgagtatgcaattcgcgcaatatctcacctacctaaatttagacacgttactacatcttcaacattcaagttaaactgccgttgcccaatttgtggtgactcacagaaagatatcaataaagcacgattctggatttttgatgcaggtcaaggattacgctgtcattgcttcaactgtgagtataataagtggctatcgcagtatcttaaagataatgaacccgacctctatcgagagtatcttcttgagaaaagaaaggagcaggtctttgataagccaaaggctgtagaaccgtctgagaaaattaatgcaaaactccccgtaatagaaaaacttaatttctgcgagcgattagatagacttcctaaggaacatccgatagttaaatacgtgactgccagatgtattccaagcacttcttggaaaaggttatggtttactaaccaatggccttctcttgttaactccgttaatccaggaacctataagaatgagacgaacgaaccacgtttggttattcctatcttcaacaagaaaggagagattgagtcgtttcaaggacgagcactacgaaagaatgctccacaaaaatacatcacaatcaaagcccacgaacacgcgaccaaaatttatggtctcgacactattgatgagtcaaaactcgtattcgtcatggaaggaccaatagattcgctgttcattgataatgctattgcaattaccggtgggtctttagatttagctcaagttccatgtcatgataaccgagcatggattatggaccatgaacctcgtcatcctgatacgattaagcgtatgaagcgtttagtagacgcgggtgaaaaggtagttttctgggataagtcgccttggaaaagcaaagatataaatgatatgattatgaaagagggggcaactgcttctgaaataacggattatattaatcaaaatatatcgcaaggtttaatggctaaattgcgccttgacaaatacgcgaagatataggggccaaagccccttaaattaaagcaatcctccggtcataataaacgacacaactttttctaacggcattggaggaagaactagaccgtgtgtgctagctaatggaactaccacataattccatgcagctaaagcagcagtggcgattccgacgtaaagatatcttccaaatcctcctttgtctttacattcttgtttcacttcagacatgaatcctcctgctatttatgttaagtgatataatatttatctaattgaaaggatatctgtgaattaccaaaaaatttactcagctttagttacaaaggctaaatgccggcatcttgatggatataaagaacgccatcatataattcctagatgtatgggaggagcagatgacaaaaacaatcttgttgagttaactgcgcgcgagcattttatagctcatagattattaactaaaatatatccaaatgtgaaaggattgcattatgctgtaaatttaatgcgatataataaaggtgttaaattaacaagtagattaatagaaacccttaaaatccaaaactctgttcttttctcgggtgaaaataatccaaggtttggaaagccatcatggataaaagggttaaaaacaccagaagaaactaaggctaaaatgcgagcttctcacaaaggcaaagttatttcggaagaagctaaagctaacatgagcaatgctcgtattggaaggtttagtggtaaaaattctcctagatacggtttaccgaatccaagacgtggtgagatatggaactcgtatgattcgctttacgagttgtgggtttataataatagacctaagcgcacaaaatttaataaaatagctgtcaaggcaggttatcctaatatctgctatagacgtatgatagaaaacttcataagaaaggaaaaataacatgccacatttcaacgaatgtagtcaactgatcgctggtgcagataaagctgaagcccgatacgcaggtatcgtacgcaaagttggtggtgaccctctgcaagtaatgcttgatatgcaaaaatctcttcaggttcgtcttgcaaatgacaagcctggtactaacatgcatcctgatgaattggctcaagctggtgatatcgtacagtggctgcgtaatcaaaaagattacattgatgacgaattccgcgaattgctgacgtctcttggcggtatgagtaacggtgaaaaggcagctagtgctgtgtggaaaccatggaaagctgaccacgtcaagatgcaggaaacttatatcaaagacctgtctgataaagaccagcttgaaatcaaatttgaaatgattgatatcctgcactttgttctgaatatgtttatggcgcttggtctggattctgaagaaatctttaagctgtattatctgaaaaacgccgagaactttgctcgtcaagacagtggttactgatggctaaaagaatatctaagcgtcgtttaaaaattatcagaaaacaaaaagaacgggccttagtattggcccttcgagaagaaatcactcgagaaattgataaagaaatattaaagacgcttacagcagctatataaatactcctgtaaactaaataggagattaaaatggcttacgtaaatatcaaaacttttgaccataccactgctgatggcgaggttaaaggtactgaagtatctgtagcttttaaggtatattctgactcacatcgcattgctaatgcacagtatcagattttcccatccgaaaaagccgcttattcaacagtagttgatgatgctgcaacttgggcaaccaccaacgcgaaaatgtttgaagctgttccatctgatgcagaagtataaaaattaaggactccttcgggagtccttttatgctatattgggaatagtatattattcctactaactgaggagaacaaaatgatatgttatactaagccctggtatcaatcaccattaaagaagtctcattttgattgttggtacagaggtgtaagagctgcagcgttattactaaaagctgcgcctgctttaattaaagcaaatgataagtggtttgaagacaacaacatgactgaaggagctatgtgtggccgacgcaaaaatctataaagtaagtttacagcgcaaactaaaagaaggttttgattctgataaagtattcactgtagcaatttacaattattcttatgacgagtttaaagaactggtcaataaatttgaagcacgcgggtggtgtcctaatagtaaatatggacttgtcaaaacagcccatacttttgatgtttcacacatgccaggaagtccaattaatattttaggtgctttacaccttaaaggatataccaatgcatatcatgagaccgatctgtttgaatatgcaaatgataaaatcgttaacggcaaaagtatcgtcattgacaatgaagacgcttttatagtatttactcagttagtatggtcatttatgcaagctgatttcgccagatttactccgagcgatttgcttcaaaaagctgctgatgcatataataatagtaacagtcaatatcgtcggatggagtggttcatgtgatggatttgtttgaaatgatggaagagcctcaggaagaggttcaggttcatccagtgatttctaaggacatcaaagacgaataccgtataattatacagaagtatggtattaaagccccagaagctcttctagatgaactagcttcaatctggtctgacccgccgccctggtctccgtgggcaaaataatttcacaaagtagtttactcttctaaaaagccatgatatgatacctctcgtaaccaaaaatggagaatatcatggctatttcattaaacccatctatttcagtaaaattatcaaaggttattcctatcgaagaacccattcgctccattgatgttcttaacttcgcgcgagaaagcaaaggattacctttatatgatttaagcgtatgggaagcattagccaatcgttttgactgcaaagaacagtcaattctgtggcagtgcatgaacaataagattggcgaagaatttcataagaaacttgactctatcgttagacgtcatcaaattgataacagtgacattctctatagaggtctatcatgccgcgaggctaaagccttttatgacgctcttattaaaggagagaaatttgacttcggaaaggtagcatcattcacaacagatgaaacgattgcccgagaatttgcaggcaaatggcattactcgacctttgtagtcattgaagtcaataattgtcagcaatcatttgattatcataccaacatgaaatcgcttttaattactgcaccagattctgaattcatgcgaccaaatgatgtgattgataacattgctcagcgcagaagcgctgacatcgagatgattgataaagaacaagaaaggatgctaccgatgggaactaagttcaaagtggtgggtcataacaaagttgaaaaatctggtttacttatggactactttagtgttactatagcttagtcaactagtgattatctagaactagggacctagacccattataccgtccgtaagacgaaagcatttttgaggaaaacatgatgaaatttactgctgaaaccgctaaagtttatactcgtttaattacaactttaggttctgctcaacgtcggcacaaggagttcaatctcaccccagaatatctgtttaacatcatgcagcagacacattgcgcatactcaggcgaaaagtttggaactgttaaaggaaatcatcctgatagcatgacgctcgagcgttggaataatgacttgggttatgtaatggggaatgttattcctgttaagcaaaagtattatacttttgcgcggaaataatacgattgaaggccttgaacgaaaagcgaatgaaatcgcagcacgcatagttcgttcttcagattctgttaagccaacaagtgataaagaagcttctcgtttggaaaagattcgtgagtatgaaaaaactataacatcaattaaaactaacttacgtaatcgcgaaaatcatctttctcaatttgtgcaaaaagaaaagaatggaactgcaacctcggcagatttagaacttattaatgcattgagaactcgtatcagtggtggtaagtctgaattagctaaagttgagcgtaagttatctgctattttagcgtcagttccgaatcgtccgtcagatgctgaaatccgtgtacaatcaatacggctaattgttagctcacttcgtcggttagaaaaatgctcaatgctagataagttaaaattgaaaaaaggtcttccattgactgcgtccttcttccaacttttgagaggtaaaatgtaatgcaacactatggatatgtagtagcgtataaggataaagacggatttgaccatccagtcacaactgatatgtacgatggagaacgatgtgtggtcttcactaatgaagaatcggctaataaagcacggattcgtacaatgtcggttttaacagacaaattagcaaaagggaattttactggaaaaagcaaaaccaaaggaatgctttggtggaaaacaactgagctagtgtatgaaccacttagcgatgttgagcgcgaaaaactcaaagcaaaaattaaaaatctacatgtagtgagggtaaaagtggcatgattacgtttgaccaattaaaagaaagtcaaaaagcgatttttaataaagtcattgaaatggtcaaacaaggagccaaaggtcaacacattacgattaatggacctgctggtacaggtaaaacaactttaaccaaatttatcattgacgctttgatttctcagggtatctctggcattgcgttggcagcacctacgcatggggccaaaaaggttttatctaagctcagcggaatgcaggccagtactattcatagtcttctgaaaatcaacccgacgacatatgaagaaaacgttctgtttgaacaaaagaaagttccggatatggcatctattcgagttcttatctgtgatgaagcttcaatgtatgaccgtaaactgtttaagattttgatggcaactattcctgcctggtgtattgtcattgccattggtgataaggctcagatacgtccggtagaacctggaagtaatgaacctgcactgagtccattcttcactcataaagatttcttacaacttcatttgaccgaggtgatgcggagtaatgccccaatcattgaagtcgctactgaaatcagaaatggtggatggattcgtgactgtgtagttgatggtcatggagtccgtggttttacaaaaggaactgcccttaaagattttatgctaaattattttaatttagttaaaacaccagaagatttatttgaaaaccgaatgcttgcgttcactaataaatctgtggataaattgaatgaaataatcagacgaagaatatacgaaactgaacgaccattcgtagtaggtgagattgttgttatgcaagaacctcttaccaaggaacttaaatttgaaggaaagaaattcagcgaaattcttttcaataatggtcagtttgttcgcatattagatgcaactgaaaccacgtcatttttaggtgccagaggtgttccaggtgaatatctggttcgtcattgggtattagatattgaaacctatggcgacgatgaagagtacgctagagagaaaatctgtgtcatctcatccgaagaagaaatgaataagtttcaatttttcttggcaaaaactgcagatacatataagaactggaataaaggcggtaaagcaccctggtctgagttctgggatgctaagcgtaagttccataaagtgaaagcattaccggcttcgactttccataaggcccagggcatctcaattgacagaagcttcatttatactccatgcattcacatggcagatgcttctctcgcacagcagttattatatgttggtactactcgtggtcgatatgatgtgttttatgtgtgaggtaatatgtttgaattgaaattagaagaccttcaaacaatgattgttggcttacaagaatctaagtttgaagcaccagacaatgttaagcgtgctattaacattaaaattgatacagttctgaatgagcttcgtgatatagcagataatgctaatgctattacttggttcacaggatatgacccaaaggtgtatctgagcgaatatattggttgccagttacgcgaaattaaatttatgctagaggctcaaaatggctaaagactttattattgattttgaaacattcggaaatgtgtcaagctcttctgtgattgaccttgctctaatcacctttgattctgaccccgaagttttggaaagcttcgatgaattggttaaacgtggtcatcgtattaagtttgaccttaaatcccagaaaggtcatcggttgtttggtaagtctactcttgagtggtggaagaaacaatcagctgaagctcgggctaacctggcctcaacgccagacgatttatcagtaattgctggaattaaagaagctcagcaatatctgattgataatggaattcacccatgggattcctttggctggtgtcgtggacagagctttgactttccgatttttgttgattgtcttcgcgatgttcaacgagcccaaggaatttccgaagaagaaattgatacatttaaagaagagccgtgtaagttctggaatcagcgtgatattcgtaccgcgattgaatcactgcttctgactcgtggtctgacaactacccctcttccaaagggtacgctcgacgggtttatcgcgcatgatagtatccatgactgcgctaaggatattctaatgcttaaatatgctcaacgctatgctctaggcctaagcgaagcaccaagtccagaagataccgatccactgagtttacctaaggggcgtggctaatggaagagtttgagttcgatgaaaacttcgaagagtggttcaaccgggaaatcctcccggaaatctctccaacgatggttctggtggccaaggctatgatggctaagggctgggaagctgggtatctgttcggcgtcgatgttgggtgtgaaatttctcaccgataactatttactttatgaaagagccgttatataatggctctacattaacaaactgagagaaacacgatgaaaggtttagttgtaggtgaaaacgttaaagtaattggtggtaagtgggttggtcacaatggtgtaatcgttaaagtagttaatcgtaatgacggtaaatctgggtataagatttaccgtgaagattttggtgattacatccactgcttgaaaaaattcgttgaatctagtgaaagctatctgcgcaagtgggtacacgtgaattcgctggacaatgttattacccaatcggtgagttctactaattcagccactaatctgtcgctgcataaaaatgttcttgtcactgatgagtgggaagaagacggtaaaactttagtaaatgtagtatttcaaggtaactatgcggttctgcctaaagccgatgtagagccgacggaatcacagcgtcaaggtttagtataaaaagttgtttactttgccacaaggatgtggtactattatcttatcaactactgaggagaataacatgaaaactgaaaacaccgtaaaaattactgccgaagcttttgaagacattctgttcaatcctgacttaattgtcgttcagaaagagaaaaccttcggtaaagaagagcattggacctggttgtatgtattcgcgaaccatggtgatatcgtcccagttcgtacctttgctcgtgtaatcacagttgatggcccagaatacatggagattgtgtaatgaattttaaagaaggcgtacagtacaaattcgtcaatgatgaagcggaagaagaattttcttcacgttatgagtttaatgaagactttgtgtatgaactccatgaaaatggcgggagttttactgttactaaagttgaccaccaaaataacagagtatccggaattacgtgggctaatggcacagaatgtgatgaagttggtggtgaagaccttgtaatttttgatagcgaattcaaatactttactgaagttggaacttccgcgaatgtaattccaaccgatttggttatgaatctttctattcataatcgtggtcaagcaatcgctgctattgcagcactgcagagtgcatatcaatgttaaatttagctcctatttttgaagcatcaaaattatcttatcctattcccaaccgtagcattgggaatgtcatgctgcaactttcttcagaaactggagaaatgtgtgattggattaatcgtccatggcggcagaaagaagaatttgaaggcgagtgcgcagatgttattaactgtgtagtggatgcactttggctgcatttcagaaatcgccataaaaatgatactcatgtatcagatgatgaaatctccatgatggttactcgtgcactgaatgagcaaatcatggtcaaaacacaaaaatggaaggatgctgttaatgccaacgtatgattacaagtgtgaagtctgtggaaaaaagatagaaattatgcgtaaaatttcccatcgtgactatactgttaactgctttaaccctaagtgtgaaggccaaatgaagcgggtggtttctgctccggcagttcactacgatggattaaagagtggtgattattgatgggaactaaagcacgcattaccatgaaacccggagaaatccgggttattaaagtaggtaatataacttatagggttaaattaaaatgaaaaagattttaattacagcgcttgccttcatgatgattggatgcactgacgctgataacgcaactcgcgtgttagataacgcgggatttactgatatcaaaatcactggatataagttcttttcttgctcagaggatgattttcagcacacaggctttacggctattgggccaacaggaaaacctgttaacggaacagtgtgctcagggctttttctcaagaacagcacaattcgttatgaataaatgaccttcgggtcatttagttgtttacatggacatcgtgttttggtattatagtcttgttggccagaggagaacattatgattattgggatgacaactgcacaaaggcgtgctaaacggcaattaaaaatggtagagcgagctattggaaaatacaggtttgcttggtggccaatcaatgacgtgaatggtcgtactatttggatgcagaaatattatgaagtctgtgaagagtggatttcacttaatgaaaacaacgagtaccggattgaacagtactacggaaattctcgatatgcatacgctaacgttagtgatgctcaatggactatgtttgaacgacagcggccacgatatcccgagtataaagcggttaaaggaggccatgaggttcttggtaaattgatgtatatcaaagaagaattacttgctataattaatagttgatataattccttcactaaccgaggaaatgtaatgattaagaacgaaattaaaattctgagtgaccgagaacatatcattaagcgtagcggaatgtacattggtagttctgcgtttgaagcgcatgaccgttttctttttggtaaattccaatcagtaaagtatgttcctggtattatcaaactgattgatgaaatcattgataactctgttgatgaagctattcgtactaatttcaaacacgcgaataagatttcagttgatgtcaaaggcaacaaaattattgtaacagataatggtcgtggtcttccgcaggctcctgtagtaacacctgaaggagaaactattccaggaccagtagctgcatggactcgtcctcgtgcgggtggtaactttggtgatgatgctgagcgtaaaaccggtggtatgaacggtgttggttctgcgttaacgaatattttttctgtgacatttgtgggtgcaacctgtgatggaaaaaatgaaatcgttgtccgctgttcaaatggcgcagagaatgtttcttgggaagaacatccagctaaagataaagaatttattaaagacaagactggtactgtcgtgtcatttatcccagatttcacccactttgaatctgatggcttaactgatgttgaccaatcaatcattcacgatcgtctgatgacgttagcagtagtttatcctgatattgaatttaaattcatgggtaaacgggttcaaggcaagtttaaagcttacgcccacatgtatgacgaaaatgctgtagtgcaggattctgatacttgtgctattgccattggtcgttcggatgacgggttccgtcaactttcatatgttaataacattcacaccaaaaacggtggtactcacgttgacctagttcttgatgaactgagcaatgaacttattccagcattaaagcgtaagtacaaactagaagttaataaagcgcgaattaaagaatgtctgactgtcatcatgtttattcgtgatatgtctaacatgcgatttgattctcagactaaagagcgtctgacttctccttggggagaaattcgtagccatattgatattgattataagaaacttgctaacgctattatgaaatccgaagatattcatatgccgattattgaggcgatgttagctcgtaaacttgctgcagagaaagctgcagaaactaaagctgccaagaaagcgcagaaagctaaagtagctaagcacatcaaagccaacaaatatggcaaagatgctgacaccactttattcttaaccgagggtgattctgcgattggttatctgctcacaactcgtgaccgtgaacttcatggcggatatcctctacgtggtaagttcatgaatacatggggaatgtctgctgcagatgctatgaagaacaaggaagtatttgacatttgtgcaatcactggtttgactatcggtgaacccgctgaaaatactaactatcgaaatattgccatcatgactgatgcagacgttgatggtgttggttcaattttcccaagtcttttagcgtttttcagtaattggcctgaactgtttgaacagggtagaatccgctttgtgaaaactccggttattattctcaccaaaggtaaagaacaacgttggttctattctcttggtgaatatgaagaccataaagatgatttcaaaggttggaaacttcgttatattaaaggtcttggttctcttgaagaagatgaatacgaacgtgttattcaagacccggtttatgatgtagtcactcttcctgaaaactggaaagaactgtttgaattaattatgggtaatgatgctgcaccacgtaagacatggatgagtgaataaagaataaatagtaagggtactattgcccttacttagaaggaattaacatgcaacgttattggattactttgatctcaggcgactatggatatctgttcgctgaaaagaaacctctgcccggaacttgggttactatctgggtggaaaacattgatggttctaaacatgaggtttatggtcgagttagtagggtgtggtaatctaagggacctccgggtccctttttctttataagaatggatttatatggctttaatcaagaagtgcttggagatgattctaggattcttgcttaaagttatagtgatataatttccctaaatcactgaggaaaatattatgaaacgcagttacatcccatcagaagaattattcaacgatgctatatatcgtgaatatcgtatcatccagcggttctttgacatccaagcagctgaggaattcaaagaacgcttcaaagaaatccataataaaatttttacaactaacaccgctactgctgaagagctccttgaagtagcagaaatcattaaacgacataattgataggaataaaatgaaaattaaatgtgatgatgaagtaatcattggttcttctgacgctgatgattcaacgtttactattaaggcctcgggtaaagcttttgacatcttgtcaaacaaactctataagtataaagttcgtgctgttgttcgtgaactttctactaactgcgatgatgctcataaactgaatggcaatgaaaatcgtccattttacatcaaagcaccaactcgtcttgacccgcgctttgtaattcgtgattatggcccaggtcttaatcataatgacatgatgacgatgtataaaacgttctttgaatccacaaagaataacagtaatgatttcatcggtgctcttggtcttggttctaaatctccactgagctacacgagtacatttaatgtagtatcatatcataatggtaaagccaccggttatactgtcatgaaaaaccgaggtgaacctactattcgtccgatgtttgtcgatgatatgaaagaagacgaagaaactggtcttgaaattacagttccggttaaagtagaagatattgatacttggcattatgaaatcgcatatattttgcgtacctttggtgctgtacctccaaaggtagattctcttcgccgtgaaattgaatatttcccagtagataaaactgattggtttagcgttaatagttcgtatgaaagctatggtctgtatgcagtttatggaaaaatcgtatatccgattagcggtgtagatgttaaggcagattggctgcttaatcgttatggcaaggtttatgttcatttccctcttggcgaattagacattactccatctcgtgaagagctttctcttgacgaagaaacaattgctaatatccagaagcgtgtgaatgctcttgaagaagaggtaattaccgcagatattaaagcgtttgaagcgtatgaatctgaccgtgaattcttgcgtgagttcaataagctgagttctaaggaacgttctattcttcagagccgtggtattaccattgggaaccgcgatattaaacaagtagttgcgaagtataatcttgataaaattcgttcatattatgtagataacgaagtatcagtttatgtttcatgcgatgaacctgctcgtcgtaaagtgtcaagcagttcttggcatcgtcataaccaagtaaacatttctgatatttgcggggttgatagaactaaagcgtttgttcttattgacgataaagcgggtaaacgtattgctacggttcgagctctgtgtaaatctgggttagttccaatctgggcacacattactgtaatcaaagacaatgaagatgaattacatgtcattgatgagctgaagaaaatcatggatactgatgaagtcgtagtattccgtgtgtctgaacttgaagcccagagaaaagctcttcctgattatgacactggtccaaaagagaaacgtccaaaatctcctaatgtttctctgcattggattgataaagacgggtactgggaagaagaccgtcagactttagtatcatctgaaattgctgagcttgaaggttatgcaatcggtcgcaatcgtgatgaaatccacactttcccagataatgtttggtggtggaatatgagcatcacagatatgcggtctctggcagaagcgtgtggaattaagaaattctatgcaattcgtccgggtgctatgaaagccgctgcaaaagctgatggattgctttcatttgaccgatttattatcgaccaatacatcaagtgtattgataaggtagattatgaccagtacatgccatcaaatgctactggaaaccgtatctgtggaaatattgcgcattacgataaattgaatttcttgtcgagtaagtttactgcgtctggaatgaaaaatccgttcctgacaaaactaaacaaaatcgctaaggtttgccgtaccagtaaaatcaaagatgaaaacgatgatttagctttatgtaataaaatttataataaactgtctggtgatgctgagacaatcttctataaaaagattgaacagtttaaagatgattatcctgtcatcgcaagtgtcttggatacttggcggactgacagcaaactcgtcgatgatatcgtaaaaatcatggagctccttgatggagcttctactcaaaattctgaaaataaaggtgaataaatggctgttacctgtctgtctgaaatccaaaaagatgcaatcgttaaaaacttcaaaaacggtctgtacactaagaaagagctcgccgagaattatggtgtttcccgtgacactattcggcgtgtgtttaaagagcgtgaagctcgagctgccgcggcagctgttcctgctaaagtagaagctcctgttgagcgtgaatttaaatgggcagcaagttccaaattcatttcaattactgaaggccgtactacttataatgctgatagccaacatcctggatttaaatctgcactgcagaaacttgtagatggcgatatcgctggtgctattgaccacattaacctggaacaaggcatcaagaaattcgttcagggtaacgtccgaattgaagatggtacgctgttctataaagatattgaactgaaatctggtctgactgagcgtatagttcgagccatggaagatggcgaagactttaaacgttatctgcctttcctggaaaacctgatgctgaacccgtctcgtcgtgcagtttatcgtctgtttgatttcctgaatgcaaacgatatcgacatcactgatgatggtcacttcattggttggaaagtagttcgttccacttatatggactgtgcttcaaacacgtttgataactctcctggtaaaactgttacaatgccgcgtaaccaggtagatgaagacgatcagcgtacttgttccgcaggtctgcatgtctgctctaaatcttacatcggtcacttcggtagtggttctgaccgtattgtttcagttaaagttcatccgcgtgatgtagtatctatcccggttgattacaacgacgctaaaatgcgtacatgtggttatgtagtattagaagatgtaactgatcgttggggttcagaacttcgctaattataaggagccttcgggctcctcttttattatgggtgaaacatgattaatccatttaacgtatctcattctaaagttgttaatcttcgtggtactcatcatgctgctacagtgttttgtcatcatgtagttaaacatgaaggtgatgttcactatgcttggttgcactgtgatgaactcgtagaacttggtgatgattttgttgtggaaccagacacttgtaaccacgacgatcgtgtttattttggtgaattacatatcagaggaatttatggcattgatgaacaaagccctgcagagattgaaccagttgcggacatttaccctagatttgaataagctaaggggtgaagcaaaagtaaaaatcattgatactgcaagatatagtttagatatcgacccatctcaagacagaattgatgttcttaaaagatgtagaattgctataccggcagagtatgtggtagcggattttcttgatggatacgtaaacgatcaagttgttgaccataataacaacgatccgtatgaatgggcctgggacgtattagctcatccctactaccaaggtgttagagttgaagttaaaacacactttgttcatgaccgagcaaatcataagccatggattaatgttacaactggtaaagacggtccattcccagatggaagtggaataaatctagggcccatgtttaaacataaagttgcagactgtataattatattcgttgcagaagaagtgtcccagaatgtcatacggtacacaccgatgttcagtggcggtatcgaacacctcatggaagtagtaaaaccttcacgagttggtgctggcgggtatatcatgcacaaattttaaaaagttgtttacttccgggattggccatgatactatggccttacaaactgaacgggagtaaaacatgagttacttagaactaaaatcgcttcgagctaaacgcggaaatgcttctattaaagctgaacttttgaaagagtataggattctcgaatctatgaattggcattatactatcattgcttgtgataatggcgattcaacttacggcggattgtatcccaatggagccgctgcagctcgcgatgaacacatagataaagtcaaagctctggaagaaaaaattcgtaatttgtgcatttaacggtttactttcctgttcttcggtgatactataatcttgttagctaaactggagaacaaaaatgaaaaagttacttacgattttgaagaacatctttgtagtattctgccttatcgttactttcattggtgttttcgcatgggatttagttaacgtttggattaatgctttcatctgaggaaaatataatgattcatactggctttgatcgtcgctttaacttaatgagaactgttgttctgtcttttatcgttgcggtagcgttgggaattgttgctatattcgggttcggaatttattttgctattcaagcggttgatattattcagaccgatggccttaaatctttagtagaaaccgtatgggaaggtcaaaaatgaaacgacacatcgtgtatcgtctgcttgctttaggtcttcttgtgttttgggttggtggtgtaacggcagtagtatatttttggtagtagaaggggcttcggcccttatcggagaataaactttaatcaactgaggaaattaacatgcgtaatattatgacttttgctgatctcgataacgctggcgcagaactgatcggttctattcgtaacggtgattgggcagcaggtgctccatctcgtgaaattactgagcgcgaaggattttattttttgatgttcaatgatggcaaagcaggttatattggtgcatctgctcgtttctttgtagctaaacagcgttcaaaggcaggatttgaaagtgttctttctcatatccgttctggacgttctcagttgggtcgtactctgcgctcgaattgcatgacctacggtgtgttctggattcctgctaataaaatgaaaccactcaccactggttatggcaaaggtcagcttgcattggcgtttactcgtcagcattcaagtgacgcgcagacctactctgagctgaatcgtattctgaatgataacttcatctttactttgcagaaatactaatgagaaccttcttcgtgatgggttacttgtttctgatggccctaatgatttgctcaggaacattcatgtggtatggccttgtgcctaccactaaagtaatcggaagtattgcgttcaccgcagcatttattatgtttgagcgcatttgtaaaattgtaggagtttacaaatgattaagaaactcctaattgtggcagctattgctgccgcctttctattagttatgtactatggaatgatttatggaatgatttatattgtgcttttcatttccgatgttatagtacaaatcggctcactaatttggtaggtacaatggatatttttgacactctattaaagcaagcaggttctattgatgatttggctaaggcatcaaatcttcgtcatcgtgatttgaaatctatcattgataatgaagcaaaagaatacgcgatttatactgtagaaaatcgcgctattccaaacttgattgatgggtttaaacctgtacagcgttttgttattgctcgtgcccttgatttggctcgtggtaataaagaaaaattccataagcttgcgtctgtcgccggtggtgtagctgatttaggatatcatcatggtgaaacctctgctcaagatgctggtgcattgatggcaaacacatggaataacaactatcctctgttagatgggcaaggcaacttcggttcgcggctggttcaatctgctgcggcaagtcgttatattttctgccggatttctgacaacttccgtaaaatctacaaagacacagaaatcgctccggtgcataaagataaagagcatgttccacctgcttattatcttccggtaattccaactgttcttctgaatggtgttcgcggtattgcaacaggttattcaacttctattcttccgcatagttttgaatctgttttggaatgcactaaagcagcacttcgtggcgaaatgatggaacctgaagtacagtttcctaaatttaacggaaaaatcgttcaaacagaagacggttctgttgagctgcacggcgtgtataaagaaacttcacggaactcaatctatataagcgaaattccatacaagtttgagcgtgcttcttatgtagagaaagtactcgatcctctggaagatgcaggatacatcacttatgatgatgactgttctaagactggttttggctttaaggtgaaattccgtaaagactatgctttaagcgaagaccctgagcagcgtcatgctaaaatcatgaaggattttaaactcattgagaaaatgagtcaatacattgtggtcatcgatgagaatggtaagctgaacgataagttcaaaacttccggtgagttaattcgtcatttcgtagaagtccgtaagacattcactgccaaacgaatcgagcataaaatcgctgaaactaagcaggcgtttaatcttgcccaggcaaaagctcaatttatcaaagaggttatcgcaggtaacatcgttatccaaggtaaaactcgcaagcaactgactaaagaaattgaacagaatgaactattcaaagaccattctgaaaaactcgtttcaatgaacatctatcatatcactgatgatgaagcgaagaaacttgctcaggaagcaaaacgtctggcgcaagaagttaagtactgggaaaagacaactcctgaagccgagtatctgaaagacctggaagaattatgatagaattttatttaattataggttctgtaattgccgtattaggcctagttttattgctcctcagttaatctagggaacctggaggtcatctccaggtccttccatataaatctatatccctccaaaatccttccttagaatgccccaaattattttcacaaagttgtttacatgcttacatagctgtggtattatagccatatcaaaacaacacggagtaaaacaaaatgattacatcattaaaatctgatatcaaaaacattctttatatttctactcaagctgatggcactcgactgagccactatgtaaaaggtaacattgtggtgctcgatgagttcgaagttaatcgcgagtatcctatgcgtcaggtaattcaagcaagtaactatgaagacggtgaagagtaccaagtcgttctttgtgtatacgatgatttctgggtgcttaaacttgaaaatggtgataagttcttgatctttaacgtataacatttttactgctctttgaagaaaatttttcagagagcagaataaaatggtttacaagctggttagcagatgatattatagtctcataccaaacaaattgaataaaacatcatggagaatcacaatgtctaaagtaacttacatcatcaaagcttccgaagatgctctgaacgagaaaactgctgctatcctggttcaggtggctaaaaaagatttcatcacttctgctgagctgcgtgaaatccttgaagaaaccatgaacgcaggttctgttaactcaaacatcggtgttctgattaagaaaggtctcatcgagaaatctggtgacggtttaatcatcaccggtgaagcacaggacatcatctctaaagcggcagttatctatgcagaagagaacaagcctgaacttctgaagaaacgcaatactcgtaaagctcgtcctctgactgaagatatgaatgagcacaaagacctgatgatgaaacttctcggtgagatggaagatatcttacctctgaaagaacttactgtttaccgtagtaactatatcgcagttctggaaaaacgcacattcggtattcgtagtcttgaagttaacaacaaaggtactttccgtatcttcggttacaagatttctgaagagcatcagaaacacttcactaacctcggaatgtcttgccgtgtagctgcaacaggcaatacttacttagatatcgctcgtactgctgaaaacattgaaaccatcatccgctctattaaggaactgtaatgaacaagtttaaagtattgaatgaacttcagcgttgtgtagaaaaagttaacttgaatgctaatatcccaactgattgttgggatgtatggttccgtgggcactttatcggatacattgataagaaattcacaaaatgctatgctatctacaatgcagatggtaaacatatcatggatgtagataactaccaaaaggcccttgctaaatttgttccaatggcggaagctgttaactcaatggaatggttagagaaaatgcagggtgaacctgttattcgtcagattggtattcgtgaaaagaaaagtttatggcagaaaattaaaggattctttaaatgagcaagttttccgaacaaatgaataaatttgttgatgcttctcgtcacggtactctaattaatgagccagaagaagttagtattcctgaaatctgttttaaagtagctgattggtgggatggacgattacttcaacgtcgtatcgtttgtgcagcaaatcgttttgaattgaaaactggtggaacaattgtagttccaggcactcgccattattctgttgatatggcgaacgttctagatatgttccgtgacaaattagtttctgaccatgtccatggagacaatcaaggatttgttgaccagtggggtgagtacttcacacgcgaagaagcattaatcatcgctacacatgcaggccaagttaatacagttcgtcctaaatcaggacccgccaatgaattattctcagaggatttatactaatgattagtacattaaagaataacattacgcttttaaaaattcagcgtaaatcgcttcagcgttcgttagaaatgatggacgataattggggtacatataccaatgaagccgggtttaaaatggcagatagcaaattcatgaaaactctcatggataaagaatacatctgtccgtttagtcatccatttaatggcggcgctaaaccgtttcttgctgaaatgtacaaagtaatgacagaagaaatgattaaagatattgactattacatcaaggaaattgaaagtgcaaaatctagtagctaaacatgattttaataaaggcggagcacacaaagataaaaagcgttccgcaaaggaatctaagcgtaagcaaaagcataaaggcaaagaaaatgcgcattctgaataattccaaatgtactactttaaccattatttgtgatgacctagaagctctccataagaaattaggggaccattccggattagtagaagatatccattctgaactaatggaagacctacagaatgctggctatggagactggatggtacacgattggaataatggtacctttactgtagctattatcgctaatgttgaacctgaagaagttattgaacaatttcagaaatgcgttgatgcttatgatattggagattatctatgaatactgaaactttacgcagagaagatgaagccaaggcatatcataaacgcgttgaattgctttcagcaattaaagtagaatacaccttacaagttaggcttaaagttcttaactcttgggctaatgacttagaagtaaaacatttagagcaagcagtaatgtttacgtttactcaggaaacttctaaaccgtttagtctatcagcagatttccacacgtatggaattattactattaaagcaaaggatagaggtgacattataagtggagttgagtatatcgaaagcattttaggtaatcgcggagaggtggttttagcatgagtcataacctagaatctgtcgttgaatcacaaagatatcttgaagcgttaatgaataaaatcgcgcttggaagtctgattgacttgtcctttcaagaggcaattgacgtatgtcactggatgaatcgtagggttcgtccaattggaaaggaatggtatttaacggctagagtaaaagatggtcgctacgggctctggatgtcctctggtgctgagtatatcactaccaaggaagatttgaattctcgttgggaattggcataaactggtttacaacgcggtatcaagatgatactataatcacataatccattatgttgtaggaaaaataatgactaagtttgaaattgtccaagaaattgttactgttgcttctattctgaccaagttcaatgctgaacatatcatggagaagcgagatgaatttattgcgttcttgaatgaaattggaatcaagaatgagcaggggcgtcagttaaatcagagcaactttcgtaaaatggtttctgagttaactgacgaagagaagagaattctcgttgaagaatacaacgagggatttgagtctatctatcgaacaatggctatgcatagtaataagtaatcacttagctcttccaagagctctaaccgcctgaccacatatcgatgttagtctttcgttagataatgcaggtttggaattgtaccagtacatttcaacagttccagcataaacattgtctaaattgaaatacggacagctaaacatatacgatatttcaggcggttttctttttgttggtaagaaaacaaattccttatccgtccaaaaatatctacccgataaatgcgtgctatattcagcagttgttttgtcgattggatatcctcccaagtttttagaatctaccgtgctaggtaaagtcccctcataagcaattaagtctacgaagtagttcaagtttttaggtctgaacgtaaagaccgcagaaaagtctgcaccgcttgagatatgtgctatctggagttgttcgagtgctgtattatcaaatcgggaatctctatccttttgaaccagtttatcatacttgtcataagtactgtcgacgtaagctgtaataagactatcagacttatatccagcaaacgccaatagtgctaaaagtacgacaacgaaaacacgggaaaagagaactcttcccgtggctccatctttgaataatagctcgagcaacccaagaaacatatcaaaaaacggtattgattgtttgcttgccatattgctctccttacagagctatttattgctctagcatatgcttaatatgctgtaaacgacagttggaaagttcgtccatcattggcgtaaagccaattccaaaaagcatttgggtctgtacaattatagcatcgtcttcctctataatctctagagctgttaaaatggaactgacttccatcttcaatatcaacgcgccaatttacattaaaattcccactgccttctaaaacgatggcatcattataaccgtcccatttactaggctctgctagcccaaaaacaaccaaattaaagcctgtttcccatatacctgataaggacccacgagaatcaagtaatacgttccacgaagcactgttcttatcattccaagcgccacgaaccttaggtcctgtcgcagggttgttacctgaaatagttatactagcattccaaacgtttcttcctatcatgttggacatccaaaagggtgttcccagccttaattttgctccagctgcaatcattgaagattctcctgttacagccttagctgagcttcctacattaggacctgttactgccatgatatctcctcaaagatggggccgaagccccataacattatttagatttaagttcttcaatttctgctttaagctctttaacagattcgactaataacgcaattactgcattatagtttaaacgaagtaatgcatctttatcgttatcagttgtaactgcttcaggaagaacttcctgcacttcttgtgcgataaggccagccgatggtttagtatcaccatttggaagctgtaaatcataaacattaccagatagcttcgacactttatcaagagcgttatcaatcttagcaatatttgatttcacacgacggtcagaacgaatttcaacgtcccagaaattaccaacaccttcaacgcgtagattagcagcactaccccagatttttacaccagtatctgtaagtgctaaccactggtcaactccagcggcgttatagaaatgccatccagcgcgaacatattcacccgactgccatgcgttaaagctatcgaaaatcgtatcaccgcgctgtaaacgtattccatttacggtgtttgcattatctgtgtttcctggtgctaagtgggctaattgcagatatccatcatttctgaatacaagctctcggccactttggttacggataatcatgtcaccgttttgaccatttgaccaaataacacctctgacatttccagcagaatcacggaaccagtagttagagtttgtaccagctgaacctgcatcacagtaaacattaccgtttttagcaaaaagaccaccagcattggttgtgtcagcggcgactaagtttccgctagaaactttaagactgctactaacatctaacccgcctcttagagtacttttgccatcaacttctaactgccatgtttttaatctggtgccagttacgtcaaggttaccagttacagtaccaccggctaatggaagataagtatcgccagcgttactaatagcagaagcaaccttatcatcaacatatttcttgttggcagcttggttattctgtgtaggagcatcggcaatttgcacatacttggtagtaggaacaataataccgccgttggcattaataaccccattaatagttgctgtacttgatacagtcaaagctctagaaactgctgagtttccataaactgtttggtttccatctgcgtcaactttaaacacatcagtgtaagtttccgaagctggattagctatggcagttgctgatgatttagcaacaacaaatgattttcctgaagcaaataccagcttagcgcctgagttagattttttaacgaaacctaaatcagaatctttccccatcagaataaaactgttatcgttagtattctttatgttttgagaaacgatcaagcttctgctcatcgcagcttcgccatttacttgtaagcttcctgaagacgtcagaactccgccaactaaaacgtttccatttggctcaaagcgggtttcaccagaagaagtatctgggcttcctgctctgatgtggatgttttgaccactagaagaacctaaaacaactgcgccagattcattagcccgtaatacaccggttgcggaagtagaaccaaggttcagtcttccgactaatctagcgtttccgtttgcggttaaatcggttgtaactaaattaccgaattttacagtttgtccttcaccaacaccgaggttgttacgagcagaagctgcagaagttgctccagtaccacctaaattaattggctgaacaccagaaacaacttctttccatgcagaccatgaaccattttgtccgtagcggatatatgtgccttcaacaccgccgttctttgtagtaaaggtctgcttacatgaccaatcggtatcagaaaccttgcgtaaagacagaacttcaagaacaaagttaccatcagatgtaggtttgtttgttatcttagaaccaccgccagaagatacgcatttatataactgacgagtacctaaatctgatcgtctaataatcagactattaaggtcgatagtcttatcggaaatatcaactgcctcttcagcgccgctatatgtctgattaaaaactaaatccccttctacctcaagaccgctggatttaactagaatatatttactaggagctggagtagaaactgcagtttgataaccaaattgcacgtgtccttcaggagtaactttaagcattgctacggcagcaccgctaccaactttgcgagcaagagttattctgctatacttatccgaattctctgaaccaaaatcagccattgttccattagggttttcgacttttaagttagcgttaatagtcaagttaccggtcattgtgtcgccagttttacttacttgcttattatcgccagcagtgatgtcgtttttaatggaagtcaaatagttgttaaggttaccaccaaacatcgaaccagaggtaatattcccgtctttagtcagcattgctgctccaccgactttaactgctacaggaacatcaaatcgaccgtcagaacggaagctaaaatcaccagcagaaacacctccagtagtttttgcgcgaatattaatttgtcctaaatccgctgtatttggagttgcccaaattacaccgcgttcattggcgtttgttctaaaccatacatgagcatttccgcttcctgcattaacatacactgatgcagtaccggtgccggaagcatgtaaattaggtgcagctaaatcaccggtcatggtgtcgccagctttcttaacttgggtatcgtttgtcagattaccaagtccgacatcagccttagatggcttatttgctgtaccataaagttcgttgtatctaacatttccctcagcaagacttctgtcgttagctgcgtatacgcgaactttagcgctggcgtagtcgatattaatagctgacatggtatcgccagcattcataaaaataccggagccatggctataaagaccattttgaacactaacaccagatttagtaacaccacgccagaaagtaccaccatatgcttttaaacgggtcaacatatcagcattagaggtaatgttttcgattgatttaccgccattaccgcctaagccataagcaccaacttccatcacgtttccgttagattcaccaacgtcgcgaacagcagcagtaccaagacctaagttattacgagctgctcctgcgctagtagcacctgtaccaccacggttaactggaagagtacccgtagtatcgccgaaatctggttttgcgtaactgtcaaaaatctgtttcattgaaacaagaatacttccagctggtccatatccaccagtgtcttggttggtttcatagataattactttaccgctatcttggccgttgtatccagcagtgtttagcactgtaacataaagcccattgccgtatcgaggaactttagcgtaaaaatcaaatgaagcctctgaatctgtagcagcatcatttttaacaacgtaatactctggaatctttcctttatcaggagaaccaactcgacgccattcaacccagttatctaaattgttagtgctccaagatgttaaatttcgtcctgataacgtgataaaatcaacgtaatgtctaccgtgcccagaatcaataccaccgctaatcattaaatccagttgcgaagaagccattcctggatgctttattgtagctacttttacccagcgagcagttgacgcagttgcagcagaaatagtatattgccaggcttgacgattgttttctacattcgtcagaagagtaccggatttaccaggacctcttccgctcatagcgtaatacacctgtgaatttctgaacgttaaattactgtcattagttaattgaagaacacccgtgcctctttggtttttaatatagacgtcgttagagcctacacccatttcaagaacaagagtgcttccactgttaattttaacagtcttattggtagataatcttaaatcgccaggaagagtcgtattaccagagccgtcaagcaagaccaattttcgggcttcaacgttgcctgcaccgcgttgtacgaattgaatagtttcagcgccatcatcaatagtaccgatttcaagaat

SEQ ID NO: 24 - DNA, 168198 bp, unidentified
  source 1..168198: mol_type = genomic DNA
aaacgagaagcatcatcgcgaagaaccgcacgagcccgacgcatgattttctcaaccgtctgattgatacgcttgttcgacccacgcttgtagccagcgcgtttagaggtaccaacaacttcttttactgcagtttttgctttagcttgtttagccattttatcatcttccattttggagaaatacatgggagcacgttcttccgaggttcaacttctttcgacagttctttcggttgtagctcccgcaagccctcaaagggtacgtttaaactcttatctgttgcacaccgttagcttaaaggttccgggtccgatttctcggggataagatatacaccgatggatgtataggccttgaggcgtactcccgattggccatcgcctcggggtagcatgcacttgccgtttattttctagctgcactttggtagcaaatcaccgatggtttcggatgttttacgtggggataaccaacaacgtccacatcatacgttacccatgcgtacacatggtgggcgtacaaattacttcagcgttaccacaaagtggcgaacagctttgcgagcagcagaaccaagatgcttagcatacttcagttcatccatcgcttctaaagtatcacgaaattcagcttgagctgggttcagatgtttaaaacctttcagaacttccagtgcttctgcatagatatcgattgaagcaccgtagttttcgtgaccggaattccatgcattacgttggagttccagagctttagtaagttgtttgttcattgaatcgttcctcaaatgaggttaaaatttggtggacggtaaccgaggtttagctcgggcatccaccgcgtagaattgctcgggtaactaattgtccgacgcccaattcatattattatttatatacgcatgcaagggacttataatgacaagtcacaaacttctgccgaatttctttaggtttcttcacacctgctgctactaacggatgaggtacatttctgatattaccaacaggcagtggagtcaaatcaccgacttcaacaaatcctttcggtacatcatcaccgatagaatagatttcacacatatccggcagttgtccttgttcttcttttccaagaataataccggaaggagaaacaatttcatcaccttgctgtgcaggttcagatacgagaattacatactcgcctagagctttaattggaagttccatgtgttacctttattgtttgaccatgtagttatattaacatggtcagtttaaagcaaattacttaccgatcatctgcagcagatgctcaactttcataccatttaccgagataagtttatcaaaggcaaatgagcgccaaccttctttctcggtatcatatactggaagtgaagtagtgctttctgctcgagcagatttagtagtgctttctaccaaatcagatggaataatgtctttatcacgagtacagcgcagagtacgaatagtgccatcagctttttcaaacacaatctgggattcgcccatgctcagcacagccttcagagtttcacgaatatggatgttttgttcagtagtcagtttcattttgatgtctctttaatagttttgataattacagatttgcgcttggataattcttttaataatcgaactgcttgatcttcaaatttaaatgttgctagtggtttccatttaaaccaataccggcgttctactgagtatgatataacaacatcaccacttaggttaagtttattaatttcaacaattctaagtttcattattcaattccacagaattctttaatgttataccaattcaacttatccaaattacgttttggaacattgaacacctcgattccagcagaacgaagaatatcgtcccagccgggttcgttcttgtcgtatgtttcgcagtatactaattttttaataccagactgagcgatggcttttgcacaatctggacatggagacagtgtgacatacattgttgctccatcaatactactgccgttccgggcagcaaaaagaatagcattaagctcagcatggatttcattgactttagaccatgcagagtgggctgctcgatgttctttgagcaatccgacttttttgacttgaaatccgtcttgacgcaatcccgtagatttgtaaggaatttcaccaatccaaccttgttctgctgcatggtcacaacagttcacgccgccagaaggtgaaccgttatagccagtagaaataattcgtccgttcttttcaattactgcgccgactttccacgagcagcattttgactcttgagatacgagatacgcaatttgtagtaccgtcgacgctttcatttaaatcaccagataagttgtgttatttgttttaaccaattttaactcgtcggtaggagaagcaaaactctctactcgagaagtacgaatgcctgtaccatctggaaacggatgatttcctcgttcaagaacatcggaaaagacataaccataaagaggttggccttccttaacatcaacgttactgtacaaaatagcatcatattcttcgcgcggaattgaccaaacgccttggtcagaaccaataacagcattaattagacgaataccattttggctaatttctgccctaattccacgagcatgttcaattaaaagagcttctacagcctcacgtaaagtcattagatatgtcctaaaatgttagtcatttcaacttggcctgttccggttaaagccaattgagtgtgttgattgctctttccattattaactgtaatgatataagcatcaacatagttaaaggatgactctcgtcggagagtcactttacttccaggaacccggtttgctacttcctgtgcgaagattttaaccttcgaaataaattcatcatgtgaaaatttagcgtcagacaacataagtcataacctgttgggtttcaaaattagcaataattccaacgataaaccaatcgtgttcaccttcgccacaagaaattttaacttcagatgaaccgcctgagcggtcaatagaaaatttaataacttcgccgtttggaataagtgcattcatggcagataaaaactctgcatgcattttggctacttcagatggagtaaactcatctgttaaatgattagcaacaacttgcgtaaatgatacttttactacttcggaatactttggaaacattatactttcctctaaaaatcaccgtgggctacttgccagcattcaacaccgatacgacgccacatttcaaccacctgcgccctgtcatctactgcaagttttacattataacgatcagcaattcggtcccagaagatttcttcttttaccacatcgtctttgcgtgaatcgccttgcttacgttggaagtgttcgcctgtttcgccaacatggtccaacaaccatttcttcgtaatgcgttgataaacagtagggtcttctttagtaccagactctctgccggaaacagtaagaattttatatcctttgttacgaagcattttaagaaattcaattaccatttcctttggatggtctttaccacatttggccaagtcataaggagaacgatgattgttatctgctaacgtgccgtcaagatcaaagataactgcttttggcaatgattcgtctggaatgtacaaatcatatggatgcatcttagaatagaagctacgaagcacttcaataggaactgcattcgcgccacgatagaggttacgattaagcaattcagtccaaggaacgtcaaagcgtttaatttcccacttgacaccatcaatttcgtatgccaactcttgccacttcttgatagtcgttggattaaggttagtatcagcaatgatgacacctttagtggtttccatctcgagtagagtcttcgccatagaaaactgacatacagatactgacttctcacgaagcttagaatatttgtaatcattacgtttatcaaggccaaagatgccttcacgcaaatcatcacgagacaaaacataccaacctggattagctgctacgtattcgttagcccaggttgttttaccagagcctggagccccttgtgtcaaaaccaattttttcattatacatccttaagagtgtcaataaaatcatgaagagccttagacttttcaccccaattagcacgatatttttctttaattgctcgcaatggcttattcattgacagtatatcatttttgtcataattttcagctgcgcgtccaaacacgatgcacgccaattcattttcagcaattaatcctttaagtgtttcatactgctctcggttcattataataccatcacttaacgcaacgaggttctttaaggtcagaacgataataacatatcattccattagcatctttagtatatcgtaaaatgtcattcatccagatacgatattcttgcgactcttcaaacggcataccaacccaggctttaccgtcaattacttttacttcccaatgtccttcccatttttgaattgggtctggccactcaggatgtaaaaccgggacatctggtgcactagaagagcatccagcaagtaagctgataatacccatggctaatagacttcgtttcatctggtagcctcctggatatcttctgcaaacttattgaagcttgcattaatctgtttttcaactaatccaggtttggctgcaactacgtttccacgcttagaatctttattcatcttagcgttagaagtatcacgagctgctcggttttcctgatagcctttatatgttgtctgcagattttttatagaaacaccaatgttttctatttcttttgcttgtcgatcagattcatcttggacgactttgaggtcagctttaagattttctacccgccacgaaagatatttcaatccaccggcggataacgctaacacaccaatcatcaaccaagttgtgtttattttgagcatagtttaaggataacctctacgatatcatcacgggataatcccgaaatgaggatgtgacgatcagaactttccgaaggagaacacttgaagcaagcttctacatattctgccatctcagaataattcagctcgcgatgcataatgccaagacgatgcttgccataaatcgggtcaacgattacatagcatttgcatccgttagcatgaacgtttggctgggtgatgttcttgaacacctctgcaccatacttcgcgagatgattatctaggaaatcaatcatttcatctacagcttcaggaagggcttcggcacgctgctcgttcacacgattagtgtactctttttgcttcttacgagcagcttccttgcgcgccatgtgcgtccgtaggtcagtgacgaagcccaccttcttggtaccattccacacaaaaatcccatcagaatgagtaccatatttgttaacaaccatatctaaagtaatcgcttgcatatccatttcaatatcctcatcagtttgtgtaagtctatagtatcacactctgatgaggatgtaaacaactattcttcagaaatttcaatttctttttcgtactcttttggaacatatcctgcccagtacttcaagaacaccctttcgaggtctttaagcagtttatccacatctacagttccttcgtacatgttcatgataacaccaaaaagatggcgctgattaaccgttgctttctgagcagcaatagcataatctttacgagcacgacctctgtattcatcgtagaacgactgacatagctcaagtgactttcctaggtaatctagataagcttgctcaaacgcagaaattttcttaattgcgtattcatctccagcaaaaagagaacgcaaatcgtcggaatttgcagatacgacagacgcaaacagtctttcatttgacgttattgagtctttagtgtgatgaagagcagaataccattcggttttaaccttaaatctctgcccagtgtttagaactgcaatgtacccttctacgccttcaagttcacgaacaccttcaacccaagttttggggtcagaaattccgtaagcattaattaaataaggacgaatcttagcattagcgtacaaatcatcatatttaatatactcgccagttgcgttattacggacgtttaacacaaacagctgtggctcctgatatgctaaaacaacacgattattaggtgaaacaaattccatgtttaccgtataaccatctagcgctagctcaagaataacctgatgaagcgaagaatattcttcactgttaagcaaagctgaagcttgtcttgcctggtcactgtaaagagaggtttttgatttaaggtatagatacccatcatcaacataagatgatactagagagccatcagccttatccataatgtattctacatcgctaatatcaattcccatcgttagtgggttttcattcaaattgaagaatttttccatcggacgcgaagcaattcgaattggggtatcgccatccatctcaaacatgataccgcggcactcaagagcatcgggttttaaccactcactgtaacttgcgtagtggtatgaaaacactctgaacttaccatccataggaccggtaaaatctttataaaagaattttgcaacttctgagctttcacacagattcattaaatttttatatagctctaacatttctttaccttatgtttgcaattatcgtagtgccatctgatagcaatggcctttgaagttattataccacaatgcgggcatgggctgtacaaaggctttttctttcctttttggctttctgaccgcttgagtttagtttcttcagattgtgttttaccggttaaagattttgatatcttttcgcgtgtttctttggcatgagtctttccttgagtgggacttactctgcctttcagtgctttagataaattctttctatgttcttccgttcgtttctttccggagaataagttagatgtataattagaatgctttattctagagctttcataaaatctggaatgaactttaaaattctttccagaagaattacacatcatccaaagagcataattcattttagaattattatgtatctttgataatagcaaatgggcaatgaaatgttcacgtccagtcaataaaactaaattagaaacatcgtcatttcctcctaatgattttggaatgatatgatgagcttcagtataatagtttaattttcctttatcattgcctcgtaatttaccctttgctattaggttatcatatactttaacatagttcatttagctttgttagtatgttgggtgttccatggaggattgaactttttaattagaagaggttcttccaagtccatagtggatattgacatctcgccaagttcattattaatcaaaagattaaaacactgacgagcatagaactctacttttttgccagccattagtgcttcaaaaatcttggcagatttagccgaatcagaggtttggtctttccgattaatagcagttctataataatttatacgtttacgaagatttttagtcttaccaatgtaaactagttcatcatcaactgcgatggcataaactacgtttaacttgtttgctatcagaattggtttgatggtaaaatctggttctaactcaagttgaacatattttataaaagaaaactcgttagcaatatcattcataataaagaggggccgaagcccctttccttataagtactttttaaatccaattagaacatcatcagtgacatcattgtcaatctgagctaccagataagaacttatctcaacttcctgcggagcagattggactgcatcagagttaagatattcgcgaatccaaggaataggatgacgagttggtgcatccgtgattgggcacggcagaccacagctacgcatgcgagatacagtcagatagtcaatgaagtcatgaagaattttaacgttcagacccggaagaccaccgttgcggaaaagatggatagcccaatctttttcttggcggttaacttccatgaagattttaattgcttcttgttcacactctttagcaatctcaacccattcttcgccatcagtgccagtttgaagttgacgcagaatgtactgcgtgcccttcaaatgaagttgttcatcacgagcaatgaacttcatgattttagcattaccttccatgatttccatatttttatggaagttgaaggtacacgcaaaactaacatagaaacgaatagcttctaatgcgttaataacatgtaagcaaagataaagagatttcattaaatcacgtttagcttctttaatttcgatattatcttgattaaagcagcgatttttggcattttcccatgcgcgagtcttcgctataacatcatcatagtaaacaccaattgactcagcgcgtttcatgattgcttcgtcaagaacgatttcatcaaagattttagctgggtctacatataggttacgcatgatatgcgtgtatgaacggctgtgaatagtttcactgaacgtccaagtctggttccaagtatctaggcttgggtcagaaataagcgcagataaaactgctgctggagcccgtccttgaattgaatcaagaagagattggtacttcaagttatcagtgaagatattacgttggtgttctgggagtttttcaaactgaccacggtccatcataacgttaacttcttcaggacgccaaaagaagctcaattgcttctcaatgagttcctcgaatactttatgacgctgaatatcatagcgtgcaattcctagaccagaaccaaagaacattggttcggtcatgatatctacttgcttggtattaaaaactgtactcattctatttcctattctgtggtgttaaccatccgtggtctaattataattcccttttattaaagcttacaggccgcgcagtcagcagaatcttgaatcatatcatcgttaccggaaccatcacgggtgttatgatagtaaagagtcttaccaccaaagtaccagaaataaagcaagtcgtccatcattaccgacatttcaactttgcctttagggaaattcgccgggtcgtaataagtattagcagagatgctttggtctacaaatttctgcataatcagaacctggttcagataaggcttattaccctgtttcgcgagctgccaggcataatcataaagggaagcattgtgttcaacatttggaacgacttggttgaagcttccttcttttgattctttaactgacactggtccacgtggtggttcaataccgttggtagagtttgatacctggctagacgattcgcatggcataagcgcagataacgttgaatttcggataccgtatcgcttgaggtcttctcgcaggagttcccagtcacagacatagtttggagctgcgagttggtcaattctttcgttgtaccagtcaataggcagttcaccacgtccgtatcgtgtttctttgtaaagcgtgcatggacctttttcgctagcaagtttaacagaggctttgatgagtgcatattgaatacgttccatcatttcgtgagtaatatcattagcatctgcgtatgaagcaaagttgcttgctaaccaagctgcatagttagtaatgccaacacctagtgctcgacggtctttagcttttaacgctttgtctacaggatagtcttggtaatccaaaaggttatccaaagcccttaccattacttctgcgatttcgttaacttcttcttggtcttgccagttgaagttgtcgagcacgaatgctgcgagtgtacacagcgcgatttcgccatcttcttggccaacatccgaagttggtaacgcaatttcgaggcagaggtttgattgcttaaccgtagccacatcacgaataaaaggaccatattcaccaacgttatctaccatgtacgggtaaattcgagcagtaccagcacgttcagtaaggaacaactcaaacagttcacgggctttaatacgtttctttcttacgtctgggttcttttccagctcttcgtataaagtacggaatgcttgtgcatcacggaagtattctgtatacaaagtaccaagacacacatcgggactaaacagagtgatgtaatcattcttaatcaaacgttcaatcatcaggttattaatctgaacaccataatccagatgacgaatacggttttcatctacacctttgttgttcttaagtacgaggaggttttcaacttccaagtgccagatttgatagtacaatgtcgccgcgccaccacggactccaccttgggagcaggatttaactgctgtctggaagtgtttccagaaaggaataactccagtatgtttgacttcaccgaatccaatttttgaaccctctgcgcgaatcattccagcattaataccaatacctgcacgcttactgatgtatttcgtaattgacgcagcagcttcgttaattgaattaagactatcaccaccttcaataaccacgcatgaactgaactggcgtgtcggagtacgaacaccagacataattggtgttggcaatgaaatctttttagtagaaactgcatcatagaaacgaataacgtttgctaaacggttttcgccatcatcttggtgcaagcacataccgatcaacataaaggcaaactgtggagtttcatacaattcaccagtgtgacggtcttttacgagatacttctcgataagctgcattgttccagcataagtcatagtgaaatcacgctcatgcttaatataagaatcaagcaaagtaatttcttctgcagaccacttacttagaatttctttatcgtacttatttgcgttaacacaacgtgaaatgtggtcaataaatgcaggcggttcaaactgtccataaacacgtttacggatttcaaacattgctgcattggatgctacatattgataatctggctcatcaatagaaatgctattcgctgctaccttaacgatagtcttctggatatctgcagtgctcatgccatcacgcagatgggatttaataatttcatacagctcgtatgggtctactttagttccttcgcacgcccattcgaggactttaatgattttctgcatgtcaaattcttgactaacacctgagctcttaattacttgcataagtcctctaattcaaatgtatctttaaaaagtttattcactacaagagctattatatcaccatggcaaggaagcggtttgcaggtgcatcctaatctcattcctcttaaagtttctaagtgctctcgctttatttctccgttccgaatcttagcaataaaatcgtccttaaacgctgcaatagcatcaggacgattatcgcaatctttaccgacgtaatttccccacattgttccacgttggatatttacatcgaagtcggaatggtatttattaaccacccgacatatcttcatgttatatcaacttcaaaccaacagattaattgtgttttgcctatagaccattcatatgatttaacaatagacagaaccctttgttcggtcccatcaaaaactatcttgtcattaacttcaggcaaatcgctagagaatgcatcacacatctcgcctaatactgttttagactggtgtcctttacgaacaaatcgaatattcatatcgccatctttcctgtaattgttgggtgagatttatacccaactagttcaaaatgatgaggacgtgcaaattgttctaaccaacgaacctgagaactagtctgccaagtttcatacgtatctgggaatgcaatttcaagctcacaaagttctttcggttctcgacgaagaatttctttacattgctcaatatgattcaggtaaatatgagtattaccaccagtgaataccaaatgcccaggtttaagatttgtcattttagcaatgatatgaactagtgctgcatatgacgcaatgttgaaggggaggccaaggaatacatctacagaacgctgataccattggaggtcaagatgcccctgacgaacgttaaattgatacagcaaatgacatggtggcaatgccatcttatccaaatcaaccgggttccatgcagtcacaatctgacgacggtcatatggaagttgcttgatacgatcaatgatcaatttcagttggtcaacacccatgaaatctcgccattgcttaccatacacaggtcccagttcacctccggaataccccatgtcttttgcctggttttcatagttgtcgtcccagacagttttaccttctagtaatgagtcatgctgaataagacgtaattcatgcacattagtagacccacgcatgaaccaaatcagttctgcaatacacgctttccacgcaagacgcttggtagttactgccggaaatccttcttgtaaatcaaaccggtgttgagtaccaaactttgcaatagtaccggtaccagtacggtcatcagtctcgtatccattttcaaaaatatctttaattaattcttggtattcacgcattaaatttttcctgaagaggagtaaagaaaagctggtctccacgcttttcaaatcgtccaataatagacactacatcatcgttaaccgtcacattaccgtgtgacattccgatgaacatcttcttataatcacgctcaatttcaataggtatatttccatttcggttatatactgtagttgaaccgttataagtgctaagaccattataactgaaaactagaagatgaataccatgcttaaatggaaatcttttccacttcttttggactttgtcttctgatagctgagtgatatcatagtttgcgctcatagaccacctctgaaatgttagtcacttcatcaatatgataccagtgattttctttagtaatgaatcctgattctggccaagtaggagctgctacaaattcagcaggtagagtgacatcagaattcactctatgactttttctgatggttgtttggataaccctatctgcatatggatatgccttctggatgattccggcaccacctatgatagaataattaaggtctctattaaaagtgatagtactgttgtaagaagtatgagcggccataatgtcaccacccaagaaaccgataaattctaattcacttacataagcatctgcaaagaagccatttttagcagttgccaacgcacgactcatgtcttggacaacgattgtcttacgaccaggaagaggtttaggaaaactcataaaagtctttgctccgcaaatcaagatagtatctcgagtacgattagcaaagtttttcatgtcctgggaaatatgtttccatggaagaccatcgcctaaaccgaaagcattttcgtttttgccgtctacagtttttgtaggagcaaatgcataaactatttgaatcatttaaacctcagcaaaatttagacatataaaaataatcctaatataatgccgctaataaaagcggcagtaacagaaattaacaaaactactaattcagcctcaatcatttcttggccttagcaagtttaaatgcttttttgaattcttcaacatcttcaacaggaatccagaagcctgagccatacccatcttcatagcatgggcagttatcacagtaatcattccaatagacagtttcaccacccatagtgaatggagcttccatctggcacagtacttcttcaacacgctctaattcttctgggtttttgtcgcaaatgcagaaattccatttaccacgatattcagaaccaagtttgatgctttgacgttgaagtttcatttttattctccagtagattatggagctatactatcacaagcatagctccttgtaaacaattattcttcaaaatcttccataaagtaatcaatgtcgtcccattccagagattcaagatatgcaataaccttttctctagaaccgcggaggtcaatatttggccaaccaccaccaggtccatgacgcataatcaagtcaaaatcaataccatggtcagtgtcataaaaacgtgtaccatctgcatactccaaatctacacaaataccgtctttgttgataataggagttgctacgatatcaatgtttaatttacccatgatgttttcctctactcgttttgtttcgatgtagatatagtatcactcatcaactggcttgtaaacaattttgtgaaatattttttggaggaataaagaaaaagggacccgaaggtccctttatattagaggtcgttcaaaatatcattcagatcgtcatcgccaacactgtcaccagcatcgcccatgatatcgtctgcggaacgagaagaggtcggtttggattcaaaatcagacaggtctttgtcaaaggaatccaggtcatcgccaattttatcggcttgagctgctgcttttgccgcggcaccaccaagagctgctgtacccataatctgtttaaatttggcttcgttaacttcaaacgatttaaactgagatggagcaacaatttcgctgaggtcagccatattttcggtcaggaatttctgagtttcttcatcattgatgtttgcaatctcggactgaccaaggaatttacattcatcatagttctggaaaccaccgactttcttaactttcatgacgaagtttgcaccttcatacacgcaagttacatcaaccggagtttcacccatatcaacatcaacttcaaccatcgcgttgattttgtccataattttctgaccgaaacggaatttgaatactttgccttcgttttctgggttagccgggtctttaataaccaggatgttagaccagaaagaggttttacgtttcagaagcttatattcagctgggttgctgttataagaatcgtttttactcagatgagcacaaaccgggcaagaatcaaaatcaccgtgggtagaagtacaattttcgatgtaccatttaccgccgtgtttgaaaccgtgattgatcagttttacaaacggtagagagttttcatctttaccaggcaggaagcgaattactgcttgaccattaccagcattatcggtcttcagtttccattcgtttttgtcttcgttagagaaagaagaaccacctttcagaccagccagttgttgttgaagttgagcaggatttttacgcttaaacatatgattacctttttaaatttaacagttgttgttgcaacatgggtccttgcaactggacgatagattaattatatactaatttctttacaagatttgattatgctaataaagagtttcttagcttcagcaccgtcaacgtttaaaagttttttataagcttttaatttagtggagtaattactccaaactaaattatccgttgcagtatcatgagtatttattatatctaaaaacgagtcaagcatgatgaatgtctcgaaagatataacgtttgactgaagaagtttgaacacataagatgttccgactttctcattatattcaaaaatatcatgaagcttatctacattaactttcttggcaaaatagtaaatgttctttacatcttccgagaacgttgttttaatctgcttcaatttacctatatattcacgataaaacacgagggcatcagcatcactgatatcgccaatccaagcatcttggttagctacgaggttactcatgaatatcagtgttaactcttttaatgtatatttctcagcgagtttctcaaagaaatatttgtctctacgcttttgataagctttatcagagacccgcataacccagttatacttaacaacgtcatatcgaccggcaaagtgttgtttgagcattaaatataaaagataaacgctcttaccgttaacgtatctgttattatttccaggcatgcggagacgaatcataataaaaaatccagactattcgttttatgtgtttgactaaatgatggtcgaagcatattttcttctaatgcttctgacataattttttctatgattgcaggtggaatatatctattgaagtttccctcaggaatagaattttcttctaaccactgagttgttgcttcaagataccccattccaagttctgttaccatagactcaatagtaaatccgttagcttgcttatctaacagctgattaatggattcagagggggatacctccccctcgtctttaagcgaaaatagagtcataagcttctaccacttcatctttttcagtttcaaaacgatcgcgtgtacctttatggaacagggcaagcagctgattaaataatttgccttctacaccaagctctttcttggcgcggtctttaatgtctttgttaagttcaagatagctttctgctttcaacttattacctgaggcttctttaatcatatctcgcagagcctgtccatgtaccgcttcatcaaatactacttgctctttttctttcttagccattatattcaccttaaaagttgttaatttctttcattaatttagacagaccggatttaacaaagtagctataaattttaccacgacccggtaattgatagttattataacaatctaaaatgttagcaacaatgtcttcgcggatgtaatcaaaatcgattaacacgcggttttccaagaaacgcttatactgttcttcagtaagcaaatctttaatgttttcgccagcatcaagacattcttcaacaaatgtcattttcgttgaaggagtacgctcaccatcaacatgggtgtaccaaaaatctgaacgaactttaatagaagctacgttatctttcttgtcacctttaataattttaaccatacaatctaaagcaggagaaccggttttagattttaccagtttcttctgcattggtgaccattgcttaacattaggatacttatgcaattgagtaaagtcaccatccgaagaaacaatcatgactggatggccttcgagactgaactttttggttaataccgcaatgctgtcatcagcttcagctttatcaatatcaatgacataataaggcatatactgcttaaattcatcaattacagtacgaagaccttcaaagtatccatcccagtcccaattggattcttcacgggctttagcacggttctttttatagtaatatgctacgtcccgacgccaatacccattaactgcgttatcaacgcagatgacaattttagtgtatccatctttcttccacttaaaagcattaaattttaaagtagaaagaataagatgacgaaccataggagttgttagtttgtcaccttctttatacgtatgaagaattgtcgccattgcaatttgtgacaagtcaattaaaatgacgccttcttttacttggtcttcttcggcgaataagcaatttaaatcagacatttgaacctcgttcaattagttagtacagccattataaatacttctataatgaagcataaccccataggagactctatgagcgatttactgaaacaacatttccgtgcaacgaacggcttggacgcaggcggaaataaagttataaatgtggcacttgctgaccgcaacgttaaaaccgacggcgtctccgtcgagtacgttattcaagaaaacactatccaaaaatatgacccgacacgtgggtatctcactgattttgctgtgacttatggacgtcgtatctggattgcaaataaagatattccaaagcctgctggagattttaaccaggcgaattggacttctttacgtgttgacccgaactggatttataccgtccgtaaaggagagtttgaaattcaatctggtcagttcatcaacgttgactctaacgctgcaggtaatgctacattactgcttccgttagcaccagatgaaggcgataccattgtagttcgtgatattggcgggcgtcctggctataacggaatcttaattaaagcacaagatactggtgcgtctatcgtatttggtgaatcgcgtctgcgtgaggtaagacttacacgtccgtattcacaaattatgcttacgtttagtaatggtgcatggcgtgcgagtttaacagattttggcgatactgccaagatggtagttccgaacgggattgttccgacgcaagttcaggcaggtgataacgtagttcgtcgttatacttccaactcagagatttttattactctgccgttgttcgctaattcaaacgatatcatcaattttactgaccttgacggtacatcgccaattaaccatatgactgtgcgtacgtttgacccaactatctcaattgggactcctgggcaaacagaggttcaagtacgtacttcaggcaccggatttttggtatatgactcgattgacaaaatctggcgtatttttgaaaatgatttacgcaccagagtaagaataattacttctgatgttactttaatgcctaatgagcatatttctgtatttggcacagataacaataccgttaaaacaattaacgttactttgcctacagacgtagctgttggggatactgtcacaatcgcaatgaattatatgcgcaaaggacagactgtagtaattaaagcttctggtggtgatactatcgctagcaatttgaatttactgcaatttccaaaacgttcagagtatccacctgatgcagcatgggtgcaatcaagctcaattacctttaacggaactacatcgtatgttcctgttcttgggcttgcatatattgaagataaagcatccggaaaaagctattggattgtaactgaatctgaccctaccgtagaacgagttgatgctaaagacaatacaactagagcccgattaggtgttattgctcttgctacgcaggctcaagctaatgcggagtcaaacccagaaaaagaattagcaattacgccagaaaccttaaatggacgtcgttctactgaaacccaaactggtatagcaagaattgcaacttccagcgaagttaatcagtcaacaactgcttcttacttggataatgtaatcgttactcctaaaaagcttaacgaaagagctgctactgaaactcgtagaggtttagcagagattgcgactaatgctaaaatggatgcaggaacagacgattttacaattgttactcctaagaagctgctttatcgtactacgtcggattcacggttaggtgttattcaattagtaaaaactggtggtgctcctaacacaactgctgatcgttcttctgctggcaccggtatattcgatcattctgattacaaaaatgcagttactccaaaaactcttcgtgagtataaagctactgtaaaccaatcaggaatagtctggttagcaactgatagcgaagttagaaacggaactcctgcttcttcaaatattcctacggttgttacaccagaatctttgcataaaaaagttgctactgatggagcaattggtttaatccaaatagctacacaaactgaagttaatgctggcggcgtgactaataaagcagttacacctaaaacattaaatgaccgtacagcaactaacaatcgtactggtattgctcgcttcgcgacacctggtgcccagggtgaatttgaagctggtacttcaagtacagtaatggtaaaccctaaattactgttcgataaatttgctaataccgatcgtatccaagttaatactagttctggcttaactattactgggaacctctgggaccattataccatcaacatacaggaagcaagtacttctcaaagaggtacaaccactcttgctactgctgctgaggttagaactggaaccgacgctaagaaaatagttactgctgccgcgttacatgctaaaacagcaaccgaaggagctatcggtcttgctcagtatgctacacaggcacaagttgatgcaggcacattaagtgatagaattgttcctcctgcttacttgaaacagactattcaggtaacagagtcatggcaagctacagacagcgttagagggaccgtgaggctatctacaggcgatggaacgtggaaaggtaatgataccaatggctcaactcttccggataacgggtatgcctctaagggcgtcgcagtgtctccgtatgaattgaaccttacactgaaacattacttgcctcgtctcggtaaagcctatgacacaggaatgttaggtggtcaaacaccagacaaatatgctcgtcgcgatatagcgcagactatttctggagcttggacatttagtcaggacacttcatttagcaataatatttctgtcaagaatgttatatatgctaatggtggtgaagttaaaatttctccaactgctgacactggaattgtgcatgttcgttttcaaaatagagacggaagcgagcgtggtataatttatgctgagcctcaaacagcttcagccggaaacttaaaagttcgcgtaaaaaacggaacaggaactactgctgcaagccagacctacacatttggcggtaacggtacgttagaagttcctaacgaagtgtcaactaaaactctgaggtcttctggaaatgcaatagttggcggaactgttatggttaaggacgttcagatgcttgctgtcgagggattgaattcaatattcggtgcccaatcacagtccgcatttattcgttcccgtgacgctgatacacaaatttttgcacaggattcaactggatcgtatccaattttaactaccaaaaactacgcaagattagctgatggccgttatgtcaagaaagctggtgataccatgaccggcaatcttaacataaatagttctgctatcgtcattacgggttctgaatcctggtatgtgccaacgaatgaaactgtaataagacaaggttcttggactgctgaaatcaaagacgctactaaattgaaaggtcttcgtggttatatggttccaatcagaacaccgattgaccctggtaacccaagcactttagtagtgactgggtatgaagaaaaaactgcagctggtggtgttttaactcaggttggtgtaactacaaacaatacttatcagctttggacgccttatcctccgacaaccgaaactgctgataagcgtttcgcgcatactgtgtggatgaggatttataatccaaaccttaataagtttgatgattggatgcgagtatttacatctgctactcctccaactgcagctgatatcggagctccgagctcagtatcaactcaggttaaaacccttgaagttttggaatggattaagcttggtccagttaaaatctggccagaccgtccaaatcaaactctcaaatttgaatgggtaggtgattaatggctgaaccaattttaatggcagccttcggcgaggatttcgtggaaacacgaatcctctctgaggcaaactctgtgaagtattggctaaaagcttatgctacgcattctaatgctgttccgaataagccagaattgaatattaacggtgcctttgatatgacctcctccttacggagggggattaatgttgttcaagttaatggtgacaggtttattaactttaaaacatttgacgttaccactgatgataacaacgctaataacaaagcgtttgtagaatatgcaaatggattaacttcgggattgtatattataatgacacatgaacgatttcaatccagcccgctaatagacaggtggtttaaaaataagtggtctgcttcttggccaggttctgatttttccaaatcatttccaaactctgcttatgtaggagtgctcggagcagcaaaaggacgcatattaattgagtcattttacggaaatgatggaaaggttaaagaagattccagagctaaagtcgatactgtatatgataacgttggcgatgtaggatatacaggctgcccttatcgttccattgaagacactaatgagtactcggattctactggatatgaatataagcgatatccagttcaaaatgaatctataagcaaaatagctgattatggactatctcctggggattctgtatttttagtatgtgatatgtatgcatctaaaagtcttcttgatgctggttctactactagagctagcctgcgatggttcaaaggctcatctttattatcttcaaacgtatcattagaagttccaaaaaatggagctgatagatggttaagatttgaaagatttaccgctgttcctacagacgctgatggatttactattgtggtatcaagatatccaaaaacgtctgtagttggtgactctaaaatcaaaaaccttgtatttgttcaaacctctcatagcgaaaaactgaatagtgttgttcaagaatttggtgtgaatggtataagaatgaataaaggcgttgaaggaggaaccactatgattatggaacttccaaattcaaaagtcgatccgagcggtgttattccagttcaatcgttcagagaaacatcagactaaggaagccttcgggcttccttttttcgtataaatagaaaatatataagaggataaactatggccgatttaaaagcaggttcaacagttggcggaaatcctatttggcacgcgggtacttttcctcttgtgccggcaggaaactccctaacttatagaggtaagaaggtttatactgagatagataaacctcaagcaaatgataacgacttcgtgtccaaatcccgtggtggtacgtatacaggcgaagtaaaaatagcatatggcggctctggcaagttaagcatgggtccgttggcaaatgttggtattagagtcggtggtagtaatggtgaagttcttatcatcggagggaattcaacaattcaattgcgcggcggcggaacggaagattccagcggcatagttgaaattgctaaaaatggtaacttaactgcacagactggtagaattaccgctaacgtatttacttctaaacaacagccatctggcgtagacgatttaactcgtaaagattatgttgatggacgaataaatactgttagcaacgtagctaacgcagcagtcaagaaagctggtgataccatgaccggtgtacttagggctaacgctggcgtagttatagtaaataaagcaacatccggtgaatatgctcctagattagatcaggttatttcacgcggggtaacaatagattttggcacatactaagaggtagccatggccgatcaaaacttaaaacaaatacaatttaaaagaactagcacagagaataaagcaccaggtgcagatatcgtagcccgtggcgaaatcgctttgaatacacatgggcgtactcttgccatttatactaaagatgaaaatgatgccgtagtacagctcgccggtaaaggggttcctttcttagatacctccggaactcttagcgttgatggaactactacgttaaaagacaatgtaaccatttctccgaataaagcaattagttttgaaactactgatttgagcggtgaaataactcgtcatatcgttggcaaatgtgctactaatgatggctggtacattggtgccggcggtacaagcaacagtggtattcttgaaatcggtactattgatgatggcgctgaaactattcaattcgtacaacgcggtgcaggcaacgttgaagcccgaaaattggtcttgcttgacggctctggtaatacgactcttcctggcgatttaagattatctaccaataagactgttaaaattaacagtggaagcactcttgttcttgaaatgggtgtaggctctaacgacgtctatattaaaaaccaaagaggcacgggtgttcttcaattaactaatgacagtaatttaacgttcagaaattcacaggtgtattacgctatgagcggaagaggtcctggtaaatccggtactcttctgacgaatgtagaaaacaatcgtcaagcctggcaatatactatttctgctgcaactgcgtcaactgctcgctgggtaaaagtagctacaataaagcatccaggaatggcttcttcgcaactggatttaatgattagcggtggtattgattctgggcacggtagacattacgttgattttatcacgttatcaggacgaaatttaacatcttggagcactaacaatttagataactgggttgaatggcgtcgagttggttctcctgataaaggaaagattccagagtattacgttgttaaaaatgatgctgctacagattcagaggcttcatttgatttttacgctaaagttcctcgatacggcaatgggctttatgttacagtgctaaacactgctggatacaacggccaagatagcggtaaagtaattatctatgaaaccaaccaagacactggtggatatggaccagctggaagtattcttgtttcaatgaaacagatttttgacagttacgcaaaaccagatttcggcgatactacgggtactcttccagttaaccgtggtggtacaggtgctactagcgcaggagcagctcgtaataacttaggtcttggtactgctgctgttcgcgacgttggtgaatctaacggaaacgtgatggaagttggtgcttatggcttaggcggtaatggcggtaaatcaatcgaaaacattacctctaatgctgatatgttgacccgtttaaaagcatatggtggtactttctggcgtggtgttactaaatctggtgttagtgttcaaaatggtctttatagccatggctccggtatttttatgaatgctggcgataccatgtcagctattaatatcgactacgccagcgctaaagttcgcgtatacgcagctaacgacagaagtcttgctgagggaaatgttagatacaacgaactttatggtacagcaaataagccatctaaggctgatgtcggacttggtaatctgacaaacgatacccaagttaagaaagctggcgacaccatgaccggtgatttagctgcacctaatttacatgcttccggcaccggtactgcatcagtgtatgttaatgcaggaagcggaaatgctcatgtatggtttagaacaaacgccaatgaacgcggtgtaatttgggcaactccaaatacagcggatttaggacaaattaatattcgcgcaaaaactactggaggtgtttctgctggtgattttagcttccgttctgacggtcgatttgatgttcctgtagcagttaaagtcggtggagcagcaatgctgactaaagacgggaatattacctctggttcgatgtttggtggtaaccttaacaactatttgacttccattaaaaacgacatcactgctggcgataataagcaagtaagtaaaactggcgacacaatgaccggtaacttgactattaacgctaacttaaaagtcgaaaaccctaatggaacaatggctgattttggttcagagaattcggataagtatagcagaataactcttgctcgcaaagttggtagcggtgctgccgtagcaatgcttaaagttactcctgaaggacacgtgcaatttggttatcaaactgcagtttctactccagctcctagtaaatatattctagttaaatccagcggtcttgaggtagaaggggatttagtttttaatcagacatatagcggcgctgaagaggcagttgatatttccgataagactatcgaccttaatagtctgattattagacgatcagatttaggtactcgtcagttatataaatgcgtatcttctggcggtggttctaagataacaaacaaacctacatctgatggtaactttgttcttgaagttctgtctttacgcaaggtttctgataccgattggtcatgtaagcagacctttactacaaagaacggcggtgttgaaggcacatatatccgctacggacaaaatggttcatggtctgcatggaaagaagttgtttctggtgttcagccaattaatttaggtggtactggagcaacttctgcagcttctgctcgtaacaacctcggtgttggtgaaggacaaactgtaaaattcggtaatttagttacaaccgatttaaccgcaaacggaaacgctagattagtcggaagactgaaccttggttctacttccgcaaccggtgtattacgggctaatgaatctggcgcagttgttttaggttcttctagtggtcaaaacatccacatcagagcaggaagcccagatacttcttctggtgaaacccgctttgagccaaatggaaacgttttagttggcggagttctgacgtcttcaggaagcttacaagtaaatggcgaagctgcgatgagcagaagcttgatcgtttctcaaaacataaagaatactaacgataacagttttattctgatggggaaagattctgatttaggtttcgttaaaaaatctaactcaggcgctaagctggtatttgcttcaggaaaatcatttgttgttgctaaatcatcagcaactgccatagctaatccagcttcggaaacttacactgatgtgtttaaagttgacgcagatggaaaccaaacagtttatggaaactcagcagtttctagagctttgactgtatcaagtacagcaactattaatggggttattaatgccaacggcggtattattgttcctactaccaagtatgtgcaaattgccgatgctcctacacagaataaccaagctgccaacaagaaatatgttgatgataaggttgcttctgctattagtaacgctggcgatacttatcttccattagccggtggtactgtaactggtaaccttgacgtaactggcaccagattaaaaacatggcagttagaagttgatggcaaaagtactctaagaggcgggttagatgttagtagcagtcttaaagtttctagcggaaacttagtcgccgctgacacaaccaatgctggtggtctttttgctaaaaacggtaatgtttactgtgatgcaggttcagctggtacaaactctaactactggttccgtgattctgctggaaatgtcagaggtgttatttggtcaaatggtcaaaacggtgacatgattatccgtaaccaaagtggccgagagcttgtattcagaaatgatggatatctgcaattagcccacttagcaccaggaaacacagataatgcaaacaccgtaaatggaatacgtttacagcgcggtgatacgattttcgatagctttaacgcatggcagtcgggtgaatatgttcgcgctggatggcatttctataacgccgctggagttgaccagtggttagcacttacagatactggtgtaaaaatctggggtagtgctgctaatctacgcgttgaaggtgttggtaatttctgggacgttgaaattcgttctgaccgtcgtgtgaaatcaaatattgctaagattgataacgctcttgataaagtgtcgaagctatctggtaatgtttatgatttacagcttccaaatggtgatactaaaccatcggctggccttatcgcacaagaagtgcaggaagttcttcctgaagcagttacaactgataacgataaagatgcattacttcgtttaaactataatgcagtaattgcgttattagtcgaatctgttaaagagcttaaagcagaaattgaagaacttaaatctaaataatgttatggggcttcggccccatctttgaggagatatcatggcagtaacaggtcctaatgtaggaagctcagctaaggctgtaacaggagaatcttcaatgattgcagctggagcaaaattaaggctgggaacacccttttggatgtccaacatgataggaagaaacgtttggaatgctagtataactatttcaggtaacaaccctgcgacaggacctaaggttcgtggcgcttggaatgataagaacagtgcttcgtggaacgtattacttgattctcgtgggtccttatcaggtatatgggaaacaggctttaatttggttgtttttgggctagcagagcctagtaaatgggacggttataatgatgccatcgttttagaaggcagtgggaattttaatgtaaattggcgcgttgatattgaagatggaagtcagttccattttaacagctctagagattatagaggaagacgatgctataattgtacagacccaaatgctttttggaattggctttacgccaatgatggacgaactttccaactgtcgtttacagcatattaagcatatgctagagcaataaatagctctgtaaggagagcaatatggcaagcaaacaatcaataccgttttttgatatgtttcttgggttgctcgagctattattcaaagatggagccacgggaagagttctcttttcccgtgttttcgttgtcgtacttttagcactattggcgtttgctggatataagtctgatagtcttattacagcttacgtcgacagtacttatgacaagtatgataaactggttcaaaaggatagagattcccgatttgataatacagcactcgaacaactccagatagcacatatctcaagcggtgcagacttttctgcggtctttacgttcagacctaaaaacttgaactacttcgtagacttaattgcttatgaggggactttacctagcacggtagattctaaaaacttgggaggatatccaatcgacaaaacaactgctgaatatagcacgcatttatcgggtagatatttttggacggataaggaatttgttttcttaccaacaaaaagaaaaccgcctgaaatatcgtatatgtttagctgtccgtatttcaatttagacaatgtttatgctggaactgttgaaatgtactggtacaattccaaacctgcattatctaacgaaagactaacatcgatatgtggtcaggcggttagagctcttggaagagctaagtgattacttattactatgcatagccattgttcgatagatagactcaaatccctcgttgtattcttcaacgagaattctcttctcttcgtcagttaactcagaaaccattttacgaaagttgctctgatttaactgacgcccctgctcattcttgattccaatttcattcaagaacgcaataaattcatctcgcttctccatgatatgttcagcattgaacttggtcagaatagaagcaacagtaacaatttcttggacaatttcaaacttagtcattatttttcctacaacataatggattatgtgattatagtatcatcttgataccgcgttgtaaaccagtttatgccaattcccaacgagaattcaaatcttccttggtagtgatatactcagcaccagaggacatccagagcccgtagcgaccatcttttactctagccgttaaataccattcctttccaattggacgaaccctacgattcatccagtgacatacgtcaattgcctcttgaaaggacaagtcaatcagacttccaagcgcgattttattcattaacgcttcaagatatctttgtgattcaacgacagattctaggttatgactcatgctaaaaccacctctccgcgattacctaaaatgctttcgatatactcaactccacttataatgtcacctctatcctttgctttaatagtaataattccatacgtgtggaaatctgctgatagactaaacggtttagaagtttcctgagtaaacgtaaacattactgcttgctctaaatgttttacttctaagtcattagcccaagagttaagaactttaagcctaacttgtaaggtgtattctactttaattgctgaaagcaattcaacgcgtttatgatatgccttggcttcatcttctctgcgtaaagtttcagtattcatagataatctccaatatcataagcatcaacgcatttctgaaattgttcaataacttcttcaggttcaacattagcgataatagctacagtaaaggtaccattattccaatcgtgtaccatccagtctccatagccagcattctgtaggtcttccattagttcagaatggatatcttctactaatccggaatggtcccctaatttcttatggagagcttctaggtcatcacaaataatggttaaagtagtacatttggaattattcagaatgcgcattttctttgcctttatgcttttgcttacgcttagattcctttgcggaacgctttttatctttgtgtgctccgcctttattaaaatcatgtttagctactagattttgcactttcaatttccttgatgtaatagtcaatatctttaatcatttcttctgtcattactttgtacatttcagcaagaaacggtttagcgccgccattaaatggatgactaaacggacagatgtattctttatccatgagagttttcatgaatttgctatctgccattttaaacccggcttcattggtatatgtaccccaattatcgtccatcatttctaacgaacgctgaagcgatttacgctgaatttttaaaagcgtaatgttattctttaatgtactaatcattagtataaatcctctgagaataattcattggcgggtcctgatttaggacgaactgtattaacttggcctgcatgtgtagcgatgattaatgcttcttcgcgtgtgaagtactcaccccactggtcaacaaatccttgattgtctccatggacatggtcagaaactaatttgtcacggaacatatctagaacgttcgccatatcaacagaataatggcgagtgcctggaactacaattgttccaccagttttcaattcaaaacgatttgctgcacaaacgatacgacgttgaagtaatcgtccatcccaccaatcagctactttaaaacagatttcaggaatactaacttcttctggctcattaattagagtaccgtgacgagaagcatcaacaaatttattcatttgttcggaaaacttgctcatttaaagaatcctttaattttctgccataaacttttcttttcacgaataccaatctgacgaataacaggttcaccctgcattttctctaaccattccattgagttaacagcttccgccattggaacaaatttagcaagggccttttggtagttatctacatccatgatatgtttaccatctgcattgtagatagcatagcattttgtgaatttcttatcaatgtatccgataaagtgcccacggaaccatacatcccaacaatcagttgggatattagcattcaagttaactttttctacacaacgctgaagttcattcaatactttaaacttgttcattacagttccttaatagagcggatgatggtttcaatgttttcagcagtacgagcgatatctaagtaagtattgcctgttgcagctacacggcaagacattccgaggttagtgaagtgtttctgatgctcttcagaaatcttgtaaccgaagatacggaaagtacctttgttgttaacttcaagactacgaataccgaatgtgcgtttttccagaactgcgatatagttactacggtaaacagtaagttctttcagaggtaagatatcttccatctcaccgagaagtttcatcatcaggtctttgtgctcattcatatcttcagtcagaggacgagctttacgagtattgcgtttcttcagaagttcaggcttgttctcttctgcatagataactgccgctttagagatgatgtcctgtgcttcaccggtgatgattaaaccgtcaccagatttctcgatgagacctttcttaatcagaacaccgatgtttgagttaacagaacctgcgttcatggtttcttcaaggatttcacgcagctcagcagaagtgatgaaatcttttttagccacctgaaccaggatagcagcagttttctcgttcagagcatcttcggaagctttgatgatgtaagttactttagacattgtgattctccatgatgttttattcaatttgtttggtatgagactataatatcatctgctaaccagcttgtaaaccattttattctgctctctgaaaaattttcttcaaagagcagtaaaaatgttatacgttaaagatcaagaacttatcaccattttcaagtttaagcacccagaaatcatcgtatacacaaagaacgacttggtactcttcaccgtcttcatagttacttgcttgaattacctgacgcataggatactcgcgattaacttcgaactcatcgagcaccacaatgttaccttttacatagtggctcagtcgagtgccatcagcttgagtagaaatataaagaatgtttttgatatcagattttaatgatgtaatcattttgttttactccgtgttgttttgatatggctataataccacagctatgtaagcatgtaaacaactttgtgaaaataatttggggcattctaaggaaggattttggagggatatagatttatatggaaggacctggagatgacctccaggttccctagattaactgaggagcaataaaactaggcctaatacggcaattacagaacctataattaaataaaattctatcataattcttccaggtctttcagatactcggcttcaggagttgtcttttcccagtacttaacttcttgcgccagacgttttgcttcctgagcaagtttcttcgcttcatcatcagtgatatgatagatgttcattgaaacgagtttttcagaatggtctttgaatagttcattctgttcaatttctttagtcagttgcttgcgagttttaccttggataacgatgttacctgcgataacctctttgataaattgagcttttgcctgggcaagattaaacgcctgcttagtttcagcgattttatgctcgattcgtttggcagtgaatgtcttacggacttctacgaaatgacgaattaactcaccggaagttttgaacttatcgttcagcttaccattctcatcgatgaccacaatgtattgactcattttctcaatgagtttaaaatccttcatgattttagcatgacgctgctcagggtcttcgcttaaagcatagtctttacggaatttcaccttaaagccaaaaccagtcttagaacagtcatcatcataagtgatgtatcctgcatcttccagaggatcgagtactttctctacataagaagcacgctcaaacttgtatggaatttcgcttatatagattgagttccgtgaagtttctttatacacgccgtgcagctcaacagaaccgtcttctgtttgaacgatttttccgttaaatttaggaaactgtacttcaggttccatcatttcgccacgaagtgctgctttagtgcattccaaaacagattcaaaactatgcggaagaatagaagttgaataacctgttgcaataccgcgaacaccattcagaagaacagttggaattaccggaagataataagcaggtggaacatgctctttatctttatgcaccggagcgatttctgtgtctttgtagattttacggaagttgtcagaaatccggcagaaaatataacgacttgccgcagcagattgaaccagccgcgaaccgaagttgccttgcccatctaacagaggatagttgttattccatgtgtttgccatcaatgcaccagcatcttgagcagaggtttcaccatgatgatatcctaaatcagctacaccaccggcgacagacgcaagcttatggaatttttctttattaccacgagccaaatcaagggcacgagcaataacaaaacgctgtacaggtttaaacccatcaatcaagtttggaatagcgcgattttctacagtataaatcgcgtattcttttgcttcattatcaatgatagatttcaaatcacgatgacgaagatttgatgccttagccaaatcatcaatagaacctgcttgctttaatagagtgtcaaaaatatccattgtacctaccaaattagtgagccgatttgtactataacatcggaaatgaaaagcacaatataaatcattccataaatcattccatagtacataactaatagaaaggcggcagcaatagctgccacaattaggagtttcttaatcatttgtaaactcctacaattttacaaatgcgctcaaacataataaatgctgcggtgaacgcaatacttccgattactttagtggtaggcacaaggccataccacatgaatgttcctgagcaaatcattagggccatcagaaacaagtaacccatcacgaagaaggttctcattagtatttctgcaaagtaaagatgaagttatcattcagaatacgattcagctcagagtaggtctgcgcgtcacttgaatgctgacgagtaaacgccaatgcaagctgacctttgccataaccagtggtgagtggtttcattttattagcaggaatccagaacacaccgtaggtcatgcaattcgagcgcagagtacgacccaactgagaacgtccagaacggatatgagaaagaacactttcaaatcctgcctttgaacgctgtttagctacaaagaaacgagcagatgcaccaatataacctgctttgccatcattgaacatcaaaaaataaaatccttcgcgctcagtaatttcacgagatggagcacctgctgcccaatcaccgttacgaatagaaccgatcagttctgcgccagcgttatcgagatcagcaaaagtcataatattacgcatgttaatttcctcagttgattaaagtttattctccgataagggccgaagccccttctactaccaaaaatatactactgccgttacaccaccaacccaaaacacaagaagacctaaagcaagcagacgatacacgatgtgtcgtttcatttttgaccttcccatacggtttctactaaagatttaaggccatcggtctgaataatatcaaccgcttgaatagcaaaataaattccgaacccgaatatagcaacaattcccaacgctaccgcaacgataaaagacagaacaacagttctcattaagttaaagcgacgatcaaagccagtatgaatcattatattttcctcagatgaaagcattaatccaaacgttaactaaatcccatgcgaaaacaccaatgaaagtaacgataaggcagaatactacaaagatgttcttcaaaatcgtaagtaactttttcatttttgttctccagtttagctaacaagattatagtatcaccgaagaacaggaaagtaaaccgttaaatgcacaaattacgaattttttcttccagagctttgactttatctatgtgttcatcgcgagctgcagcggctccattgggatacaatccgccgtaagttgaatcgccattatcacaagcaatgatagtataatgccaattcatagattcgagaatcctatactctttcaaaagttcagctttaatagaagcatttccgcgtttagctcgaagcgattttagttctaagtaactcatgttttactcccgttcagtttgtaaggccatagtatcatggccaatcccggaagtaaacaactttttaaaatttgtgcatgatatacccgccagcaccaactcgtgaaggttttactacttccatgaggtgttcgataccgccactgaacatcggtgtgtaccgtatgacattctgggacacttcttctgcaacgaatataattatacagtctgcaactttatgtttaaacatgggccctagatttattccacttccatctgggaatggaccgtctttaccagttgtaacattaatccatggcttatgatttgctcggtcatgaacaaagtgtgttttaacttcaactctaacaccttggtagtagggatgagctaatacgtcccaggcccattcatacggatcgttgttattatggtcaacaacttgatcgtttacgtatccatcaagaaaatccgctaccacatactctgccggtatagcaattctacatcttttaagaacatcaattctgtcttgagatgggtcgatatctaaactatatcttgcagtatcaatgatttttacttttgcttcaccccttagcttattcaaatctagggtaaatgtccgcaactggttcaatctctgcagggctttgttcatcaatgccataaattcctctgatatgtaattcaccaaaataaacacgatcgtcgtggttacaagtgtctggttccacaacaaaatcatcaccaagttctacgagttcatcacagtgcaaccaagcatagtgaacatcaccttcatgtttaactacatgatgacaaaacactgtagcagcatgatgagtaccacgaagattaacaactttagaatgagatacgttaaatggattaatcatgtttcacccataataaaagaggagcccgaaggctccttataattagcgaagttctgaaccccaacgatcagttacatcttctaatactacataaccacatgtacgcattttagcgtcgttgtaatcaaccgggatagatactacatcacgcggatgaactttaactgaaacaatacggtcagaaccactaccgaagtgaccgatgtaagatttagagcagacatgcagacctgcggaacaagtacgctgatcgtcttcatctacctggttacgcggcattgtaacagttttaccaggagagttatcaaacgtgtttgaagcacagtccatataagtggaacgaactactttccaaccaatgaagtgaccatcatcagtgatgtcgatatcgtttgcattcaggaaatcaaacagacgataaactgcacgacgagacgggttcagcatcaggttttccaggaaaggcagataacgtttaaagtcttcgccatcttccatggctcgaactatacgctcagtcagaccagatttcagttcaatatctttatagaacagcgtaccatcttcaattcggacgttaccctgaacgaatttcttgatgccttgttccaggttaatgtggtcaatagcaccagcgatatcgccatctacaagtttctgcagtgcagatttaaatccaggatgttggctatcagcattataagtagtacggccttcagtaattgaaatgaatttggaacttgctgcccatttaaattcacgctcaacaggagcttctactttagcaggaacagctgccgcggcagctcgagcttcacgctctttaaacacacgccgaatagtgtcacgggaaacaccataattctcggcgagctctttcttagtgtacagaccgtttttgaagtttttaacgattgcatctttttggatttcagacagacaggtaacagccatttattcacctttattttcagaattttgagtagaagctccatcaaggagctccatgatttttacgatatcatcgacgagtttgctgtcagtccgccaagtatccaagacacttgcgatgacaggataatcatctttaaactgttcaatctttttatagaagattgtctcagcatcaccagacagtttattataaattttattacataaagctaaatcatcgttttcatctttgattttactggtacggcaaaccttagcgattttgtttagttttgtcaggaacggatttttcattccagacgcagtaaacttactcgacaagaaattcaatttatcgtaatgcgcaatatttccacagatacggtttccagtagcatttgatggcatgtactggtcataatctaccttatcaatacacttgatgtattggtcgataataaatcggtcaaatgaaagcaatccatcagcttttgcagcggctttcatagcacccggacgaattgcatagaatttcttaattccacacgcttctgccagagaccgcatatctgtgatgctcatattccaccaccaaacattatctgggaaagtgtggatttcatcacgattgcgaccgattgcataaccttcaagctcagcaatttcagatgatactaaagtctgacggtcttcttcccagtacccgtctttatcaatccaatgcagagaaacattaggagattttggacgtttctcttttggaccagtgtcataatcaggaagagcttttctctgggcttcaagttcagacacacggaatactacgacttcatcagtatccatgattttcttcagctcatcaatgacatgtaattcatcttcattgtctttgattacagtaatgtgtgcccagattggaactaacccagatttacacagagctcgaaccgtagcaatacgtttacccgctttatcgtcaataagaacaaacgctttagttctatcaaccccgcaaatatcagaaatgtttacttggttatgacgatgccaagaactgcttgacactttacgacgagcaggttcatcgcatgaaacataaactgatacttcgttatctacataatatgaacgaattttatcaagattatacttcgcaactacttgtttaatatcgcggttcccaatggtaataccacggctctgaagaatagaacgttccttagaactcagcttattgaactcacgcaagaattcacggtcagattcatacgcttcaaacgctttaatatctgcggtaattacctcttcttcaagagcattcacacgcttctggatattagcaattgtttcttcgtcaagagaaagctcttcacgagatggagtaatgtctaattcgccaagagggaaatgaacataaaccttgccataacgattaagcagccaatctgccttaacatctacaccgctaatcggatatacgatttttccataaactgcatacagaccatagctttcatacgaactattaacgctaaaccaatcagttttatctactgggaaatattcaatttcacggcgaagagaatctacctttggaggtacagcaccaaaggtacgcaaaatatatgcgatttcataatgccaagtatcaatatcttctactttaaccggaactgtaatttcaagaccagtttcttcgtcttctttcatatcatcgacaaacatcggacgaatagtaggttcacctcggtttttcatgacagtataaccggtggctttaccattatgatatgatactacattaaatgtactcgtgtagctcagtggagatttagaaccaagaccaagagcaccgatgaaatcattactgttattctttgtggattcaaagaacgttttatacatcgtcatcatgtcattatgattaagacctgggccataatcacgaattacaaagcgcgggtcaagacgagttggtgctttgatgtaaaatggacgattttcattgccattcagtttatgagcatcatcgcagttagtagaaagttcacgaacaacagcacgaactttatacttatagagtttgtttgacaagatgtcaaaagctttacccgaggccttaatagtaaacgttgaatcatcagcgtcagaagaaccaatgattacttcatcatcacatttaattttcattttattcctatcaattatgtcgtttaatgatttctgctacttcaaggagctcttcagcagtagcggtgttagttgtaaaaattttattatggatttctttgaagcgttctttgaattcctcagctgcttggatgtcaaagaaccgctggatgatacgatattcacgatatatagcatcgttgaataattcttctgatgggatgtaactgcgtttcataatattttcctcagtgatttagggaaattatatcactataactttaagcaagaatcctagaatcatctccaagcacttcttgattaaagccatataaatccattcttataaagaaaaagggacccggaggtcccttagattaccacaccctactaactcgaccataaacctcatgtttagaaccatcaatgttttccacccagatagtaacccaagttccgggcagaggtttcttttcagcgaacagatatccatagtcgcctgagatcaaagtaatccaataacgttgcatgttaattccttctaagtaagggcaatagtacccttactatttattctttattcactcatccatgtcttacgtggtgcagcatcattacccataattaattcaaacagttctttccagttttcaggaagagtgactacatcataaaccgggtcttgaataacacgttcgtattcatcttcttcaagagaaccaagacctttaatataacgaagtttccaacctttgaaatcatctttatggtcttcatattcaccaagagaatagaaccaacgttgttctttacctttggtgagaataataaccggagttttcacaaagcggattctaccctgttcaaacagttcaggccaattactgaaaaacgctaaaagacttgggaaaattgaaccaacaccatcaacgtctgcatcagtcatgatggcaatatttcgatagttagtattttcagcgggttcaccgatagtcaaaccagtgattgcacaaatgtcaaatacttccttgttcttcatagcatctgcagcagacattccccatgtattcatgaacttaccacgtagaggatatccgccatgaagttcacggtcacgagttgtgagcagataaccaatcgcagaatcaccctcggttaagaataaagtggtgtcagcatctttgccatatttgttggctttgatgtgcttagctactttagctttctgcgctttcttggcagctttagtttctgcagctttctctgcagcaagtttacgagctaacatcgcctcaataatcggcatatgaatatcttcggatttcataatagcgttagcaagtttcttataatcaatatcaatatggctacgaatttctccccaaggagaagtcagacgctctttagtctgagaatcaaatcgcatgttagacatatcacgaataaacatgatgacagtcagacattctttaattcgcgctttattaacttctagtttgtacttacgctttaatgctggaataagttcattgctcagttcatcaagaactaggtcaacgtgagtaccaccgtttttggtgtgaatgttattaacatatgaaagttgacggaacccgtcatccgaacgaccaatggcaatagcacaagtatcagaatcctgcactacagcattttcgtcatacatgtgggcgtaagctttaaacttgccttgaacccgtttacccatgaatttaaattcaatatcaggataaactactgctaacgtcatcagacgatcgtgaatgattgattggtcaacatcagttaagccatcagattcaaagtgggtgaaatctgggataaatgacacgacagtaccagtcttgtctttaataaattctttatctttagctggatgttcttcccaagaaacattctctgcgccatttgaacagcggacaacgatttcattttttccatcacaggttgcacccacaaatgtcacagaaaaaatattcgttaacgcagaaccaacaccgttcataccaccggttttacgctcagcatcatcaccaaagttaccacccgcacgaggacgagtccatgcagctactggtcctggaatagtttctccttcaggtgttactacaggagcctgcggaagaccacgaccattatctgttacaataattttgttgcctttgacatcaactgaaatcttattcgcgtgtttgaaattagtacgaatagcttcatcaacagagttatcaatgatttcatcaatcagtttgataataccaggaacatactttactgattggaatttaccaaaaagaaaacggtcatgcgcttcaaacgcagaactaccaatgtacattccgctacgcttaatgatatgttctcggtcactcagaattttaatttcgttcttaatcattacatttcctcggttagtgaaggaattatatcaactattaattatagcaagtaattcttctttgatatacatcaatttaccaagaacctcatggcctcctttaaccgctttatactcgggatatcgtggccgctgtcgttcaaacatagtccattgagcatcactaacgttagcgtatgcatatcgagaatttccgtagtactgttcaatccggtactcgttgttttcattaagtgaaatccactcttcacagacttcataatatttctgcatccaaatagtacgaccattcacgtcattgattggccaccaagcaaacctgtattttccaatagctcgctctaccatttttaattgccgtttagcacgcctttgtgcagttgtcatcccaataatcataatgttctcctctggccaacaagactataataccaaaacacgatgtccatgtaaacaactaaatgacccgaaggtcatttattcataacgaattgtgctgttcttgagaaaaagccctgagcacactgttccgttaacaggttttcctgttggcccaatagccgtaaagcctgtgtgctgaaaatcatcctctgagcaagaaaagaacttatatccagtgattttgatatcagtaaatcccgcgttatctaacacgcgagttgcgttatcagcgtcagtgcatccaatcatcatgaaggcaagcgctgtaattaaaatctttttcattttaatttaaccctataagttatattacctactttaataacccggatttctccgggtttcatggtaatgcgtgctttagttcccatcaataatcaccactctttaatccatcgtagtgaactgccggagcagaaaccacccgcttcatttggccttcacacttagggttaaagcagttaacagtatagtcacgatgggaaattttacgcataatttctatcttttttccacagacttcacacttgtaatcatacgttggcattaacagcatccttccatttttgtgttttgaccatgatttgctcattcagtgcacgagtaaccatcatggagatttcatcatctgatacatgagtatcatttttatggcgatttctgaaatgcagccaaagtgcatccactacacagttaataacatctgcgcactcgccttcaaattcttctttctgccgccatggacgattaatccaatcacacatttctccagtttctgaagaaagttgcagcatgacattcccaatgctacggttgggaataggataagataattttgatgcttcaaaaataggagctaaatttaacattgatatgcactctgcagtgctgcaatagcagcgattgcttgaccacgattatgaatagaaagattcataaccaaatcggttggaattacattcgcggaagttccaacttcagtaaagtatttgaattcgctatcaaaaattacaaggtcttcaccaccaacttcatcacattctgtgccattagcccacgtaattccggatactctgttattttggtggtcaactttagtaacagtaaaactcccgccattttcatggagttcatacacaaagtcttcattaaactcataacgtgaagaaaattcttcttccgcttcatcattgacgaatttgtactgtacgccttctttaaaattcattacacaatctccatgtattctgggccatcaactgtgattacacgagcaaaggtacgaactgggacgatatcaccatggttcgcgaatacatacaaccaggtccaatgctcttctttaccgaaggttttctctttctgaacgacaattaagtcaggattgaacagaatgtcttcaaaagcttcggcagtaatttttacggtgttttcagttttcatgttattctcctcagtagttgataagataatagtaccacatccttgtggcaaagtaaacaactttttatactaaaccttgacgctgtgattccgtcggctctacatcggctttaggcagaaccgcatagttaccttgaaatactacatttactaaagttttaccgtcttcttcccactcatcagtgacaagaacatttttatgcagcgacagattagtggctgaattagtagaactcaccgattgggtaataacattgtccagcgaattcacgtgtacccacttgcgcagatagctttcactagattcaacgaattttttcaagcagtggatgtaatcaccaaaatcttcacggtaaatcttatacccagatttaccgtcattacgattaactactttaacgattacaccattgtgaccaacccacttaccaccaattactttaacgttttcacctacaactaaacctttcatcgtgtttctctcagtttgttaatgtagagccattatataacggctctttcataaagtaaatagttatcggtgagaaatttcacacccaacatcgacgccgaacagatacccagcttcccagcccttagccatcatagccttggccaccagaaccatcgttggagagatttccgggaggatttcccggttgaaccactcttcgaagttttcatcgaactcaaactcttccattagccacgccccttaggtaaactcagtggatcggtatcttctggacttggtgcttcgcttaggcctagagcatagcgttgagcatatttaagcattagaatatccttagcgcagtcatggatactatcatgcgcgataaacccgtcgagcgtaccctttggaagaggggtagttgtcagaccacgagtcagaagcagtgattcaatcgcggtacgaatatcacgctgattccagaacttacacggctcttctttaaatgtatcaatttcttcttcggaaattccttgggctcgttgaacatcgcgaagacaatcaacaaaaatcggaaagtcaaagctctgtccacgacaccagccaaaggaatcccatgggtgaattccattatcaatcagatattgctgagcttctttaattccagcaattactgataaatcgtctggcgttgaggccaggttagcccgagcttcagctgattgtttcttccaccactcaagagtagacttaccaaacaaccgatgacctttctgggatttaaggtcaaacttaatacgatgaccacgtttaaccaattcatcgaagctttccaaaacttcggggtcagaatcaaaggtgattagagcaaggtcaatcacagaagagcttgacacatttccgaatgtttcaaaatcaataataaagtctttagccattttgagcctctagcataaatttaatttcgcgtaactggcaaccaatatattcgctcagatacacctttgggtcatatcctgtgaaccaagtaatagcattagcattatctgctatatcacgaagctcattcagaactgtatcaattttaatgttaatagcacgcttaacattgtctggtgcttcaaacttagattcttgtaagccaacaatcattgtttgaaggtcttctaatttcaattcaaacatattacctcacacataaaacacatcatatcgaccacgagtagtaccaacatataataactgctgtgcgagagaagcatctgccatgtgaatgcatggagtataaatgaagcttctgtcaattgagatgccctgggccttatggaaagtcgaagccggtaatgctttcactttatggaacttacgcttagcatcccagaactcagaccagggtgctttaccgcctttattccagttcttatatgtatctgcagtttttgccaagaaaaattgaaacttattcatttcttcttcggatgagatgacacagattttctctctagcgtactcttcatcgtcgccataggtttcaatatctaatacccaatgacgaaccagatattcacctggaacacctctggcacctaaaaatgacgtggtttcagttgcatctaatatgcgaacaaactgaccattattgaaaagaatttcgctgaatttctttccttcaaatttaagttccttggtaagaggttcttgcataacaacaatctcacctactacgaatggtcgttcagtttcgtatattcttcgtctgattatttcattcaatttatccacagatttattagtgaacgcaagcattcggttttcaaataaatcttctggtgttttaactaaattaaaataatttagcataaaatctttaagggcagttccttttgtaaaaccacggactccatgaccatcaactacacagtcacgaatccatccaccatttctgatttcagtagcgacttcaatgattggggcattactccgcatcacctcggtcaaatgaagttgtaagaaatctttatgagtgaagaatggactcagtgcaggttcattacttccaggttctaccggacgtatctgagccttatcaccaatggcaatgacaatacaccaggcaggaatagttgccatcaaaatcttaaacagtttacggtcatacattgaagcttcatcacagataagaactcgaatagatgccatatccggaactttcttttgttcaaacagaacgttttcttcatatgtcgtcgggttgattttcagaagactatgaatagtactggcctgcattccgctgagcttagataaaacctttttggccccatgcgtaggtgctgccaacgcaatgccagagataccctgagaaatcaaagcgtcaatgataaatttggttaaagttgttttacctgtaccagcaggtccattaatcgtaatgtgttgacctttggctccttgtttgaccatttcaatgactttattaaaaatcgctttttgactttcttttaattggtcaaacgtaatcatgccacttttaccctcactacatgtagatttttaatttttgctttgagtttttcgcgctcaacatcgctaagtggttcatacactagctcagttgttttccaccaaagcattcctttggttttgctttttccagtaaaattcccttttgctaatttgtctgttaaaaccgacattgtacgaatccgtgctttattagccgattcttcattagtgaagaccacacatcgttctccatcgtacatatcagttgtgactggatggtcaaatccgtctttatccttatacgctactacatatccatagtgttgcattacattttacctctcaaaagttggaagaaggacgcagtcaatggaagaccttttttcaattttaacttatctagcattgagcatttttctaaccgacgaagtgagctaacaattagccgtattgattgtacacggatttcagcatctgacggacgattcggaactgacgctaaaatagcagataacttacgctcaactttagctaattcagacttaccaccactgatacgagttctcaatgcattaataagttctaaatctgccgaggttgcagttccattcttttctttttgcacaaattgagaaagatgattttcgcgattacgtaagttagttttaattgatgttatagttttttcatactcacgaatcttttccaaacgagaagcttctttatcacttgttggcttaacagaatctgaagaacgaactatgcgtgctgcgatttcattcgcttttcgttcaaggccttcaatcgtattatttccgcgcaaaagtataatacttttgcttaacaggaataacattccccattacataacccaagtcattattccaacgctcgagcgtcatgctatcaggatgatttcctttaacagttccaaacttttcgcctgagtatgcgcaatgtgtctgctgcatgatgttaaacagatattctggggtgagattgaactccttgtgccgacgttgagcagaacctaaagttgtaattaaacgagtataaactttagcggtttcagcagtaaatttcatcatgttttcctcaaaaatgctttcgtcttacggacggtataatgggtctaggtccctagttctagataatcactagttgactaagctatagtaacactaaagtagtccataagtaaaccagatttttcaactttgttatgacccaccactttgaacttagttcccatcggtagcatcctttcttgttctttatcaatcatctcgatgtcagcgcttctgcgctgagcaatgttatcaatcacatcatttggtcgcatgaattcagaatctggtgcagtaattaaaagcgatttcatgttggtatgataatcaaatgattgctgacaattattgacttcaatgactacaaaggtcgagtaatgccatttgcctgcaaattctcgggcaatcgtttcatctgttgtgaatgatgctacctttccgaagtcaaatttctctcctttaataagagcgtcataaaaggctttagcctcgcggcatgatagacctctatagagaatgtcactgttatcaatttgatgacgtctaacgatagagtcaagtttcttatgaaattcttcgccaatcttattgttcatgcactgccacagaattgactgttctttgcagtcaaaacgattggctaatgcttcccatacgcttaaatcatataaaggtaatcctttgctttctcgcgcgaagttaagaacatcaatggagcgaatgggttcttcgataggaataacctttgataattttactgaaatagatgggtttaatgaaatagccatgatattctccatttttggttacgagaggtatcatatcatggctttttagaagagtaaactactttgtgaaattattttgcccacggagaccagggcggcgggtcagaccagattgaagctagttcatctagaagagcttctggggctttaataccatacttctgtataattatacggtattcgtctttgatgtccttagaaatcactggatgaacctgaacctcttcctgaggctcttccatcatttcaaacaaatccatcacatgaaccactccatccgacgatattgactgttactattattatatgcatcagcagctttttgaagcaaatcgctcggagtaaatctggcgaaatcagcttgcataaatgaccatactaactgagtaaatactataaaagcgtcttcattgtcaatgacgatacttttgccgttaacgattttatcatttgcatattcaaacagatcggtctcatgatatgcattggtatatcctttaaggtgtaaagcacctaaaatattaattggacttcctggcatgtgtgaaacatcaaaagtatgggctgttttgacaagtccatatttactattaggacaccacccgcgtgcttcaaatttattgaccagttctttaaactcgtcataagaataattgtaaattgctacagtgaatactttatcagaatcaaaaccttcttttagtttgcgctgtaaacttactttatagatttttgcgtcggccacacatagctccttcagtcatgttgttgtcttcaaaccacttatcatttgctttaattaaagcaggcgcagcttttagtaataacgctgcagctcttacacctctgtaccaacaatcaaaatgagacttctttaatggtgattgataccagggcttagtataacatatcattttgttctcctcagttagtaggaataatatactattcccaatatagcataaaaggactcccgaaggagtccttaatttttatacttctgcatcagatggaacagcttcaaacattttcgcgttggtggttgcccaagttgcagcatcatcaactactgttgaataagcggctttttcggatgggaaaatctgatactgtgcattagcaatgcgatgtgagtcagaatataccttaaaagctacagatacttcagtacctttaacctcgccatcagcagtggtatggtcaaaagttttgatatttacgtaagccattttaatctcctatttagtttacaggagtatttatatagctgctgtaagcgtctttaatatttctttatcaatttctcgagtgatttcttctcgaagggccaatactaaggcccgttctttttgttttctgataatttttaaacgacgcttagatattcttttagccatcagtaaccactgtcttgacgagcaaagttctcggcgtttttcagataatacagcttaaagatttcttcagaatccagaccaagcgccataaacatattcagaacaaagtgcaggatatcaatcatttcaaatttgatttcaagctggtctttatcagacaggtctttgatataagtttcctgcatcttgacgtggtcagctttccatggtttccacacagcactagctgccttttcaccgttactcataccgccaagagacgtcagcaattcgcggaattcgtcatcaatgtaatctttttgattacgcagccactgtacgatatcaccagcttgagccaattcatcaggatgcatgttagtaccaggcttgtcatttgcaagacgaacctgaagagatttttgcatatcaagcattacttgcagagggtcaccaccaactttgcgtacgatacctgcgtatcgggcttcagctttatctgcaccagcgatcagttgactacattcgttgaaatgtggcatgttatttttcctttcttatgaagttttctatcatacgtctatagcagatattaggataacctgccttgacagctattttattaaattttgtgcgcttaggtctattattataaacccacaactcgtaaagcgaatcatacgagttccatatctcaccacgtcttggattcggtaaaccgtatctaggagaatttttaccactaaaccttccaatacgagcattgctcatgttagctttagcttcttccgaaataactttgcctttgtgagaagctcgcattttagccttagtttcttctggtgtttttaacccttttatccatgatggctttccaaaccttggattattttcacccgagaaaagaacagagttttggattttaagggtttctattaatctacttgttaatttaacacctttattatatcgcattaaatttacagcataatgcaatcctttcacatttggatatattttagttaataatctatgagctataaaatgctcgcgcgcagttaactcaacaagattgtttttgtcatctgctcctcccatacatctaggaattatatgatggcgttctttatatccatcaagatgccggcatttagcctttgtaactaaagctgagtaaattttttggtaattcacagatatcctttcaattagataaatattatatcacttaacataaatagcaggaggattcatgtctgaagtgaaacaagaatgtaaagacaaaggaggatttggaagatatctttacgtcggaatcgccactgctgctttagctgcatggaattatgtggtagttccattagctagcacacacggtctagttcttcctccaatgccgttagaaaaagttgtgtcgtttattatgaccgaaggattgctttaatttaaggggctttggcccctatatcttcgcgtatttgtcaaggcgcaatttagccattaaaccttgcgatatattttgattaatataatccgttatttcagaagcagttgccccctctttcataatcatatcatttatatctttgcttttccaaggcgacttatcccagaaaactaccttttcacccgcgtctactaaacgcttcatacgcttaatcgtatcaggatgacgaggttcatggtccataatccatgctcggttatcatgacatggaacttgagctaaatctaaagacccaccggtaattgcaatagcattatcaatgaacagcgaatctattggtccttccatgacgaatacgagttttgactcatcaatagtgtcgagaccataaattttggtcgcgtgttcgtgggctttgattgtgatgtatttttgtggagcattctttcgtagtgctcgtccttgaaacgactcaatctctcctttcttgttgaagataggaataaccaaacgtggttcgttcgtctcattcttataggttcctggattaacggagttaacaagagaaggccattggttagtaaaccataaccttttccaagaagtgcttggaatacatctggcagtcacgtatttaactatcggatgttccttaggaagtctatctaatcgctcgcagaaattaagtttttctattacggggagttttgcattaattttctcagacggttctacagcctttggcttatcaaagacctgctcctttcttttctcaagaagatactctcgatagaggtcgggttcattatctttaagatactgcgatagccacttattatactcacagttgaagcaatgacagcgtaatccttgacctgcatcaaaaatccagaatcgtgctttattgatatctttctgtgagtcaccacaaattgggcaacggcagtttaacttgaatgttgaagatgtagtaacgtgtctaaatttaggtaggtgagatattgcgcgaattgcatactcgttatcaacccaagacataatatttcctctggccttaaactaataaggccattttatcactttttcttggcagcgtctttatccgcttttcgtttctttggaagagtttcgggtcctttattgacgatgtccccggaagttgtacctgatgcaatattctgtggattgccgcccgcatcacctgcgaccatctcagtaacaaactctttgtatgttttcatagagcctcctactatttattcatgcgtaatacgtaagcatttatatgtaggatacagcgtcggagacattgattttggattgtctttgataagcataaactgcttgcctgtatcttcacacttttgcttaatcacggcttcatctttaccagtgaatgccatcttttcagtagacattccacctgaacccgtagatagcgccattattaaaacgtatgtaatcatcctaaaatccacttaacgatgttgaagttatcaaactgggcatcacagtaaagaacataattcaacttaagtgctgcgccgtcgtctttaagttctgcttgcacttctgtttgtttgctcgggtctacgttttccacaatatgaccaacatctgcacgaatctgctgagctacttcagactcatcagcagtcattgaccactcgcataagtctttgtcatagttggccatggcaggaactgcagagcaacttgatactgcgaacactaaagcaagtacaatctttttcattttggtttcctcaagcagcttgtacgttaagagcagaaatcaggcgataatcaccgtttgcgtatactaacattgacacattgccatcagtgtttttgaatggctcaacaactactaaaactgtatcgccttcatctaatgcttttcgtactacgccatcacaacgcagattagcatgtggagatttaactactttgcttccaactaccataccgcaatgcggtacagtttccgctgattcatctttactcttaaagactacgtctaatgctttttcaattgtccacatgatgttttcctctactcgttttgtttcagtaaggccatagtatcatggcctttggagaaagtaaactaccttttgaacaattttttcaacaaaatgtcagaggtcagattcttggtaggtaggtatgtagcagagttaacccagatgccatcgctgttatacaccttgacctctccatagtcgcatacagataggtctgctttgttatatgcctcaatgcctcgatgaatggtatctgtggctgttacaacaaaagagtgacctgactggtcacggaccgcgctaaacacaaaaatcatagaattccttagaattttaactcttctgccagagcatcaagcttagaacgtgatactcgttcttgacgattagattcggctacacggttctgtgcaccggcaccttctcggacggtattgcttggattaggcttagttgggtcgttttgctgctcaatttctacccaacgctgattagccttatgtacacccatagagaacttattgttgatgttcttatcaccgtaacgtgatttaatctgcttaattaattgttgcttcatctgagcaagttcaggggtttcaatcacagccaacataaagtctgctgtagcaggtagaccagcagattctgcaatatcactcatgtccatatcagaagcatcccacgctgaacgacctacctgagctgcggtccaaagaacagtttcagattctacagccaatgcacgaagttcttctgcaatagctttaactaacgtgtaactgttttcagtatattgacgaatacggcaagaagcacaaataccaagatagtcaatgatgataacagtcggtttaaagttcttcttgagtttcaactcattcagaagagctcggaatgtattagcgttagcaccgccagtcggatactgtttaatgattaaacgaccaagagtactagaactacgccatttttccattttgcctttatattcggcgtatgatacacagccatcatcaatatcgtcaagtgatacatcaagcaaattagcgtcaatgcgtttagcacaaacttcttcggccatttccatggaaatataaaggacattatgccccatctgaagatagtctgcagccaatgaacacaatcctaacgatttaccaacgttgacgccagccatcaatacgttcagcgtaccagtctcggcaccacctttagtaattttgttcagaatgctaagtttaaacggaactttacgagctttattctggtatgataaccaacgagcttcataatcttccatccaatcatgaccaatatagctatcaaacgatactgataacgcttcgcgcatgatatcaggaatagctcccatatcaggaagacgcttatctcgcttatttggctcaagctgggcattagcctgaatttcaataattcgagacgtagcgttatacatagccttttcttgaacgtacttttcagtttccttaactaaccaattcaaatcttcaggagcatcagataacttatcaataagtttctttgcgccttcatgttccgtttcagttatagacgaattatccagtgctacacataacgcagtctttgaaggaattgctgtgtattcattaacgtgtttcttaattatgttaaacaccgtctgagcaggtccttgctcgaagtactctttgtccatatatggccaaaccttcgtaaagaaagcctggttgtaaatcagattagctaagattgtttctaccactttaacctcttaaaagattttccataatgattttttcttggtctttaatgcactctggatttgttgtttaacacaagcttccacatgaggataaagttcatccttatgagcttcagatggtgtactgaactcaatagttacttcccccgaaggagaaatatttaatttatgaacataaaccaagtgtgattgaccatttaattttatcacaatttcttggataacagtcttcatagcttcttggattatttcatggcttttcttgaacactcgttcttgacgctcgaagtctccctcttccgagggagattcttgttcaaatttctcgagttcagattctaaatcaaactcagtcttcattcatgaagttctctaattcatcttcaacttcagcagctgatactgaaccactctcaggaagtttaacaccatcaaccttagttgaaacttttgagttaatcatttctgctaccgcttcatcaaccgcagcgtttgaatcaatagcacccaactgataacgggctttgatagcgtcacggaatggctcatgcttaaacagaggaccccaaaattccgtactgctcgtatcttttgcccgccaggatttttcttcacgaatcatctcaccggtttcaacatccaggaattctcgtgcataccatccgtttttcggtttaaccacaaatccgatatccagagccatatcaagcagaccactgtatggatcgataccgccatcgaatttaacatcgatgaagaacttacttttctctttgacagtacgcgatttctcagcgttcaggacaaactgatatccttcaagctcagtaccatctttaatttgacgtttaccgatgatgaacacagtatccgcagaatacataggacctgtaccaccagtcattaccgtcttactgaacatctcgatagtctcgattgtgtggttaaccgcgacacaaggaatgttcttaatagagaagtaaggagttacgatacggaagagagacttcagacttttcgcacgagtcatatctgcaacagatttctcgttcagagcatcttcggtttcctttttagacgccatgttaccaatagagtcgataaacacgatgactttttcaccacgctcaatagcttcaagctggttaaccatatcgatttttaattgttcaaccgactgaaccggtgtatgaattacgcggtcagggtcaacacccatagatttcagataagctggagtgataccaaattctgaatcatagaacaaacagactgcatcaggatacttattaagataagcactaaccattgtcagagacatgttagatttgaagtgtttagatggacctgcgaagatagtcaacccggactgcataccaccatccaacgctccactgattgcgatattaagcatcggaattttagttctaactacatctttctcgttaaagaattttgatttagtcagttctgctgtcattttagaagtggatgctttaatcaggcgagattttaagtcagacattcattatattccataagtctccattatatttttctcacaggttaaaggatagagtaattatattactttgttcttgaagctattatcagaagttccatttcttcttggtgttataaaccactgtttccatatctatttcatagtgtattttacatccaacgcacatgccatgccaccagcaatgcattccatctgagccagtagttccttcatgaacaaactcatcagatttacatacgaagcatctgaattcttcagccttgaatatattaccagctacgtcagatttatcatagatgttcataagaggtccttggagggctttcgccctcacagatatggttctaccttaccaaattcatggaaggcctgagatttcactcgagtgttaatacacatacgaattgatttcagaggttcattatcaccgaataacccacgtctttcgccgtctttagatttccaacgggcttgatttgggaaagcagcatgtagctgttcaagggctctattctgacgagcagtatcacgctgtgtagaacaaccaccaggagactgcactttgccggatttaacgagatacttaaacagagccagatgaggatgacccatgttaattaattttagaaaagcataagcatcttcgttaaggtcaataactccgtaaccaatatcttctgcggtaagtttagtcaaatcatagaaagtattggtgaacccaaaactattctcgcgataatgaccccagcttgatgtgattttgaaaatcggcaagcgagcatgaccgtgataataaccacaatccatagcagtctctacgtatttgaccatatcatcaaatacctcttgactcattgcctcgccggcaccaagtggaacacggcgatcgtcgcgttcacgaatttcagtcagatgaatggtcgtatcatcatcaagcatccaaattcgttgtcctgcatacatttcagtaatcagacggcgagttcctgcaattccatcaacatcatcggggacagtaacgattttagcagcatgaccgtgccaagtttcgtatgcttctttttctgattcacgtactacaagatgcggaacataaccttcaggaaacatagtcagggcagtaactgccccggcacgcttataacttggaattacaaactgaatcatttccactcacctttatagtctttctttgcaatatgagtttcaccagtataagcatagttatctacaagatagaaatgacgctcatacacgtgcaaagacccgacgttccaaataatgtcaccaactgaataatttttacctgatgcattcagaagtttggttaactgttccagaacatagagctgccacgcatagtcattacgatatccaaagacgacatcattagagcgcatgtttacaacagcatgaactttattatcacgaatcagatactgaacattgttagtacacatgaaatcactcatgccatcgcgctcaaaatcatactgcatttgaggtcgtgtataaatcataattccgcggcgagaatcaggattactgataagttcctttgcgcagttagcaaactgcgaatagttttgtgatgaccaaactgcccagccatagttagaattaatctcaccatgtttggatgcaattgctttccaaatagctggggtttcacctggaatatctttaacgaataaactttgagatttataccactcaagttcacgggcaatgtacccatcattaactgcaccaaaaatcaggggctcatctgcaataaatgatgcacctacgatttcaatagtcttcacacccgtcttatcaatcacaaattctttgttgagcaaagcatcagcgaattcttgacggatatcttgtactgtcattggagttacaatcatgagacctcttatttaacttgctggataataattgtattctgctgtgcgttagaagcagaccaaatcagcgcaattaaccaaccgataatggaccaaccgaatactagatttgtgataaagattccaccccgtgatttatgcttacgactgcaagctacaaaggtcggcaaaaaatagatgaagaaaagaatgattaaaccaaatactgcttccatgttaatctcctcagttagacatgcatttgttgtagatgtgattttggagagattttaactgctccatacgttgtttatgctcattataactcaatccgccgttagcaaaatcagttaaacgaatctggtcattcactgctgccgcttgagcagtgcatgtacgttctttttgagttttacgcagacgcttaatttcttccagctcatgcttattctgctcaatcatgtcgagttccatcgcagatagctgacgattaggattagctttttctttcgccaaccgacgctcaaccgcgagcgattcagcagagacctggttgctagcacgatagtatcctacagtaccgccaattgctcgcacctgtccaacagaagaagccgggacgatatcaccttgtggcatttgacaaccagtcagcgtgagagcaacgataacagcaagtaacgatttcattgtaatctcctcagtatgttatttcgagaacaatggtaccacatccttgtggcaaagtaaacaacttttttaaaaatcgaacatgtcaagaagagacgatttctcttcatagtctaaccctgccgcttcagacatacccgtcagaggtttaacaaacgatttttggaacagaacactgtggtcaagccacactagaacttcctgtcggatttcttgtggcagctcagtgcccgatggccatgccatgcatttctcaccgtacgggttaccttcacgcagcgggatgaccatcaccttctcgccttccatgattggtgttataccttcaaagcccgcggtagctcggttatacgctaaagcacctttgacgtgatatggcgtacctttatctggatatcctgcaccatcatcatacttaccgatgttgttggcggtcttaacttctgctattactttatagtcaagttcacgatactcagactcaaactgcttataatattgctgtaaagattcttcaccttcctgcagcatacgccgaatagattcttccaacgcattctgaacagcagttggtgtagaactttgctgagtttccatacccatgattttcagatgcggttctgcatatcgagtaccttccatatcatacacattcagagcatatcgtttcttcgctttccagaatccgccaatgccgtttgaccccaacggaggacaagaaatagcttcacggtccatgaacattaaatgttctttattgttcatgtattcacacatctcacgatatgattggtcaatccaaggttccattttcttcttgccgaattggttcaggaattcgaccaaatcgttagtttctttgaaacgctcaagacctaccttctcgataaccttatcaacacaaacgtaaattgagtcagtatcaccagctactacaaacgaatgtccttcagtaccacataccttgttgagatattcattaactttacgttcaatccattgaattgccatttgaccaaacaacgtgattgctgatgcgttacgcaaatcataataacggaagtaaatgttacccaatgcaccataaagtgagttgatcagaatcttacggtttaactgattagtattacccaagatttcagcatgtttacattcaaacatcagtttgtcaaggcactcttcggtatatgtcagcagttctgctttcatatcatcagagaaatcttcatagacattaacttctgcgaatttatcgatagttccaaacttcttatcattcagaacctttttaatcagttcttgatttcgtttggcacccatcattttatttttccactctttacgctgataaaataccttcgcgatttcaactggaatgacaccatctacatctttacgatacatccaaccattgggtgaacatgaatattcgtcagacggacgtggtgcagtcttgttaatgtactcacccaatggatgaagtttaaactgtccaacgatggtttctggtgaaatattaacttgtcggatgattgacggatacagagatgtcaagtcaaacgacatgatataacgatatgcagcaggaactggttccttaacatacgcaccaggatatgactgtttaacatgagaacgactttgcggaataaccttgtcctgttctttcagactgttaaagatgattgcgtcccatgttttaatcggactcattacaccttgatacggcatcttcgcataataagacatcgagatagccaggtcaataaatccgcgaacagcatcaatcgcttgtactgattcaacgtcgatgatgttatacgaaatataccgttggtggttagtttcacgcaatttattgattggaccgtcatatgctaatttacctttcttggtttcataataagcaatgaaatccaacttatacgtcggttggttcgtgaaactaaacttcttatacaaatccatgtaatcaagaatagtcacacccatgatagaataaatttctttatcaccatacatgtttgtgataatcttagatgaaactttattcagaggagagaaccgtttcatcgcacgctcaccaagaatctgtttcacacgattcatgatgtacggaatatcaaatccttcaatgttccagccagtaaagattgctgggcatttctgttcccaaagattgatgtactcaagcatcatttctttttctgaattgaatggcatatacaccacacgatcaagaatatgttgtggaacttcatcaccgccttcggaatctaaacgagcagcgagtttcttgtcccactcggaaacagaaccataaagagaatgcagtaaatcaaatacgtagaacttatcatcaaccgaatcgtaatgggtgatagcatcaatttcatattctgctttcatcgggtctgggaattgagatgcagtaacctcaatgtcacagtttgcaattcggatgaattttttattatagacgatttctgaaccgtaagtatcactgatataagcaagtttgaaatcatccatacccattgcttccattcccatatcttccatacgacgcatccaatcgcgtgcatctttcatagttgggaatgtattcttcttgcaatacttgccatagatgtctttgtactttgtttcttccatgcaatgactaaacataacaggagaatacggaacacgacgcatgcgttcctcaccagtagaatcgatataacgttctacaatgtcattgcctagagtttcaacgctgatataaaattctttcatgggtttcctttgtttatagaccgagttattagtctttaggtgggataattatactccgatttttataaagtaaaagggccgaagcccttttcttacgcaccgattgtgtacttagattttaaagtccattcatgtttctgtttgaatgtaattactcggaagttattctgcatctgtgcaagagtttgaccacgattaatactcagtagaccccagtcagagagcagttgtgcgattgagtctcgacgaatttcatcttctaagtcaatagtaacagggcgaccatcaagctttaacatctctttaaaatggacgatatagtaacgaccctgtttctgaagaatgtggcagctttgatatagtaccttatctttgttattagcaattcccatacgggtcagagtttctttaactttcaggaagtcttcaggctgtttcagtgtaatttcaatcatctttaccattccaatgctgttttcttaagatttttctgttctttcacgtttttcgtgattgtcttgaccaattcatcagtcacaagacctttcattttcttgagagcaggtttaagcttgtttttagcttccagggtctctctatacatcctagcatcaatcgcattgaccttgtaatatgtcattataacttgaagaatcaatgcatcctggatgttttctgttaacttagcccatttaccataccgacgacctctaggaacagaggccatcatatagttatagtgtgcttggtcagataacccttgaccaacaaggttcataacataaaccgcaggcatacagtcagcgtgctgagaaagagcgttttcaaccatgaattttgaataatccatcgtcgagatattcaaatgctcttgcttttcgttaatagacccaataattgtgaagaattgattttctgctttttctttatatgaatcagataattcctggactttcgtccagtctttacctaaccaagctatttggtgctcattatactgatcatcatcttcaaataaactcatcatttccactgcatctctacaacaagttgaataagcatataaaccaaatgtaattcaatcgaagctgctatgccatgatactggttattttcaccgatgatttcatacattctgataatgcttgggccagtaaccattgtatacagctcagaagaaagtttatctacaaaccaagtatagtctgctgcatattttggagcaagagcacggagttctttgatgttcttagttttaatagcttcgatgacatcttcaattgaaccacggtcattcagaacgatagacaagatacctgcatcaatcacacccttagaagaataatgatcaagcatgttaatggtcttacggaattctggaaaattctttttgaccaaagcagctacaactttcttatcttcaaccaccacgccttcattttcacaaattgcgagacaacgcttgagcatctcgatttgcattggcttaacatcagatggagatggtttaccaaaattaattacacggcaacgagactgaagaggtttaatgataccatcaaggttgtttgcagtaatgataatagtacagtttgtgctatacgcttccatgaatgaacgcagatgtcgttgagattctgcaagacctgcacgatcaaattcgtcaatcacgataattttctgcttgcctgcaatggatgcagaacttgcgaatgcagttaacggtccacgaacgaaatcaattttacaatcagaaccattcacgaacatcatttcagcattaatgtcattacataatgctttagctactgtggtcttaccggtgccaggagaagtactatggagaattaaatgaggaatttttcctttagctactaaagccgaaaaaatttctttatcttcagcaggcaatacacactcagaaatagtacctggacgatatttctgttcccacataaagtctgcttcgtttactgtcaatttcatttatatttcctcattcagattaaagatggggccgaagccccgaagttattactcaaagtcaaaggtactatctgcttccattgctaccacataagaggctgatgcaccttcaaattttgctgcagtctgtttcttggaaccgttcatttttgcccacagcatcagcttgtaatcaccaacagtcatcttcatattgctcatgttgatgataaagttaaagttaccttcgccatcataatcaccgagggtcagggaatacttcggacgggtcagtgcagcatcttctactttgttataaccgcgcagaacaattttaccatcaacattggtgatagcaattgtgtcaatctgcatgccacgagatactcgcatcagctgttgcaggtcttcacctttaaaatcgataattacgtttgccaccgggaatgggattggtttagtcgggaacacgattgtgctcgggtcagctgctggccagaagatagttgagcgagcatctttaattgccaggttaccatcttcctgcatgataatatctgcatcatcaccaaccagagacagaatgctcaggaaactgttcaggtcataaattgctacatcagtatcgatagtatcagagattgtggcttcagcataagtcgtaccattaacagcacgagtcatgataaaattgccaggtttcagcatgataccggagttgatggtggagaagtttttcagaatgttcagagtttctttagagaatttcatttcaataccttttaattaagttcaggataattatatcaagctgcgaatgtagcagttaattcttctgcaacaatctgacctgccgcaacgagttgctcatcagcatctacgcagtaatcattttctagacgttcgccaccatgacggtcagtaacaattttagcaccagccttgattgattcgttgtaatgcttacgcatcaattcaatccatttttctgcaacttcgtcgtcaatagatttatagaaagcaaagcgagcttcagaatctttaatcttatctttaatagctgctttagtttcttcagttagagccagaacccaagacttacgaatacgattttggttattcgggttggaatctgcacgtacgtttttaacctggatatctttcacatcaacaaaattaatcattatatttaccttaatcgtaataatcttcaaccatccaaccgggattcctgctggacatgactctattatattcatttcctgtaaaagcatctcgtaacatttcttctgttactaagtgtttttcatcagaaaacaaattagttaacacatatcgctttacttcaggaaaggccaacagatgttggcccgtagtaaactcattcattccatcaccgtgaatcgtccgaccttcttcatttgaaggtgttggccatatgcctgcgggtcgtggtcacggtgagaaataataaacacattggcatctaccatcttattaagaatagcagttattgccttaacaccttctgcgtcggtagccgaatcgtagacttcatcaaggaacaaacagtttattttaacaccagaaactttttcagcaatatcacgccacgtgaatagtaatgctatatcaattctggctttttcaccttgactaaacgaggcataactaaactcttctcgtccgcgagatttaatcgtttcagagaactcttcgttcaacgtgaacgaataatcagcttccataatttttaggtagctgttaatttgcttattgaacatcgggatgtacttcttgatgatagctcctttaataccggagtctttcagcatttcagttaaaataccacgacgatatttttccataaccaaattagttttgacgagaataattttatctaattcttcttgtagcagttcaatcttgtcagagttatcaatgaactcctgtgatgctttatcaattgctgctttaatacgacgtgctttatcaactgcagttaaagtcatctgtttcaaattactcatttgatttttgatgtctcttgcacgcgtacgaatagtattatactcgcgagctagttcatccagttcactctggcgcgtctttaactcgccaagaatggtattacattcttcaacatgatgattaatcttagtgattagagtgtcattagaatgcaaatcctgcaagcacgttgggcaatgaccgcctttatcatacaacccaagaacctttgagtatgattcaattttagaacgaatcttaaagattttaccttgaacttcttgaattgactctgctgggtcatcaccaatcacgagttcaagcagttcgctttgaagagtttctaattctgctttatatcctcgtgcctctttcacctgctcatcatacatcgcctgcaggcgagctacgttatcaccagaaagtttcttctgcttttctgcatactcatgatgagttttaatttcattagtcaatgcttcacgctgaacatcattaacctggatttgctgattgatttctcttatctgtgtcttgttcagtttgtccatatcagccaaaagagacacttcaagcaaatcttcaacgagctttcgtctattagcagttgataaccccatgaacggagtatatcctgccgttcctaatacgacaatctgcttaaacgatgtgtatgacatgccgatgagactttcaaagtaggattgaaaatcctttgaacttgcggcttcatcaagcttattgccatctcgtaaaatctcaaagacattcggtttttgtccacgtttaatgtagaaactatgaccatcatactccatccacagttctactacagagtccttcttattgaatgagttaattaattgacctttcttaatatcacggaatggtttaccaaataaggcaaaagtaatagcttcaagcatagtacttttgccaccaccattcttacctgtgattaaggtcttttggcatttatcaagttgaatgtcaatggccgcttggccaactgacattatattcttatacttgacacgatttagtttaaaagtcttcactgattttgtgcctcaatgtataactgtttagacataacctttaaggctttgatatcatctgcggataggtcttcaagtgcttggatatattcttccattaaatccaataagcttttaacttctacttcttcgccatcttcagactcaaccgagttgtcaactttagaaacagttcttaattcatgtactaccttttcaagttctgattcaaacttaggaaggtcttcatcgaccgcagtgataataatgcgtactgcgagattacgaaactcttcaaagtcaatttttccagtaacaggataaatcagttttctatgccaagtgatttcattagggacgaaatcaaaggttgataattcagtgtcttgaacccagaagccacgtgggtcgttctcgtcacccgctgtaagcgtccaaggcgttccgatgtacttaacgtttgctgcgcttgatatggtatggaagtgcccagaccatacttgtttgtactttttgaggaaatctggttccagcccatgagacttcattcctttataaaaataaaagccattaagctcccagtgaccaatacagtattcagcagacgattctttgatatgcttcatgatttctgatgtgttctcttcacacatccatggacacaagtcaatcaaagtcccatcaaaatccatagtcacgggcttttcaataacagtaatatgcttatacttaccaagaacttcggttgatgcattaggcgtcaacgtattcttgtagtgcatgtcatgatttccgacgatcgtaattaagttaattccttctttctcaagagactccgcaatttcacgagcgaattccattgtcttatgagtgatagctttacgaacgtcaaaaatatcaccgtattgaatgatagttttaattccatgctttttggcataatcaatatgctgcttaattccgtgtcgttgtacatcctgtacccacgggtcatctgcgcggacacctaaatgccaatcgcctgagtgaataattttcatataacctctctagtagagtttaattttatattattccatgaatagcaaaaagggcccgaaggcccattacttattttgtcattaactcaaattgttctttaaagcaatgctcagaatcttggtgttctaccaggaattcaaatgctttatttcgctctttatcatagagcttctggtcagatgacagatgtttcattcgttcaaagacttcatttttattttcatcattcaaccacagaatgccagaatcatgagaagtcaacggctttccatcaacccggaatttcaaagcatcaccagtagctttatggaacacaggaatagttccacaagcgcctagttctaaatgcgtgtattccagcgaacgctcaaggaatttatctggaagacgtgacagctgataaccaaatccagactgagacatacgctcaagcatttcagagttaacatatcggtcaagaacttgaggattcagacctggtccagttttaacctgatgataatgacggcaataatcaatttcatagcgttctttgatgttaataaatgcaggactgcgttctaacccttccaagatagtcgttttgcctgcggggcgcagatgactttcatgaaagtcaaacatcaagaaatagcctttccacgtagtagtacgaccaatccaacgatgaatatcaaaatcaatagcagagaagtctttccaatacttatcacgaattgctttgatgttcatagcaggttgaaagttataaaccggaggagctgagtcagaatcatcaaagaaactcaacccgccgcttggaaaatattcttccattagcacggtattaaaatcgccgtttgagctatgactaaacagtacatcagcacgcttaacggtttcttcaagaccagcatttctacgaagtgacaatgctctatggtcatgttgatatacgactaccctaacttcaggtttaatgttctctatgagcttcttatagttatcaatcgctgcttctggagcattgatagcaggtactgagttaatgataagaatgtcacatgcgttaagcagagataaagtcttatcatagtcatctgcaagagacacaggaatagttacatctttatagctatgtgctctattacgagtaaacgctttatctttagcgtaaatgatatttacttcatggccatgttttactaaccactcacggtgctcgagactgaacttggttacgccgcatccctcaagtccgcgagccattaaaatattaatcttcatatattgacctttgttgttaattttggatattttaccattcccgtaataaagcaaaagggccgaagccctttaaattttcttgtatacaacataacccactgcttcacatatacgcttagcttcttcaaagcgtctaagcatatctaccttagcattatgaatcgcttcataatcgggagcaggtgcttctctccgagcagtatcacatttataacagaagtaactacgctttggtcctgtataacgttctgaacaattactgcaccggcacgtgtaatttccttccggccaatcatgtccaggattagaacccatcaaattcgtcatacatcccaattctcttcactagtaataaaatcagggtgttcatctaaatcaatgaatccccagttctcttcatttaccattcataccaccgtttaacttggaaggtgtcaacccagacaagagagttcttatcaattagcttacatccttcggtagagcctaacacgcgatattgattatctgctacctttactgccatcgtaccagtcgcagtgtttaaagtaaatcctgcgtctttacgaacacgtttaaattttacttgtaccagcatttagaatgtcccaaacagatttacgagaggtattccaacaagtcagaataatctcatcattaaaaggttgttttaaaatagtacgcagtttttcaatagcatacttgtaagcagggaaattattgtctaataccgcgtctccagcatgagctcgtaatcgctcaagttcacgacggtttttacgaacaactttgttggctcgagcaatagcttgttcttctgccgcttccattagtttctgttgcagctcgtcgcgctcttcctgggtaatattgttcatgttattcctttggatggtaatttatttcaaatgtgaattcagtatcagtccaattataactatgttcaattatagcagaatctgacctgaaatcagcgtcatgtggatttttcgggtcaatgtgaatatcaagatcaagcacctcccttaaatacatctttagcaaataagggatagcgtctaggtcttgcacatcttctaaaaacccgtcgaggttaatcttcagcctcatataaaaattccagattaggtccatcgcttgtaggttcgctctttttagcagaccctggcgccttataagcggtggattcatactgcgtcattttatcgtagatgtcctgaataaaggtttcatctgctaacgcaaccatatcatcgtcccgtgaatcatacacgttatggacaaaatagctgtatttctttgccatttctttgcgttcttttttgatacgctgaacgaatgcattgaaacaagcttgggttatatacgcatgcgggttatcatacttagtttcatcgaagttgattaagcctttaattgcggcttcaatcccgtctgaaatcatttcttgcttccaggattgggtgtatcctgaaaagttgaaacgcttactcagaccttccgcgatcagcataatagcaaggccgatcgtatcgttctgttttactactcgagggccgccagcagcttcagactcccggcacttctctttccatgcacagattgatttatacagttccttgttatttacataattactcatattgcctcttcgcttcaattaataatatctattatatcaaatttgggaagcgagaggattaaagcattacttaatcaattcagcgcatgcaattaatttcatcatgatacgataaaaatcgttatatgtgaaatttagcggaacatcaataacggcttcaaaatcttcaaacacccgctccattccataaccagcgatatcatctgattctgcataccagtacgttccatcttgtgcaaaagtaatttggctattttcaagacaaaacacaccattgatattttcatgggtaagagtcagctggattttcatagttcacccttcataatgcgatagcattggaacagctgttccatgatacgtttgaactcaaccaaactaagttcaaaccaatcagattcatctacttcatgcatcatttccatgaatgaagagtataaactttcataatgagtttcatttaacatagaggcatgcgtttcccaatacatgccctcttcattgtcaaaccaaacacccatataagaatctatagtaaatccgccaatgccttctaccacaatcataatttggtttattttagccatgctttcaccgtatcaatagcgtcttcaaatttagagaaagcatccacggatgtgtattcattctctccagaacgttcataaatccaaaacgcatcaaaatcttcttcaataatgaattctccgttaggagtttcaatattgtttctgccatcaggcgttttagatatgaaccatccaagcaaaccaacttctacaatttgttcttcagtcatttagaatttccaccaattgattatagtttaatgcctttccagaagaaatcataacattacaaaatctgtataatgcttcttttgatactttatacacataatcagaagttgttataatgtatgaaatacgtacaaatgttggggatttttctgccaattcatacgccagttttctagctctgccaatatcatcggcaaacttggtatcagcaagcaaaatactatcaaatacccaacggttagtaaaaatttctgtgtatagaataaccttacgcatcaagatactctcgcagttcctgctcgtttaacccttcttgccacatctctgacggagatggaagttggctgtctagagtggatgaatcaattggaaatactctgataattacgctagtatcttcatcccattgatttgcgagtatccgtttagcttgactaatgtcaggctcagaatgagcccggatatacttaatccttctatgccatacaccggtaggaatagatgcgcacacgatatatgaaatcatttcgccgccttaaccgctttaacatcgcggaagcctttcttacgttgattcttcatcttgcgaatagtgctttcagaaatttcaccgatacccggagtgattggttctacaccaaaggctttgatgccaaattcagacagaagataagcaacaactaattcacggatgcgagctttaccaattttttgaccttcttctttcatcgtaccgtgaagctcaacttcccactgatcaagcaaagacggagttacacaacgtccttcttccagcattgcagatactttatcataagcaaaagagttcagtacgtttttgattgcttgggacatattaatttcctcagtaacgattgttttgacagaggagattttaaatcaaatctcctgtagcaaatcaatctttgagagattttagctcttcgagcatatcgtagtattctttactagcaaccggagctacagtgcagtggtagctattgaattcatggtatttcacgaagcgttctaggtgccacttaatcagattgttaattcggtgaagcagaaccccatctgaaccgacgtagacaactacttcaaattgaagcccatcccaaattctggtacggacgatatcacctacagcaaaagttttcatgcgatgtaccaatgttcgttttgccaagactcacccttgtaccagcgagtcatatcatatccgttttcgtcacagatgaccttgttcttcatcaagaagtattcatcatcagtaaaatgcacatgctttactttacagcctttactcatagcttctagagcttcttgccaatttaaccagttcatattttcctctcgagttaaacggtatgctgttatccgttgatagggctatagtatcactcatcagctagcttgtaaacaactttgtgaaatggatttaaaataaaagagaggtcccataggaacctctaaatgaagggtatagaaatatacagaaggtggtcaagatgaccttagaaaggaactggttaatcttctatgatatctgggtcatgcccagcagcaataagattggttttgaatgttggaatgtcatactgcttaacgttatccataaaaatgacaggataccgaatagcaagcgatggatagcacccgatgcgtttagcaagtgactcaatcaacggacggtcataaaccggttgaccgtcaacctcgttgattacgttatagaactcatacggaagttgcagcttatcgagcaagtcacgaactgctttacatccagggcatctccaaacttcttcagggatgccatagatttctatcatttcatgacctgttggagtttagcagtcagagtgttaactcgtttctgaaattcttcattagataacttttcatctttcttggtaggattaatccaatctgcgatgataataaggacaatgaacggaattgctacgaaagcacctgccgttaatgcaaccaaagcgataacgttagaaataaatttacgaatagcattaatgaatttcataattttccttaaatagtaaagatgaacgctgtcatagccagaaattccggtccaaacagttcagtagccatgtggttcagggtaaacataattttgtaagtcagcatatctatttcctcaatcgtgtgtccaggtagaaccatttcttacccagagtctttggttgtcagaaccacgccagtttttagtagttggcagtgatttctcatatttcccatcaattataacatcgatgtgttgtagcaaatctaaatctttgatatcttcaaacttatatcctgtccacatccagatatctttctccggaaatcttgctttaacccaagaaactaaatttgaaatctcttcccgattctgtggataaagcgggtctccaccggttaaggtaagaccttgaatatacgatttgcttaaatgggatgcaagctctttaacagtattcatagtgaataactggccatttctagcattccaagtagatttattataacacccttcgcatttatgcaaacacccggtgacaaaaagaacgaccctgcatccagggccattcacaaagtcagaagggtagattctgtcgaaattcattgaaccttacctcattacgtgcttctacttctgcatcatatttccagggctcatcagtttgaatagccccagccgataatccactttcggggtcacgggttatagcaattccaagcgggtgcagaacctctttgttgattttccaaatcaatccccattcgctaagttggttccaatcaacttgcttcattggtttctctaacatgttttaccctatgcataatttctttgttcttaccaagattgaacccacgctcagaaggattaccaagatagccacaagtcctacggattgtattcattttctttggatcagtttcaccacaaattgaacacgtgaatccgttttcagtaggtgtcatctcatgagtagaaccacaggaaagacatttatctactggcatgttaacaccaaaataatccaacttctcgatagcatagtcccataccgcttcaagaccttcaaggttgcgcttcatgtcaggaagttcaacataagaaatatgaccacctttagcaatggaatgatatggtgcttcacggtcaatcttttcaaaaggtgacaggttttcttctactgacacatggaagctattagtgtaccagcctttatcagttacgccctttacatcgccaaacttggcttggtcaatcttacagaaacgatagcacagactttcagccggagttgagtacagactaaaggcatagccggtttcttccgtccacttgtttagcttagtgttgatgtacttcaggacgagtttaccgcttcctttaaaagtaagcatatcaaattcgtgaatgccaatatatcctaatgaaattgaactacgtccatttttgaatagctcaagaatttcatcatcaggtttcatacgcacaccaaaagcaccttcctggtaaagaataggagcaactgatgcagtaacgccttcaagggatttaattctagttaaaagggcttctttacaaatatcaaggcgttcatccaatagtttgaacagtttattactgtcatccgaacttttataatttgcatccagagctatcctagggaggttcagtgttactacccctagattattacggccatcaagaacgggtttgccagaagagtctctccaagcaccaaggaaacttctacagcccattggagatacaggagtttctgaaccggtaattgctctattatttcgagcactgatgatatcaggatacatgcgtttagctgcacattctaatgcaagctgcttaatatcatagttcgggtcttctttacgtagattaatgccttcttctacaaacatcacaagctttggaaaaattggagtaattccatcacgtcctaatccacgaatacgattatcaagaatagctcgttgaattaatttttcttcccatgacgttcccataccaaatgtgatagtcacaaacggtgtttggccatttgaactgaacaaagtattcacttcatattcatacgcctggaaagcatcaaacacgtctttttctgtttttgaaatagcataatcttttactaatgctacttgatatttgcgagcatcacgtacgtgtttagcgaatgtcttctctacataaggagccaatactaaatcgacgttagcaaacgtagttccaccatattggtgagatgctacttgtgcagtgatttgcgccatgatagcagtagctactccaatactcttaggagtttcaatttgagcgttaccaagtttaaagccattctgcaacatacctttcaaatctaccaaacagcagttggtgaaaggcaaagctggactatagtccatatcatgaaaatggataacaccttctttgtgtgcttccattacagaggcaggaatgacctgattggcgatatgtttagatacgataccagccatcaggtcacgttgggtaggaaaaacacgagaatctttgttagcattctcgtttaaaaggtccttgttggttttattaataagtccctggatttctaattcgatattcattttaaactcttacgaagctgcttcttgtattttgaagcaagttgtgattttccatcactttcctcgtatgtaaacccatgcaattccatttcagcaatcatctcaggcttaccaagacgtgaaaagcgtttagccatatcggcaacatattgcgggtgaatattactgtctttacgattctggcggagatagaccagcaaattctctaaccattcgaggtagtcaatatcttgaccttttaaaccagagcggttgaacttatgcttcatttggccttctgccgcattacacaggttacagagcaagcctctgacctttcctgcattgtcaccttctaacgcatggtcatggtcgaggtgattcttttgaatatcctcatctaaaggacgtttgcagcaaggacataatccgttctgtgcctgatatagtttttctttttcttctttatataacttaccggttaataacatactcttacctcagcgattagataagagtatttatagttaaattaacgagtaactactatagatgttatgattagactcttttatgcagaaagaagtacagaaagcatagatgccttcataatcatccgcattgaactcaatatatgaattagtttcttcatgaagaagactcattttagtccaagccattccattgatgtcatcgtcgtaatagcctccactaaattctactacatcgccaacttcataccaatgactgcgtaaaatttctcttgtaacacgatgaatatcagcgaaatcgagaatttttactgtaatagttttagtaatgcacgatttagacatggcgaactccaagacgttgttcaagtgcgacgatataatctgctgctttttgcattaaagcatactcttctgaatcgcaattttcctgtccagcaaaggcataaagagctctggtaattggaacgattgcaccttggaaatggttaagtttaatttcagaaatcagaggaacatcttcaccttgaccaatttctttaatttggtgcatcgtatcttcgctgtagaaacaccagaaccaagattcgccgtgtggagttgggtcattaattgtgatgattttatttgtgagcaaatcaattactgctgtaatgccacatgtttcaaggtcatcttcattaactgcattgataacctgaaatttaaatccaggaacaaactggggaaattgttcagttaattcatcatcattttctataacttcaaactgcttaccaataagttccattcactttgtcctcataatcaagtagttcgttaatggtaggttcagaagtattataatcttcttcaggaatagcatcttcctctggctcgacagtttcccaccgagccgcataccaaggttttatgcctttgctgctttgcatggtgccggagcggaatcattaacagaatcgtattcaatacgccattcaacttcagtacgagtaactactttctcgtgacgagtgacgatatctacttcaggaggattataataccaatcggtatgatatgaacctgaacgagactctgataccatgaaatggacgccgcgtgctggataataccaaatctgagaacggctttgatacttatggtcctgtgtccaatctccatcttctactaaaacaaagatttcttcctcttcatcatcaccgttcggtggatattcgaaatcatagttgtcgtcccattcgccagtgacaccagcaatatgtttgatttctttaagcaattcagcgttagtcattttagcctcgcagtttttgtaagtcttcatcgtcaatccagctttctaaaccagatggaagtgagcattcaatttcccataacagttcttcaatagcatggagacgatcaatctcttcagctggaactgttaccattcgtggagtttttaaatcatcaatatcataactcataactcttcctcatgccaagaacaatcaacttcaaaatctggtccgagctcttcatcttcccaacgccaagaccctaatggattaccagcatcgtaatcaacttcaagaccaatataactccactgaacaccatgaatgatatttccttgctttacaaagaattcaccccattggtgcatgaaagcatactgcggatcagatatagctctttcaatcattgctttacgaagattacgttctaaatctacttggtcgccttcaggaaaaacaaactcaattgggtatttcataatttcaccatacactcgccgtatttccatttagacataaccttaactccattagagtaagttacctctacctttgctcggtgattcttaatctgcttaatttcaccggtttctaatccgccatagccgtaataaagagctacaatatcaccctcccgaaggagggttccgcgataatcatgcattgaatttgaatttacggagttcatcaaaaccgccgatatgtgtgccatcaggagcaaaaatctgaggcatagttaatccaacctgcgattcgcgacctagacgacgaagcaaatcactgataactacttcatcaaatacacctttttctggcattacattgatgaatgcatactcttgtttcttaacatcgagcagacgctttgcattatcgcaaaacacacacttatgaatgttgctgtcgtaaccaaaaaccgtgaacatcttcttctatttccttaaatacttgagcttgaacttggttccaatctggatggcatactgctttaacgtaatttgtcataccaagacgcttcattacttcgccatcaattgcagcttgggcaaaatttcttccacgagtcatagctcctttgagtttagaactatcaactatttgaccagtctcattataataaaccgaatacatgagtagcattactcgttcggcttcttccatatatcgtttacgagccattttcagccttagtagttataactaatgttttaccatctaacgcatcgagaatatctttgatgcaattatctggcattggttgaacgctagctaattgcttggcaatatcatcaggaattcccatgcgaggaatatttaatttgctaaaatcaattttatccattagcagttaccgggaagtgttctgccaatttagcagcaatggcagcgttaatttgatcagcgaaattcttattcattgcattaacaatgatttcttgaattcggagattagctctttcaatagacatcttaatacggccttcagcttgcttaacagcgtcatcaatagtttgacgaaccatatcatcaatagcatttttagcgcatgattgggcagcgttacgcatcatctgtgacatttcttctttagcagacatatcattccaaccgcgagtatggaacatctgctgaacctgcttcttaacttctgctcggacatctggaatagtcacagcagcaatattaacttcagattgtactgcttgttttagtttattctgggaatcttttaacaccatttctttaacgatgttattgattaccgactgctgaagctgggcacgagcttctgtaccttctggaaataactgtcgtactgcatgtgtatctaatttaatgtcaatcattttacctttttcactccaggaatattagagatagtttcaaatacttcgtcaaagttatctttatcaacggtgactacaatagtgcgagcggtctgtttctttttccaacgtttaaagaaagtggcaagactcaaatcatgggaagtgaagaaatcatcggttttgtaaacatatccgctttcaatttttactaccgcatcaggcgaagggtcttcatattcttctacttcaacatcatcaaagagtattaaagtgtcatcatgataatagccttcccagaaggcttcatcgttataaaattctttccaaagcgcgccagtggttttcatttaatcaccttcttccaagcttcgtgagcagcacacgctaatacttcgtcatcagtcaaattgaacttgccttcattacgacgagcaatcatttcattgaattcagtatcagttctaagcatcatgttaagaactgtaaaatccattgtcgctcgaagatattctttaagctgcatagggtcgatgccactttcgtatgcgtcaagaatcatatctgcaatgatgttatcaaagtttttgtcttttatgaggttattagcatactcgacaaaaaacttagtattagcaccagtaatagttttagtaatcattttaattttctctcaaatttatgcttacaagtccggcatttcattttcagaatatcggttgtccaatcaacaagctgtacttgaatactaccacatttttcacaaggcacaacttgtttagctgcagcttctcgacggtctaccatttcaagacaggcatcccaatcaattttaaattcaggtacaggtggatactcaaactcaatttcaaggtcgttatcatcaacgaccatgtcttcttttaattgatttttcacagtaagctccgggcatactcgagagattcataccgctctttgtactcattaagcgatttgactaaatccgccatcatcaattcatgcttacttaattcagcttcttttgtatcaataaaccgcttaactgattccatttcagctgtaatactgtttttggcaatttcaacatgatttactggtgttaacggaagaggcttaacaacattgagatacatatgcgctacatcttcatcaataacctgtgtgctcaatgttttaggaaaaatcttaaatgggtccaaatgtacttcaagaacagatgagttttcaccctgctgtttacagcatgattttttaactacatccatatggtctaaagcagtacgaacttgcgctaaaagcgcccgggccggatactttccgctggacaaatggctgttaatatgaattcgtacagttacattgtcaagttcttcggcacgaataaatgaaacacccttaggatttctagaactagtagaagatacctggtatttcacacggtcatcgcctttaagtaagcaaattgaacgattaagaatacgacgcaggtttgcattaaattcagagcagaagatttgggcagcgctgcggtcgtgtctttcttcagttttaaacgcccctgccgcaaagctataacgctgaccataaattttagcattgccgatagcaaactttttgagctgcttctctgctgacattgcacctaaccagcgagaacgacgaatgttttctacaacaaaactgacatagtttgcttcgtgtgctgccatgctatttagcacacgacgagctacgttaccagcaattgctacgttataagcagctggatttaaatcatgtaaagctgccaaaacctttacgtgcttctcacgctttgacaagccctttccattatgcttatcaaattcaccggctacaaacatctttaattcattcttattcattatcttttcctctattttggactgggctcaaagagtatctcaaaatctccctgaacccattatacaacaattattcctcaagcattataactttgcttgggcgcttatagaaagcatgagttttatcatctttcgctaattcaaatgtagcagtaaactgtactttgcctctgtattcaaacggaatactttttggaagggagccgtaaaccgtagctccattctcaagtacaaccatcatcttacattgtacgccgtaatagtcttcataaacttttactgacgttacggtaccggagacagtcactcgtccttctggtgcatcccctttattcttattcagctcattgaatatattatcaaagacctcttttgaatgttcctggatagcctctaagatgctcttatgggctctaacttctgccataacaacatccgttccgtcttgcaatttccactctttatatggaacgcgtacttcaagaggataaccatactcacgaagttctttatactcttcttgagttaagcggagtttccaccaaccgtggtcacctgtatactcaggcttatccagtgaatcaaattctgtaacatacggcaagtaactgcctgcgtgataagcttcaacttcacctaattcattttcccaaagataaccatcaaagggagcatgaggacgatcatctttgccccaagtaggagctacaactttatcaaagtattcacgaccgaaacgggtcttcgcccatccagcattcaactcctcggcgcgtttttcaactttcgctcggtgtgcttggcgggctacacgattttcttcaacaagtgcagagataatctcggttaaagttttcattttattctccagtttggttgacgagaccatcttatcaacagcctcgccgaaagtaaactactttgtgaaaaattttctccaaagcagaactgcatctctacgagatacttctactgctcctagagcaactgcttgcttgcgacgaacatcgcgcaaatcatagtgtggaactcgcttatcctggaaccaagaacgtttcattccgatggcttctgccatagcgtgtaactcatcaaggttgtcgctaaacatatgacagttctttacttgatgacctctcattttccaaccatgattcatcaagacatctacgtatactgtcatttctgattctcgatgtaggtttcaatgatgaactgtgctaaacacagaagattatcttctgaaggagaatctactaaattctcaaccatttcagaaatagttccaaaagcttcttcagtattgaacatttcttgaagttcgttccaagtaggtgctttcatttcaatctcctcattagttaacgaagctatcttatcatggcttttctaagatgtaaacaacaaaagggcccgaaggcccttaaaaagatcggaaatcactgttaaaccatggcgactggtgctgtcgctgcttaagcaatttcacttgatgtttcctattgtcttctataagcatcttagaggcttttagctcttcagccaataataactgtttacggtccatcaggatgaggttctgggtcttctgagcaagtgtctgaatacctttgagaccttccacagattcctccatccctcgtttatacttggttcgggcagcatttaactgcccttcgtaatacgcatgtatagacactatagtactaaacacattttacctcaataacatctaagataatatcttcaacgtcttgctcagggaatgccacgccattggtctgcccatgctgaaatactgcttggtacgctgacggcgcagaaattcgggttgaacgttctttattgtcatagcatttgccatcaataaagcgtttaaatttaacttcataggtttttaacattattacaccttagcataattgacgatttgttcacgatcagcgggccaatttaaatcagaacgtttcttgtttgaccacgcaatattttcttcagcccaatgaagtttagccgatacgctcttttgtacgtctctgatggcttcttcaagataaatgcctaaatctctcgggttagttccttgagttttaaatgcattgagcaaaatatttcttacaacttctttaaattgattttcaacttccgggtgaataaattcacgatatccgctgcacggatatccaaaagcatctaccatacgagcagtactaaattctttgttcataatccgagcgcctcgcgttcatcaggatttaatttagccaaagcggcttctttaattttttccaaccgtttacgcttagcttcaggtgtttcttcctgaacactaatagcagcgcttttaggaaaagtccatgattcgccattttcatcggtgaatgtaattagttccgttggcttacgattaactgtaccatctgagccccaccaagactgccccttaactgcttcttcggcaacgcaatatgaaccataataaccaaacaactcactacggcgatcgtctggagagacatacgctgcataggcttcactttctgtcattacccatttcattttagcacctcataacgaataagttcaatacggtttttaagctcttggtatgatttacgccaaggcttataataggcatttaaatcttggtgttgtttatgcatttcgtctaaatgctttactgcatcctgcacatttgcaaggaaagtatcaaatactttattagcgtattctttcctgagctcaatgaacggaggagcacgaaatacgtttaccattacacgtagttcatgataagaagaatggacttcagctaatacatttttcttatcgccaaagttaaacttataaagtttttcacagattgcttcacaggctttctctgctttacccttgggtttacctgcaaagatatgaccaggcggatatactttaatatcgtttaaccaacattcaatatctttaatagctgctaaactcattgtacccacgctccattttcatcaatgtaattaatccactcgttaatagtccaggaagaggtatcacctttaggagtatcaacgatatacattccgcctttaaacaaaacacgttttacatcattagaaattaaagtagccattatattttcctcagttagggaggatttctcctcccattaaaattatttcagcattgttacttcagcaatttcacgccagtttttacggtcagtcgcgacgaaatcaccaatataaagagcagtacggagagatacgttacgcagacgatttacgttatctttcataaattccaaaacttcaataacttcagaatttcttaacccacggttctgtaacatagaagtagtcattattacatcttgaacacgaaccataatctcttcattagtgtgaacaccaaggtcaagataaactgaacgtgataccaaggcttgaagatgcggagcaagtttagaaccgcgctctaattcacggtcaatatcaacgttagtgataaagaccacagtaccttcaaactcaaactcattaggaattcctttatcttccaagaaagaagatgcagtgctccagcatactttacgtttctcccctgaatccaaagcagctttcagaaggttcaaaatatccatatcagagaatacatccacatcatcaatcagaagaactgaatttgcttcacgtgattcccagagacggcagtataaaccaattcctgagattttaccgttcactgatttgtaatcaatagcgttagtatcatgagcatgttgtaatgctttatccaaagagtaagtcttaccgatacctgctgctccggagataatcagagaacgaatattcccgtggattaagccgttagtcattaatcccatgacgttaaagcgtttcttgatacgctctttcatttcatcaacggattcaacaacttcaattttagcagctactccgtcaattgtgatatcatctttgaatacccaaacaccgcgctttttgccattcagttcaacaaagactttaccatcaccctggcgagaatcttcagcacttaagctatccgggaaccactcaccgagtaactcataagtacctgaaatctctttgccgaagtaaatccctttcttgatggtgatagttgacattttattctccgttactctgttttgttttgatggagctatagtatcaccagctcgcgagcttgtaaactacttttttcattcttttgaaacaaaaagaggagcccgaaggctcctcagttatgcgtgcttgttgatagcattttctgctatacgttttggaagtttacctgcccagcggaagaacatgataatcgctccggcaataaacgcagggaaccaaaagatgagataaaaccaatactctcctgctttctcgatggttccatttttgattagatgcttacagacagaccaacccacgacaaagtaaattattgcaacaacgattggcactactacgctccacagtaaaatcatatttcagcccaataaagtgagaaccggagctcttctccggcccatgacataaatcggtggatttgttttcgagttggtcgagcagagaatttagcattttctctacgaccagtctctctgcaaactgcttccaaataccaccgtctacctttatgaggtcttccgtaattcaagaagaccttcattgtatcatttgtagtaagaattgtggttttcaagataaaccttctcgacgaaatcgtcccagaacttcatgtctactttcttaggcattccgttcttttcagcagtatgagctagaatttctacttcatctactacagactcgagaagctcctgtacttctttgaacggtaactcacctgctttgaccatcttgaccattttagcatgggtcagagggaattgaaggtcaccagtcatatagatttcctgaagctgcagacctgcacgaagagcatgactcagtgctttccagtcaacgccttcgttagcttctgccttacgagcacgttcaccatattcagcatcaagtttctcaagagaatacttcatctctttgatagtgatagtcgtctggaatttacgacccagaacgttataaaacttctgctcgcctgatttgtggtcaacgaaggtggtccatttgaggaattcacctagaggaagtttctctgcgatatcctgtactttccaacgctcattgatacccttctgctgaggacgatcgtcatatttccattcaggaacatctctgataacatccaggactttatgtaaatctgctaaacgagaacccttaacgccatacttacctgcttgcttacggacatatccaagataagccttcatgtcagtggtatagaaacgagctcggttgtcttgaatgaatttccatacttcaggaaggtcagatgcaactaccaattccggtggagtatgcagcatatccaacgcgacagtttcaccgtcagcagcgagcttgaagaaatactttaagctgaacaactcatggtcaatatcgtctttggtatttttggttgcgctgttgttagtattacgattggtgtggttcatcgcctgacacattagaatatcacgcggatgaggtacaaagatttctttaaaatccacatctgactcgggagttgaagtaccatacagatgtgaaccaaaataagattttacgattgttttcataagtaaatatgattccctttagcgaatttaactaatgcattagaacgcttggctgcttcttctgctcgagttttatctgtagttctttttgatgtacggtaaacattaccaattttttgactggtgtaataatacaccacttcgtgggtatggtactcttgtccatcaggatgctgttcacgacaggtttcttcacgcagtgtggtttcatacataggaactaatgcccaatcaattcctgtgctaatgattgccacctgaatgtcaagtctgttccagcgaaatgcattgatatatcctaggacccgtgattccgggtccatcattgcgaatttaatgttttcggctgaagctaacggcatctgtttcacaatgctcatactaagttttttcttagtagttacgatttcaatttccatgacccgccctcataatgtatgtctaaatcaatgttatctttgccgctgtacttgccagtcaaaggaataaatttaaccgtaaccttttcgccgtcatcaaaagtaaattcggcaatagggtatgtagaaattataccacgttcggttttagcacgaaatacggcccgaaggccgttcacaatataaacttgatcattcttcactaggttcacctactgtaacatcaagcatagatttaacgagcgagatgtcatttgtactaaacacgtgagcttttcttttatcgttctgacaaaacatgcttccatctgctgcaattgctagtacttcatagcagttattagttgtagagaatttatcacccactacaagaggaacattaactttacacttctcataaactgtgtatttaaggctgctgagattaattaccgacttagaactacccggtaaaagtttgcagatataaaatccatcgtctgccgattcatttaggtaatcatcgatatacattccacggtagccgtcttttggatatactacagtagttgtttctcggctgctatggtcgtaatatactacgattttgctgtctttacttttaaagaaaatcgataccgtatgcgctgagctgcatttgaagatagaaataaattcaacttcaagctcaaatcgattgctttggttatcaaacccaatttctactttatcaccaacctttaagggtttttcaataaggctttcttcaaatttcatgcgaataaaacgtttcatttatcaccttctacataatcaatcattgggcagactttccgcttacgggcttttaaatactggacaaataccgatggttcggcttctgcaggaagacccgcttttactcgagcaagtttcttcgtaaattgtttatttttacggtattctttaaatttttctaaaccgaaaataaatccaaacgctatagctgcaaataaaagcacaaatgctgctataaccactgcgccaactggtactgctacaacgtttaaccaaaacgcggataaactaatacctatccaagagagaattcctgtctctgccacaatcggccaaccgaacatccatgcaacagaaccgatgaacgtgataatcgccgaagaaaacacaacatgaagaactgtcgtccagaagtatccacatagagtttttggcattttccacatgctgccagatttaaaccacaggttcattttgaaatgccaagagtttttattaatattcattatcagtccttcatagttggaatcatagttacaagatatttgaccagttcaatagcgtcgcttttatcaatagctacacaatctccgtcacgttcaatttcgatgatagtattatgttcatacgtgtggaataccgtaagatacaaatcaataacatgcgggctttcatcttcaattactgcatcgcctttacgggattttccgtcccatactaatttactcgccatcttttgcctctatcaagaattgaattaatgaatcaatttgtttagtatcaagatgaattatatcattgccttgttttagcacgatacgactcaactttttagtgaaatatgaattcacaacctttacacgcacatcactgtacggattatctaaattggtactatcaagaatactttccataattacctcaattgtgaatcttttgaaccacgacgattataagcagaagtcattacaatgtcccactttccttgacattctacacaccgttgacagcctttaaccaacagacgacgagctactgggatttcctcatcacaatcaacacagaactcttcggattcccgctgttcttggagttgtttctgaagacgggcccattcaatcccgtctgctattgtagcttcgcgagttgcaaatccgtcatctgatgggccccatccattcatttcaaactctccagaatcatttgcaccaaattatatgtaaacatcggatgctggtattgtaccacaatgtagatgataagtaaaacgtttctcattcttcgccatcatcaaagtcgtagtaatcataatcacaactgtcaagataagaatccataaattcttgttgacggcggaaatcttcagaaggggtcagtctgtctgcatatgcttgatcatctggatcgctgaacttgtcttcctgaagttctttaatgaactgttcagcttcttcacgcgtccaaaacccacgattaagattatgaaccgaacgcttttcacctggcttgaatacgcccatatcatgagcagaacgctcagttgaataactttcagtttgaccagcatagttttcatattcacaaatcacccggaagaaaggagattttcgcgaatatacaccgcgaagaccgagttcaacatcatacgtgcctgaagcaacaatgtaacgcgttatttcgccgcttttagtttctgtgcgattaacaccacacacgtgataaaagatttttccaggttgaagttcagtagttaacttaatcataatgtttttctcgtttggttgttgatatgtctatagtatcatgtaatgaagggaagtaaacaactttttgaaaagaaaatgcctcccggaggaggcggagggtattactgcaatgataacaaatacttagtcttgtagcatagacctgtaatgtcatccagaacactttggagggcggcaggaactgacttgtagataccatcggccttagccagaatgaggtctagcatttcaatggtgtcctttggcagctctttctgcgatggtaaagccggtgtataactcttacctgagaatcctaaccactgctcaccaaaagcatctatcaaatctggaatctcgttaaagaaaacttcatacgctttatgtctggcatacgatttggtatcaaaatgcgctgaatgaaaatacgcctgagacgccataagtaaaccgatgaattcatcttgtggagtaagtttaccgtcctttacaaaatcattgaatttcattatcgagttgtatcctcatgcggttagcatattcttcacctgctgaacgtcctaaagaatcgcaatctttagaacaagactcactcttccatttactttgtataaaagaatagaactgttcagactcttgcttactaggctccttaaatttagcataaacttgtagagctccctcaacatacgagttataatccgaaatgtcgttgtgtgatgcagctgggagtgaaatcccgcagcccaacaccagggctaagcaaatgtgattaaaggccatacggcctcctattatttttgtccagtattacgtttgtgctgaagtacagccttaacttctttgaggtatttgtccagcttacgtttacgggtataatctgcttttgaactgtgctgacgaatttcttcctgaaggtgcgaaataccatgcccaatctcacgacgaagttcgtccagttgttctacagtaagattacgaagttgcttttcacttaaatgctgcatatacacctcatcagttagtaatagtatttatataagtatgtgttacttaatcccaaagccattcgcagatgccttgctcaatggttctagcaccagcttcgtcccagttatattcttcgtcatacttcaatgcgcgtttaatttcggctttatgaaatagacgtgggatcggcatagcataacgggtccaacgtagagttttccagaatccatcgcgctttgatttagcaatcagtttcttggcctctagcggtctttcccgattttcagaaatacgcagttcaacatatttctgttgggtttctttatctttctgagttttaacgtattcgttatagcttttaatataagcaaattcgttattattctgatcgttccatttggaagattttactacatgccagcctttacggcgaattgttctagacattattacctcgttaagttaaagtacctcaacgatagtaaaatcctgatttaaaaaatttaatattcatgaatagatgaccttacatttacattttggacattcaggttctttggttttaagacgcttggtagcagtctttggagcagtgttgtaatcatatacatgaagacaacgatagcacatcacatattttttcatattaaaccaataacgaaagcaatattacgtatagtaaaaacccaatcacgagtactagtactataccacccgctatagcaaataagctactcatgtttaatataacacccattcatattagcaataaagtctttaccctgtgccaatactttacattcggaattaagacgattttgcatttcttctcgtctatcactttgtatagatgctgccacaccaatccaaatgaataacatacttaaaactagcatcaggagagtattatacgttcttggcttcattataaacacctaccagttcgcaccagtgtttacgacaaagagaaacgtatttgtcttcaccaccaagttctactacttcaccgtcggtaatagcatttccgttttcatcaatacgagctaccatagtagctttacgcccacaatggcaaacgcccttgagctcaacaagtttatcggctacagaaagaagagctttagaaccttcgaataactcgccgcgaaaatcagtgcgaagcccatatgccattactggaacatcatacaagtcaacgattttacatagctgaagaacatgttcagcagtcaagaattgtgcttcatctacaaatacacaatgaatatcacgttgtgtttgtgcccacttgaaaaattcaagtatgtcaatagattcgtctactgtattagcttcatgacgaagaccaatacgagaagtaacttccgttgccgaatcccgagtatcaatagcaggtttcagaatgagagttcccattcctcgttctttatagttatgggctgctgtaagaaggttagctgatttgcctgcattcatactcgcgtagttgaaataaagctgtgccattaaagtgtctccataaaatcagaaatagcattcttagaacgaatgagttcatcgtattcttcaggtagaccatttccgtaaatggcactaatagctactacttgctcggcacctgcataatcgtcaatcaactgccacagtttatttttttgctctttagtaatcatctatttacctctaacaagacgtatttagcttttagcctcttcatattctaccactgtaatgtcaatatcaggggttgctaaattaataagtttctcaattagttcccaatcaccgccagcaataccagcaccaatctttggaatgtatagaggacgattataaacaatacgaccagaatttagttcatggaatgcattaaaaattgcgccgtaatcaacatttggacctggagcatactgagtatacaaattatagcaatatgcagtgccattcttgtgaatggctcgagtatgagttccaagcttagctaaattattgtcataataacggtcttcatcgatgtcaatatcgagaattggaggatatgctttagcaagttgtcctgctacaccagcacccattgtagtaaagcaattacatccatgagcaatatcgcattcatgcttcatgaataattctacaatattacccttaatatatccagtaatcatttattcacctatggaattttatatgttgcatattcattaagattattgtatactcttaaaaatatagcattgttacaattaaggatagggttcagcactccttgttctttaggatgcattactccgtcaatagaaacgccatcgctctgcattccacatccgcgagcattatattcgacaagtggaactattacctggtcatctttatcttggtaattataaaatgacattagcaattttctactgctaggcacaaatgctatttcaatattgttcttgaatggaccgttgctttctattttagtcccctgcgccgctagtacaggttcaggatagcctgggagcttttcccaggcattaactgaaaatgcgcagcataataaaatagctgcttttttcattttgatgatagtcctgacatataacgagccattaattggtcacgatacattaaacatatattttcgttaggagcattgacacataaatctttcatgctcttagccttacgatttattagtgttgtccactgggccgggctacgtgaatcttttactccatcgctgaatgctgaatctaattcaagcgctaatatatcaacacattcagagttcgtattgcaaaatgttttagcgatacgaagtgaatctgtcattgaattttcagcattagcagagaatgccagtaccaatccaagaagcgcggcgtactttaccattattccacctttatatgtagcattttatgtttctttaagaaattagctttctctaggacatctgacgcataagagtttccccttttgacattccatcctgcattataactagcaagagcttttcgcatattgccgttatgtatatttaaccaatatgaaagctcaatatatgcccattccgcggaattctgtctagatttaagcatttttcttatttcagaatcactaaggtttttgccttctaatttagctctggctttaaccgtaggcaagtaattttgaaataccccataagaatgatgcccctttcctgcttttaaattggctcctgccgaagattctttccatgatatagcagccattatatatcctaagccgttattatcatatcggttatgcggagatttttcctttccggatttttgatattgctcaccaaaattatatgcgtaatgtaagttgtcaagttgaacattactgaaagttggctcagacccaaaggccgttgaacataaggccattagaccgataagcgcttttttcatgtttacctcaattaatgtgtataacttttgtgctgattttacctttcaaacgtttatcattaacgaatgccatacgacactttatactaggtccttttcctggtcttggaatatccatggtaaaccctagccacagatttccatccgtaatttctaaccgcattggcttatactcgatgttttcatcaatgtcttttgggtcaattggaagccaaggcattgctaagaattcattaatttctttaagatgattaggaattttggaaagaacagagaatacatactcttcatcaatttcacgttgaatagcacggtccaacaaatgatcagagtacttagtgaagaaaggctctttaccctcggctttcgcccgggcacgaacagataaattcaaagagcgaaaagcttcctcaaacttacgacgcagtttagttctgcgaatgaatacttctgggttagttgacatagttcattctcctttgtttgtagggccatagtatcatggcccgtaaggaaagtaaactactttttaatatttttcttctggacagaacactgcccggcaagcccacatagaagcttccttcagtttctgttttgctgtacgaatctgggcaatacgttcgtatgcttcatcgagtacctgcttgggttcattggctgactcttggtagttgattaatgcctcttcttcaagagcagtaaagataagaccaagacgggtttcagcgtctttgatagcattcactttaccaattttttcattggtatgtggcttgtatcctttaatatcttcgattgacattatagtgcctctgtgaaagtacgagcgataacgtcgcgttgctgttccggagtcagagagttgaagcgtaccgcgtagccggaaacacgaatggtcagctgcggatatttttccggatgctcaaccgcgtccagcagggtttcgcgacgcagcacgttaacgttcaggtgctgaccgccttcaacttttaccgttggctggtattcaatttctacttcacgcgccttgtagccataaaaagtttcagcatccgtaatagtatcttctttaagaacttttgaaacgattactcgtgcgtcatcaccatcttcgatgtaaatggtgcctttaagttcaccttcaagaatttgatatgctttcatatttcctcttaattagattctttattccaaccacgcatgtacgcggtaattacgtccatagtattccactcagtagaatggaacttggatgcagcctgcaagtacgagattttaccttctggcattaattttacccgtgctaaacgttcagaaatagcagcgtctttccatgtagcaaaacccgttggtccttttaattcttctttaagacgaataacttctgcttctaattcagattctcgccataagcgttctctggcatcattagcataaagtatttcttcatcagtttctttatcgtactctacaatttcaataggctcatcaactccatatccacgagtgcctatatacgttgtagcttcttcccactgttttgtggcttcattccaagttccattctgatgagcttcataaaaatcttgctcaccagaattactgaaccaatcacagaagctttcaactaaatgtggaggacactttataacaatttcagccattgcattgttttctcttgaatgcgttggtcatatgtgattaagcttgaactaatcacgcctttgagcttgccagatataaactcaattctaaaattaggatagcgattcatccacttcgtgttaggagcattagaaatgaattctgcacctttaaacggaccagacagaaacttgtagcgcttgtactcaagcaggtttccagccgtaaccattgttattaattgcttcatatcggaaaatcctgtattttccattactgtaatcatatcaacaatttctgtctgtgtcatcattgcattcctatcacgaaaaataaaggtaaggtatcattaggcatagaccatctgatagcttcctggtacatatcatagaacttcatcatatcgggaactttcattggttcttcaatgataattaatgctcttccaaactttcttcctctaaacttataagaggaatcattggatagaaattccctgattgtcatcggaacaattgatttagctatctcgttagccggtaatttattaattaaatgcgatgaattatattctcgtagaataccttccatcagttcagatgattgtgtgtatcgagtagataagattataaccgaaccatcttcaagcaaccaatcggtagcgaattggcataaggctgcggtctttccggtttgtcttccaccgtctagacgaagggtaccgtactctcgcataaggcaagacggttcataaaaactgtagttgggattattcaatcgtctgtctgcagcgtctctgaaagcatgcatcagggtcaaataaatgggagttaagtgtttcattttagattccagttaaaggggccattccttggcacatgtttaatccatcgacacactatgtaaaccccttaccgcacttgggctcgaccttattacaggtaggaaaagctacttcactcagaggactcgacgttcatgaggagaggtcgtgttcggctttattaggaaattgcttacttaattgatttagcgtaacgaatagcgccgcgatcgtttacgaatgcaattttaccattacgcatgtacatggtaacagtacgttggtaaccgttagaagttttgccagactgataacctactaatgcaaagttatcttcaccaggtttgttctgcttagacttaatacgctcatgaccaaatgccattaaggagcgtgcatcgccagatgctactgctttgcgagaagactcatcttcaatagaagaggtgaaatcatcgaatgaatcaaacttagcatggctcttattatataacttgccgtctactacgtagttatatccaacaacgtccatttcaatttctgtaccatcttctagcgtggctgtcatcttctgaccttttttaaatttcagaagattacttccaacagattcagtcattacgccaactgttgctaaacgggattcatttaaaaattcttgataagttttcatttattttccttgataagcggcccaagttccggtccgcatagtttcaattacacgacgagcacgattaggtgtctgacgataccaacgtgaatttgccagttctttggcagcagcatcccattttttagcagctaagagcttcatggaagcagggaatccagcgacaccacctacacccatttggaataccatgttaattagagctgctctacgaacatcatctaatatattatataccgggcttaatgtagcattagccacaatgcccttaattgctttttcaacatcctttgcaaaaattacttctgcctcagcctgggtaatttggccaccagtagaacgacctacaagcttgtccaggttagaaatagccaaagattttgacgggtctttagtcagtaagtggccaataccaatagtccaatacccttcggtatctttataaattttgctatcgtatccttcatcaatacgcagcatgccaaaaatatccataaggacctcctattaattataggagtatttatttggccctgcacttggctatgaataattcaaggctacacttctcgtatggtgtccatttacctttccaccacacataatctcttctatcgtcctcgggcaattcactaaatcccggatatagctgttctgctatataatatgctgattttgtatactcgccgtcaccgaagacataccgtgacttcattagtgtacgtgacaacttatctcgaggatgaaatatgctaatccatcttccgtcacgaacaaatcgtagttcatgcttataaatgtgtggaatgcctaattcaacagcttcttccatagtaacctcactgggctgtgctatacatctgtgtcatgattttatacaaacttggtcccatcacatatttccattgagaaggtttaattaaagcaaatgcgtcgatttccgggaaagaaattccattttcatctttatggtaagctgtgcaacagcaattcttaaacacttctgggctcacagggagcatatatccaaacaaatggatatccttattgctggcataatcatgtcgtccgaggtcatataagaggtcctggtcaaacccagtaaaccctgtttcttcctggcattcgcgaatagcagcttcttttggtgtttcaccaggctcaacatgtcctttcggaatatcccatctagagcctctgccctggacatatgtatttgtcatacgacccatgaaaagccgtttgtcatcggtaaagaataagattcctgcactgagctctttcattggcattcattccaactttcttcaagaatatcttccatggcagtatagaccatagactctagtacaccatcacaattatatgaaccctctaccgagaaatcacagataggtccattaataccaagcagttcttctttaagtgaaatctcgataccgctcagtgattcattatcgctgtaacacagaaggcgagtatcaccattttcaaattttacatgcactgcaacagccattatttcatctccttaatccaggataaagtttcattacgagaatcatctttagatttttctttctttactttgggtttatcaaatacaccccgctgccgctgggaaacgaattgcaaccaacgagcaagcattgcaaaccaagttccaacccctgacatccaacctagatagtacagcgtatcaccaaatactggtgaaaagaagtagaacccccagaatatcccaacaccaacaaatgttgagaaggaaaacaggataagcagaaataggaagaaatacaagaaatcatcatctttaatcattccacgataacaagttttaatcattttctgcagctcctaatccaggtgttgaaatcttctttttctttccacttcttgtatttcatacggtaagctaaaaatgtgcagcaattaatcaacgcgataattagcatccacatgaggctgaatgcgaaaacacctaaaaataaaagcataatcataaactctgagacgttcaatccaaagaatgtccctccaacaattacaaaagcacaatataaaatccatgtcacgattccaaaagctggcgccagcccatcttggttccaaaacccgtcaggtttacattcattcattttcttctcacctctttaataaactcaaacgactttttgcggttccattcaagagttaaattcttgcactgttctttccattcagctttacgcttataattattgcgagaccatttaacccatcgggaacattcaattaatcccatgatgagcaaactagttccccaccatgcaagcagaattccgaataacactgccggtgtaatatcagttaaatgcatgatatcaatcgcggcaaaggtacacattgcgccgacagttgcaccaataccaggaacaagggcataatcaatctgatcaaatttatagacataattataaacgggaggttcacttggcagatataagttactcatttctgcaccctctcacggcagtatttgataaattcatcaatgattaattgtttgcctaccatgttgttagagtcaaacatacccatgacttttggtggtaattcattaacacagtaatttaaataattgctataatcatcctgagatgtcacgtatttaaccagattaataccgagacgataactagttttattatagataatctcgataactactgtatatgttgtggagctagaagtaaaatatccatcggcattagtacgagctgatgttagatttgatggagaatcgttgaaagaataaattccgtaccgaagtgcaaagatatctacaagcttaactccgtcggaaatagacgaaatattagaaattaagtttttcagcttggaatagtctttaagaacgatagcccgcggtaaaactgtggtgttatacccgttatagcgagttttccaattttcaggccgagtatcagaataagcaaatttctcaagaatatcagtgatttcttttgggaatcctgctgcaattaattctttaatttgaggtgttgccattggaatatctccagcgcattcatataacattttattatccaagttaggggcccgaaggccccgataaaattacttcagactttccagatattcctggacatcagcagtggtggtttcaataccaggctgagtaccgctgaaggtttcaactttcatcatgatgtcttgtacatctactttagcgagttccgcgatttcaatcacgtcatcagcagaggtaatacccagagcagaagcattacgggtctcacggatgtattcgagtttcactgccaaatcaagacgttggtcatcaagcttaactacggtttcttcaatttgggctcgcatttctttatattcggcagctttatcacgtaaagccttagcagtacgacgatacagaagacctagtttagcatgggtttctacattcataccttctgccatcaagcgacgaatttcacgctctttggaagcacctgcctggtctttttcgtcagcaagtttcagcagacgcttttcttcatttaccgatttaacatgcgtggtacgcagtttagtgatttcatcaataatacgatttgccgcagtggtatactggtcttcaacagaagtgttctgtgcaacaaaggtaccgaatttagaacggatgaattcaacaagttttttcagaatagacattttatttcctttcaatagttatggtggttttattcgtacggattaatccaatcataaacatatggtttaatgattagaccctgttcatttttgctgcgctcgaatatctcgatgtaatcagtaacgtatgactctaacccgagaataagaacagtttctttgccttcttctactgttgccttaattaggcgctcgatagctattttagcttcaagacgtatatcagcaagagtttttggaactatatttgctgtatccattactatttcctcagtaggtggggagttcattataactccccaaaattattagcagttaattaccgcttcaattcgtttggttaaagcactagcagtttttgcgaatttaatttgaacagtttcggtagcagcttcttcatggtaaactcgaacgtagtactcttcaacagcaggccaatctttgcgaacatgcttaatcaaatctttcagttcacgagtttctgctacgttgaacactgcgtgttcatgttcacctttaatccaaatcgcgcgataacgatcaggagtaccgtaattgttataaccacgttcaatttggataaagttgaatttagacattttattctccgttactctgctttgttttgatggagctatagtaaccgagttgatagaggaagtaaacaactttgtgcaaaaattttagggcatctggaggaactttctggaagttagaatggatttatacagccggggatacaaaaatgccctagatgaattctagggctgtaggattacattttattatacattgtacgataattctgtctgacgactgagttcaacaaggtgatgattcagtttagctaaaagcgttttcacttcaccgatatgctgagtttcacgtgcagaaggtttagcaccttgggattcacgatacttccacagattatcgaaatagaattgaactgccttataaagaggaccattatctcttactagcggaagagctttatcgatagctttaaacagttcacctgaaccaatgatgtctccatggtctccactaattttaaggccaggaatatttttaggtttcgctttaaccggagccggttttgcggccggtgcttgtgccggagaagctccacgtgcaggtgtagtaacctttccgcctaaactttcaaaggcagctgctaccttagcatagtctttaggatcgctaatcccaataccataaatcttttccacagaagccgcaaatttgctaaaatcatggcgttcaccacgtggaaccaataccagagcgtcacgccatttcgatttagtcatgcggccaggagctgcttcaaaaagctcttcttcggttaaaaaatctttaaatttcattgcaaaaaaatccttagtgtcgattaaattactatttatactaaaaagccccgtccgaagacagggctctaataatcgacagcatcacccactggcagatgacctgcgaaattcatttctttggactcggaggcatcagtctcatccaaagaagtatagcgtcaggaggttatgcttgcgacagtgaacaaccgactagcggcaatggacgaaccattctcttctatctgacgactcaacgagggtatacgcaagtttcccttcgaattacattacatcgtattcttcaactagatactgataataggaatcgtttgcttcaagttcttccgcatatgatgttgcttcggatttagtgtgaaaaatcttaagaggcaaagaatattcttcatagccatattcacagttccagttattttttactacagcatatactttcatattttcctcattaatttttggtatgggtaggaatcgaacctacaagccattcagcaccagggcctcacgctctacctatttgagctatcacataccagaatttggtgccgattgcaggagtcgaacccgcggcatcttcattacaagtgaagcgctctaccaactgagctaaatcggcatatttggtgaagaattacctacgtcactaggttggctgttctgtccacttaaggcttgcagcaggaacaccatggcttttcaccattgatcctctcacgactgagacattcttcataatttggtgcaccgagagggattcgaaccctcaatcctcgcggcgggagattttaagtctcctgtgtataccagttccaccatcgatgcgaaatggtcgaggcagaaggattcgaaccttcgacctgcggattagaagtccgctgctctatccagctgagctatgccccgagattgttcaggcaggacttgaacctgcacgactgattccgtcagcgatttaccaccgtcgccagcatatgatgcaatatgcgagctcaaaaggtgtccgtcaccatgtctaccgatttcaacactgaacaagataattatattactgattatttatagcatttcttaaacgataaagttgattacagaattcgcgttcagtcaaaatcgtttcagaaattttatttttacccatactgtgagtgagcgtagcattccgggtagcagccaaagcttttctgaatccttcatttttactaagtgcatcgtatgctcctgttagtaaattctgatacgcttctgaggcacggtgaataggaacacctttccaataaagtgtttgagttggccaccaccgtttctttttacctttgaacttagccgatttaccaactaatgtacatacatgtgcttgcatttcaggcgaagaaaatttgagggactgcaagaatccctccattgaggcacattctacgccatcatagataaatttatgaggagcaaaattactcaaagcacatgatggatatgaactacctgaaccaatatccattacttttccttcacgtatttcaaccaatcaacttttaatgggctttctttctgcttatacgtaattccaatatggaatgcaaccggagcatcaggaatacgaatttcttctttaatgtcaaagatttctactttctcaaatactcgcatgaaatcatagtcatattcaattggattacctagccaagcctgaatagcatacataacttcatttgaacaagaataatgattatctaaataagcatcaaactcttcgtctgagcaatcatatgcaggaacatcaacaccaaagaatttcttggaaaattcaggagttacatacttctgttcagtatgaagcttttcaagaattgcttcatggttgtaatcattatttccaaggtattcaccgcggcgaccattagaagagaaccattcaagaacgtgaattacttgattaatctcttctttttctaagccataaaccatttgggtagaataccgatcggcatcattttcccaagtggtaattgccattgctaagcctttaggaataacttgtccaaatttaatatgcatttcaatttcctcagttgataatttggtgaccctggcaaagactcgaacatgcaaccaatcccttatgaggggaacgctctaccaattgagctacagggcctttatagaaatcttatgacttttataaaagccctccgaagagggcgccttgtcgggcttatccacctgctaggcagaattactcacacataaaatcagctacttcccagaagtcattttcaactgctactttaaccaccggcgaaatttcagacgttttaatagaaacaattacatcacctgcgacagtttctaccagaccaacgattttctcgctgcgagcaacaaatttactcaccggatggaatttgccggtagcagcgaacatagcttcttggtcaacaatcagtgcgatacgtttcattctttttccttgtttgttttgatgtagtaataataacaggttattcttgtagcattaaatctcgaaaatcgttccgttttcccacattgttgcgaacataggagaaaccttaacgaatgatttgcttcgcattgcaacgtagtcgttatctactttagccaatcctgaagcaatatcagtaatacgaccgcagcgcatagaaccacgaccacctttattatatgtacgttctccgtagaaaacgatatcgccaacttgtacgtctcgacctttagaatctttcatcatatttcgcctgataaattcgtttaaaatcagtaattagctcttctacatttgaagcattagtaaacggaataacttgacgcagtttacttactttacagccagaatgataagcaataacttcttgaatatcacgctcactgaagtactcatatttgattaatgcttcgtatctgcatttaatccagacccacatacctttgcgttcatcaaaagtatatgcaaaatcagcatgaagcattaaatcacgttcagatttacataatcctaaagcaaaattagttggacgattccattgtaatttcaccgtaatagcatttactttattcgcaacaccaataaaaatattcattctatttccttcgcttgtttttggccttcttgtcgtgcacgagaacgtcctgctttatgcagtgattcgtaatatgctcggcgtctatcaatgttttctgtacgatatgctttcccgaaatgggatgttttgaagccgtaatatttcataatataattctcaatggcaagcgattggacggtatgcccggcctcgaaccgagtcacattgactttgcagaatccatgtgtttaatatatcacccatactcgatagcatatctgaacgagactgcaatcccgctactcagcttacgccatcttgtattgtgtcataccgttaatttggtctccatagaatgactcgaacattcgacctctccatcccaaatggagcgctctaccagactgagctatacggagtaatttggagcatccaaagggaatcgaacccttatcaagtgagtggaagtcacctataatagccgttatacgatggatgcaaatttggcaggccctgaaggaatcgaaccctcatcactgggtttggagcccagcataatagccgttatactaagaacctgttatttggtgggagtaactggactcgaaccagtcaccgctcgattatcggtcgagagctctaccaaatgagctatactcccatggaaagctaatcatctgattgttgatgtaccactgctatgggcagcgtttaactttcataaatttggcggagagtaaaggagttgaaccctcaccgtttccgatggcccggatttcaagtccggtttgctaccactagcgctactctccattaattggtgaaggaagtgtcatatagacacaattcgcttagcgacagccacagcgttttgcggaccgtgtatttttccaccattccttcattgttggggtgaccgatgggagttgaacccatgactacgagaatcacaatctcgagttctaccaactgaactacggccacatcaatattcactccatccatcatgaggacttcatacgaaattaagagaagaatgatcagttcaacccctgtagacgcgttgaatgaatattaatttggctggactatctggattcgaaccagagataccggagtcaaaggccggtgacttaaccgcttgtctatagtccaattatttatttactaattttcttcctttataccatccttctggtataggggaatcttttgaaatctttttagcttctattccattattaatccacattgtgccaaattgtgaattttttgaaccggattgagctagtttcagtttatcagaaatttttcgtttagtttcagaagagtgtgttttacctaaaaacggatttccatttttagctatattagctttaactgcgtctgcaatgcgggaacgtgcatctggtgtaattccagatttaatcttatccgaaaaattcagtttaaatttagaatcatttctaattttattactggttgaatttcctccaagtattcctcttgctttcatttttgacggagtccaatatgttgagttaacatagtcaaatccaccttcgccaccaagttttaaattatatacgtttcctaataaaaattctggtgtaactatttcagattcctttaaatacatctcctcagatgattcacaataatgaataacttccttggtaaagttctcaattccgtattttagaattgcctttttaattaatacacctgaacccatgtagccatcattgatgtcatcagttttatgggctccaacataatatttaccatttacgttattggttattttataaatcaaatagtacataaattattctccataccaactatgtgataattatatcacatggtacggataaagtaaacaaaagaggcggaggcaggactcgaacctgcgcgtgtcgggatatgagcccaacattctaccaactgaagttaccccgcatttatccgggttcttgaagtactaacaagtagcttgatgtagaacacgctaaagatataatcttacgaatatagagcttattccgtgggaacaaacagcttcgtcctcggcattatcttacaggactcaaactcatcttcaagaactgccacgttcttatttggcggacctaacggggatcgaacccgtgctctctcccgtgacaggggagtattttaaccaactaaactataggtccataattcgctttcagagatactctggcacgatgccgaagcaaaggggaacagaactctcatcaccttggtaccagatgaatcttgtttagcactctgttctaagatgtatccctgaaagcgaactttcaacgccgtaagaaattataagcacgtagttatcgttgagggaactcgtacacagggaattctatgccgacgatttatcagaacgtcttctgacttcttcatttggcgggccgtgcaggtatcgaacctgcctagtcatttctgacacggattaacagtccgtcgcttaccctctcagccaacgacccgaattggtgggacaccgaagatttgaacttcggacacccggattaaaagtccggtgctctaaccaactgagctagtatccctaaatttggtggggagtaatggagtcgaaccactcgagccttttgagcaacagatttacagtctgtcccgctacccctacggtctaactccccaatgggtaattttatttatactgctctaaaattaatcagagcagttgatagattaataataacaaagaaaacctaaagcatattacacaatcggtgagctctttgatttaaccaggaataccctatgcggtgaatccatatgagagagcaatacccggtgctcaggaattggacttgtatggaacggaaccacacgataacctttaggcgtaaatcctagcaaaataccaacgcttgctgcagaaagtgacccgccgcaatagtatgataccaaatcaccaggctggatttcattgtcaagagaatcagttttgacatgcttaggcgtaactaaatcattaggaattggaacgccttgtgcatcatagtattcatgggcaagaagcttataattctcttgatagaaagtattaaacgcagctctgatattcatcacaatttcctcacaattaatctttgtatgcttcagttgaacctttagcaacggtctcaaatcgggaattcagtatctcaaaatagtcttgatacgttccctggagggcttcatagcattcttctaccgtagagtagacacctctgatttggtcagagccaggagcaggataataattagaccaagttaaaagtgcgtacattacttacgtttccagctgtagtgagccaaaataagaagcactgcaatagcaagtagtgatgaatgcagtgctgccagtagtgcacctagtcctacacccaaagtaacataatcatacttagttacttcttcacggtttaaatcatagtttttgatgaaccactgcttaatctttttcatgtgctattttatccattatgaaagaaatgatacccattagaaatgcaacacttaacactgatactgtttcaggaagagacataaaggctgcacctataatgccaaaacctaatgctcccatgcagattgttgatgcaacatttctaattaattcacaacgtttcattttattctcctcaagttgatagggttatagtatcactactacaacccgttgtaaacaactttattcagcgccagcggcttttaaaagctttttaagattagcagaacctcgggctgaaaaagttaccttaccatctttttcaccgatgctgccagtcaatttagaaagtttatcactaggaacttttttaaaatcggctaatgtcccgtcaacggtttttgtaacaatcggcagttcatcatcctgtcttttagcttctgtaataaattcttggtacgttttcatgttgcttccgttttgttagtttgtttttgatggagctatagtatcaccactaggaccggttgtaaacaactttgtgaaataaatttctatttcaaatcttctgaccagttcagttttagtggctcttggtactctctatcaagcactacaggtacttgaacttcaccctcgaagtgagctggaccgacattgtagctgagagtaatgtgcggtgagtaatctgggaaatcgtgagttgctcccagagctcttgcatattggtgacggaattttaagtattctgaatctagtttaagaactagtgtacgtccgtcttgcgtgtcccatacttcaagtttacctgatgtagcaacttcaaaacttcctgaagcgcaaacgtatggaacatgaactcttgaatagcatatcgtcgtatgaatcttatgacgaggtacaggattagggaccttcaactcacgctgaaggtcctcaatagcatcaagagttttctcagagaatttagcagctacatatagaccagtgctaaaatcactgaagttcattaggcatcagcttcttcagtagtttcttctgcgaactgtgcttcgatttttgcaaccaggtcatcaagtttaacctgaccgtcttcactgatttcaacgccggacacagcaatcagtttctgtagtacttcttcatactgtgcacgcagagcggacagaccttggatggtttcagacaggtcaaatacacgaactttcaaagtatcgacttgggcttgcagttgttcagtagtcatttttgaattcctaatatagtgttgatttttgaataaagttcttctagagaaccgtcgttagttattacgatatcgccttcgcgaatcggaagtccacgctctgtgacgtgagtatcttttttagaaccttcttgctcaggacgaactacatgaataactgtagcacccatcgccctggctacatcaagttcatggtcttggcgggtatctgggacaatgaaataatcataatcaccaaaagtatcagccataaccaaagtgaatcgtttcacccaatacatgcgatcgagcttatcacagacaatgtcagtcccaagggtctgcatgagacgacgaattgaccatggctcaacaggtttatttattacaacttgacggatgacttccatcgtatcgccgtcaagaattttacgcttgctatcataaaccaccccaggtaaaggcaaatcatgatggacatattcaatagcattcgccataatacgaatcacgtctttagtagacagatttaaatcctgctcacgatcgtaatcaataccttcaatcattgaccgagtaatgcgaggaaactgacgtgatgtatcgcgataccactcagtaagcattgcatcagccaacgcatctttaattggacctgctaactgatgctttgttgcgttatagttatccataatgtagtcagcagttgtatctttgccactacgttttttaccaatcaaaaataaaagcttcaaattattacctcatagaaggatgcattcccataactttctgttgatactgggattcgcgagtatcattgacagaaggtctaccagtaattattataccatctttttcaacttcaatgtatttgtactgcaaagttgctacacataccattgctgggtcggattcttcggttaaagaatactcaatttcagataaatcactcacccaacctccgatgtagcggacagttaatactatatcatgtttatcgttatcaagaacatgcattaaaactgcaccaggaaatccttcaccgccgttattccatccagacttgtctcggtcaatgtagttttgacagcttaacatccatttgtacatttgtacccatgaatcaagattttcatctactaaaaatctaacaggaacagcgtcaaactcaaaagtagacccaggcaatttagcacgatgcatgccttgaggcgaacctacagtatcagtagcaggaatatgaattccaggaactacagctgtttgaagattagctttaaacgcttgggtgaggcccccatcagggacctctaatataaagttagttgtgttagtttgattaaacagtccagtagacattatgatttccatacagaagtagcagagtagcgtttgcctttcgacatgaactgctgcagtggtaacatgactacattcgcccaatcagccggttttatctcaattaaagcaccctttatattaccaggaatatatgctttaatcattttgtcagcgccagcaaatcctttaacttggctccagtttatctttaatctggtcttattagatatcactggcgtattagcatactgtttaagaagttcttctaaaaactgctgacgagcctttggcggaatgtagtgaaggtttaacccatacatcaatgtggttgtaccttgctttccaagaccaagataaactatcaaaggaaatttatcccagaatggaagagtgtctttgtgcttagcgtcatacatgtaagcatatagctttccaggttgaggcttggttacagaatgaccacgtatatttttctttatagtttctgcaaaccatttagcagatttattgtttactgctgcgccttcattacgaattttatctttgatagagcttcgaaatgaatttaccatcacaagagcacgctcttgtttggtcattttgttagcaggttttttctcaatttctgctactttaattgccgttttaattcttgatgcatgacgagccattgctttactgaacgtagcaggatttattcctttgctttcagcgaatgatttagacgtcatgccttttttacgagcagcagagtattcaactcctaatgctacccattgattttcactacgggatttagctttaggcgattctgcagcttcagtgataaattcaaatatagccatcagcctttccatcctaattttttaagtgaatcttcggtaattaacctaaattctatacccattttactggcagtagcttgagctgctttccacttatcaacgtttacagaccaagtgtaaatttcatcaatgtaccgtttcttcgctgatgtcgtcaactttgtgggtttgaccggaggtctagtttctttctttggcttaacttcaaaaaagaactgttgaccattagaaaacttagcccagaaatccatgaaataccggcgtttctttccatctgcattactaaagtatggaattaccacgcactctgaattccattggactacgtctgggtgattatctaaccaccgcatcatgaaattgctcccaagtagatcgatatgtgatcttacgagggtcccccttatatttacttatgttttttggtaaaaattttccgctataagccattaggcttctccttacatttatcaaaatgccagcacttcattccacgaggttttcctgatttaccacagtgaggacatgttactataggctgcaattctgaaacagctctaagctttgctcgtgtttcttctgatctcttctttccggtgttagctaaatttaatttagtttggtgctctttagttctatttttggctgcagtagacatatttttcttcatggtatcactttttgaaatacctgtcatagaaatactgcgcttttcatttgattctagcgtctgagactttccagtaagagctgcagacagtttagctgaccactcctttgaccttggacttcgcttctttcctgttaatacggcagagttagcaatagaaacccttttgcgaatccattcatatgatttgttatttcttcctgctaatttagaagacattatatgaactgcatatgataacttatgattatttggataaatcttagctaaaagctgatgcgccacataatgctcagctgctgttaagtccacaaggttatctttatcatcacttccacccatgcatcgtggcacaatgtgatgccgttctttgtacccttctaaattgcgggatttgcctcttgcaattagttggtcataaattttacggtaattcatgctattctcctaagtagttagtagggtaataatatcataaaccactcgtcatgtacactacaactttataaatactgttattaatatttataagaggataaactatgctcttctcattttttagtccgatagattattctgcaaagaccgtaaaaggtgctaaggcaaaagctatcccaaccgctgacatatttcgtaattatcgcaaatatttcgacactgtagcagaaaactatcttttacaaacatattacataagtggagctcctagaccagaagaattagcatatattctttatggaaatagtcagttgtactggattcttttaatgtgtaataacgtatatgacccgtttagagattggattaaaacccaggatgcatgctatcaatttgcacaacaaaaatatgcagatgtaggtggagaccaaatactctatcacgtggatgcaaacggcaatcgttattataacctcgagcaatatcctgaaaattcaggcatttggtatgataaaggggactttaatcatcagtaccctcaatatactggggctttagctggtgttgacatttatgaagactctattatagaaaatgaaaaactgcgccaaataaacattatcaatcctagtgatattgaagcatttctttctgatattatacgagaaatggaaaaggctcctgacagtgaatatgaatcaggtcgatataaatcccagaccacaattggagaagttgtatgattgaaatgaatgattcgttgaaatggtttaccggtgttgttgaagacagacaagacccgttgaaacaaggaagagtgcgagtacgtgtttatgggcttcacccatttgaaaaggtgcaaggagctataacaggtcttcctactgaagaccttccctggatgtcagtgattcagcctaccaactcagctgggatttctggagttggctcatctataaccggaatggtagaaggaacatcagtgtttgggttatggcttgatgaattcaaaacagcaggactagtaataggaacatattctgcgcatagaaaaacgaagccaaactacacggaaggcttttctgatcctacaggccaatatcctagacaggtcgggtcagataccaacccactagttcaaggcgatgaaactgggtatagtgctataccaaatatcattcaggacagaaatttagacattggcattaatcctgatgatgctgacttaagtgatattcctgaagacccaaatcctgcaattacaataacagatatgcttaatagggatgaaggtcttagattgaaggtctattgggacacagaaggatatcctactataggtattgggcatcttatcatggcgcaaaaagtacgtgatatgtctgtcattaataaaactttatctaatcaggttggtcgtactgttacgggaaatcccggtatcattacaatggacgaagcagtcgcgttatttaagcaagaccgcgataaaatgctttctgatattaaaacgaattcacgtgtaggacctgtatatgctaaagtcaacaaatcaaggcaaatggctttagaaaatatgagttttcaaatgggtgtaggtggtttagcaaaatttggtaaaatgcttgatgccatgctcattggtgattggaaaaccgcttatacagaagcaagaaactctgtttggtttaatcagacaaaaggtcgtgcttctcgtgtttccatgattattctaacgggtaatatggaatcatatggagttcctgctccaaagccagaaggaaaaaacctgtctgctgcttacgtagaaccaaagtctggaggtaatcctgaagacccatggactccggaagattcaagaattcttttcaaagaacctgagtcttcatataatggtcagtatccatatgttcacacaatggaaacagaatcaggtcatatccaagagtttgatgatacacctggctatgaacgctatcgtattgttcacccaacaggttcatacgaagaagtagctcccgatggacgccgtaccagaaaaactgtagccgatttatatgacatgactcagggtgatggaaatattttaatctctggggataagaaggttaacgttggagggaacgagacctattataacatgtataatcgtcgacagcaaattgatggcgataacacgctttatgtacgtggaaatgaaactaaaactattgaaggcgatggtactatttttgtcaagggtaacattaagatagtcgttgaaggaaatgctgatatccaagtcaacggtgatgccactactaaagtagatggcaaccacgacgtaaccgtcggtggtaacttaacttggcaagtagcaggtactgtgaattggaatgttggcggggcttggactgagacaatggcttctatgagctcaatcgcccaaggtcaatacactgttgatggttcacgaattgatgtaggttaatcatggctgatatacttcctattaataccacgttacgcgaagtaatagaaggtgaatacgttgagcagtactttactgctcaattatctaccaacgaaacattaaaatcaataaatattatcgactatcaaccagtatctgatatctctgtgtctgaaacctattataaaggtaattataactcagtttttacttttggaaacgatgtgcttaaataccgtgaaggcgatgagctgaagtccgcttcagcgtgggaggatttacctaatcccaaaactgctgatttatacctgtggaaagcccccagaacactagagaagacatttacctatacagttgagataatatatacagtgacagaagaatcgtctggaggttcatccggaggttctagtgctccaatcataacagaacataaaaagcaaaagatttactctcaaacagttaaaggcaactggagtagatggggcgaccagcttcgtgcttatgtatatgcggggaactaaatggctggactatcatttaataaatgcttaactgccgggcatagtgcgtatcctccgacagaagtaaatgctacacaaagtaaagtattcactggtggaatagcggtattagttgatggcgactcaattaccccacacaccaagacggttgaccctcatgatacgcatggaggagttgttcaacctcgcacatccaaggtatttgtaacaggcaaaaaagctgttcaaatggccgatccaatttcttgcggcgacactgtcgcgcaatcaagctcaaaggtattcatacactaatggctattaaagaacctttaaattatcagttaacgcgtactgcaaacgctatcccagacgcatttactggagcaacattcgacgaaattaaaaatcagcttattaactggcttagtggtcaaaaagagttccaagattttgattttgcgggttcgcgcttaaatgtgctattagatttattagcatataacacgctttacatacagcaatttagtaatactgctttatacgaaagctttattggaacagctaacttgagaagttccgttgttcaagcagctcagcaaaacgggtatttgccaagttccaaatcagcggctactgcatctattatgcttgaggtaactcatccaaatccagagccagcaataaaaatacctcgtggaaccaagtttttagcatatgcacgagattcatcagtagacccatacaactttgttgttaccgaaaatgttattgctttaagagatacttcagcaccagaaggagttaataggtatcttcctattgtcaatttggcacaaggacgtattattcgtactcaattgtcatatgacccgaagaaacctattgttattcgtgatcagtcgattgaccgtaagcaggttaagctgtgggttgatggcgctgaatggactaactggacagacaggtcaatggttcatgcttcatccatttcaacaatttattatatgcgtgaaactgtcgacggaaataccgaattcttctttggtgaaggcgtggcagaagcctctgtagcaggaggagttcttgaaagtaatttcattggtggattaaaacctactaagggcgcgcaggtagttattgaatatattcgtactgatggtgaatctgcgaatggcgcaactgatttcagctatgctgatactctgcaatatatcgtagtaaacaaaatcattgaaaactggtcagattctcctgattatgttggagctgatggcggtggtgaacctgaagacatcgagcgtattcgtgagctcgcccagattaagcgcgaatctcagatgcgatgcgtgtctaaaactgactatgaatcattcgttagttcacgctttggttctatcgtacaagcagtacaatgctttactgatcaggacaaacccggatatgcatttatcgcaattaaaccaaaatctgggttgcagttaactgctgttcaacgagaagacattcaggattatctaaaacctttctgtcttgctccaattactccttcggtaatgagcccagattacttattcattcgtcataatattaaagcttcttatgcgctgaataagttacaagaatctgagcagtggttacagtcaaaaattatagactcaattaatagatattacgttgatgaagttgaaatgtttaacaaaaatttcagtaaatctaaattattgacctatattgatgatactgaccattcaatcatcggttcttctgttgatattcagatggttcgtgaaattgtcaactatttcactcttcctagcgcaggtattaaatactataatactattactccgcggacgttacgttctggtgatttggtctttactgtcactccaactgcagattcatatccagttaatatcgttggaactgacccagataaaaatggtaaaggaaatatggtcattggaccatttaaaccaggtgatattaaagagaatactcatattcagccatatactgaagacgattttgatagaactactaatggagaaagaactcgttggtacaaaatcggtgaagtagattattatggtgataatatttactggagccttggagctattggagccgatcctcttcagtttgaagaccagagtattgagctttattctactcctacccaggatatcgtcttcgcccgcgatggaacacttatcgtatttgagaatgaccttcgtcctcaatacacaactattaaattggagcctattactcaatgacaattgcaccgttcgtcaccagcttacgaattcataagctatctgcgaatcaggtcaatattcgttgggatgacgttggtgcaaacttctactattttgtagaactggccgaaactcgaaacagagcgggggaagttatccccgctgataacttgagttggtcttcactgggttataccgcggataatgattggttcgaacaaaatcgtattgaaccgcttacttattataaaatgcgtgttcaaactacgtcagcagggtttgagccgtctgaatgggttgaaacagaagagttccaaacttttgaagaaaacgcatacacatttgagcatatgcaagaattcagtttagtgaaagaattcattaaacagaagttttctttaaacaacatgtcgtatgttaacttcaacacatctgccatgatggcatctttgatgactgagtcttttcagtttagtcctgaatattctcatttatcagctattgaaaacttcgttgtaggtgaatctggatatcatgaaattcagggacctattgaagcagtgtgtgttgataaaaatagaactatgctgggagaaatagacggaattttgtatctgtttgaaagattccaacatatggttaaagtatcaaatgataaaggacagaattggcaatacgttcagttatttaatgaccgtgtcggaaatccggtttctagagtggtaatttatcaatctaaaactacttcttatgttttaggatatgataaaatcttttacggaaggaaatcatctgacgtacgttggtcatcgaatgaagttaagtttagcgataacgaagttacatttgctaaattgggagaccagttaaagcttggctttgaagtagagttattcggaacgtatgcatcattgcctgctgacgttaccaaatatgctgaagcgtttacctgcaatgacgactatttgtatgttgttgcaaaagacactgtccgtaaagttaaattaaaagatgctccaatagatactgaccctttaagcccgacatttggtgaaaaggtatttgaaaaggaagtatctcatataacaggcaatcctaaatctgtatgctttaaaatggattccgttgggggcaaaatctttgcccttattaccggggaagttaaaaccttaggattagacccaacagacccaaggaacgttgtggattctgcaactaaaggcgtctatgtttaccaggaaggcacaaatacttggaagcgtgtatttggtaataccgatgaagaaaaacgtcgtatagagcatttatggacttctatgtcaactgacggaaaggaaatattcttttcatcagccaattttaagacaacagagtacgctcaggatattgagcttgagacgaaatatccagaactaatttctaccgcagttaaaaatgttaacccaattcagtatcactctgataagcattatcacatgatgagtttcagagcagatgaattttcaagatgggaaacatttgttcctggaccgatgaggttttatgctgaaccttggtttgtctggatggctcgtgaaggcaacagatgctggataagtacagctgaccatgcagttgtcatttataatgatattctttatcaaaaaagagtagatacagcagcacagggaactaccgagcgcattctttcggaagtgtgggataaaggcgacgcaacgttttattgccctccggtttcatttaacggatttttgcagtatgcttctggtatcatgtttcacgagccagatggaaagctgataggttattatgcattcgattatcgtgttcgtgaccaggtaacgcttaactggaaaccaactgatgtaatgtttaaggcgtttctgcagaaccaaacccgtgaagaagattggactcctgaacatactccaggcttgcgtgacccggatttacgtccgtatcttactaaaatgatgccggatagttacttgctacaagatagtaattttgaacacttttgtaagtactatctccaattcctttcagatggaaatggaacacattacaacagtctcgttaatcttgttaagaacaaatatcctcgcgaagaaaatgcatgggaatatctgtggtcagaagtttataaacgcaacatttatctgagtaaagacgctcgtgacgctgtcgtccgtttctttgaagcacgcaagaatgatttctatgctactaaaggaattgaagactcatataagttcctgtttaaacttctttataacgaagacgtcgaaatcgatattgagtcaaagaacactaccgaatatgacattattgttgaaagtacaaatatttctgacgatttagttggtcgtacgatttatactgcttccggtcgtagtaatgtgacttatatcgagagagaataccgggatggtcgtctgttatggcgtattactattcataacttatcaggacggttcattgaaggccaggaaattaaatcagagcgtacggactttgagggtattatagttcaaggtgttcgtggaaaggatatgctgagtaataacattgattatataaaccgcagccgttcttactatgttatgaaaattaagtctcagcttcctacttctcggttccgcgacgatgtattaaggtttgttcatccggtaggtttcggtttcattggtataacattgctgacaatgtttatcaatagtggcttaaatatgaagcatgttgagactatcataaataaactcaagaactataaatgggatgcaggactgccatcagtttatcctgatagagttgctattatcgcttcagatgatacaatagaaagagacccaataaccaatgagcctaggtattcttcacgtgctcaagctggtgaacctttcccgttacctgctaactataatcaagaaaataacaatagtgttatcgctggacaaaaccctggacaacgacgtaagccgttaagtcctacgtttgaccaatcagcagtaacgtttgctaattatcgcgatttagttaaccaacgtcttaaagacgatgcaggtaatcctcgcgatcctgaaaatccgacacaggtaaaaattgatgagtaattcaacaagagcaagttcaacgcgtagcacgatttatcgtgctatcattacatctaagtttagaactgaaaagatgtacacattttataaatcaattggtccgggaacggaccaaaacacgttgtatgtttcatttggtaaaagcactccgtggtcagataacgaatctgaacctgggtttgcacctccatacccggccgataatgaagacggtgtggttgatatttggacaaatatgatgggtgcagtcaaaattgaatcatctatgcttgactgtgttgttccaagaagagactggggagatacaagatatcctaatccacgcacatttttaatcggcgatatcgttgttgctaactctgcgccatataacagaactgatgctggatttggatggatggtatatagatgtattgatgttccaaagaatggaatgtgttcaattggtaatcttacaagcaaagaagaatgtattaagcttgggggtaaatggacgccatcaactatttccggttcagcgcctcgtgggcgtggtgatgcaaatggtactgtcgatttgggcgatggatatctttgggaatatctatatgaaattccagccgacgtatcaattaacagatgtacaaatgaatatatcgtagttccttggccagaagagattgaagaatctccagctcgttggggatttcaaaacaacttaacttggcaacaaaacgactttaacctaatctatcgtatgaagtgtaatacgattagatttaaagcataccttgatgcaatttattttccggagtttagtcttccgggaaatactgggtttaggcagttgtcaattataactaatccgcttgaagttaagccaatgccaaattctcctaacgttaaggctgaaaaaggttggtatagcgcttctggtcttgaaagacagtcaggtgaaatgatttacatggaaaatcgacaacctattatacgttcaatggaccaaacagaagagttaaatttaattttcgagttttaattatggggagcctttggctccccatttttatataaataagactatactttgatatgaggttaacctatgtatacagataagggtaaaaaaataattgacgtcggtgagattggtaatgcttctaccggcgacattctgtatgatggcggtgtgaaaattaatgataacttcgacgccatttataacgccttcgctgatcaacgattatttgcagccggtggtggagctttaaaccaaaaaatccacgcaacaagttattatcaaaagataaaatttggtgatgctaactcggccggtacagttccgatgggttcatgcatagatgctgattgctcagaaggggcagttcaaattcgtctttcaaaaggtaaagcgggagaagctgtattcgttgtaaatagtaatggctcagcatcaaaagctagatccataaaaataacaacaaacggcgaaggtgtagcagatgcatttaaagacggatcgcgagaattgattatcaacacaccaagatgtagaattgaattgtggtgtgttgaagtcaaagctaacggtgctgcagtttgggattattcaatttcaagtatgtttggcagcacatattcaccgttagaagctacatataatttaacaagttctcctattaatattcggcttggatataacgatgattactctactgttaaattgttattaagcttcagcgcaaatccaggtggtcaaaccatcaaaaggcaatcatctgaagtcatgcttatgattgacccgactattacttcatcagcgccaaacggaagagtatttgacactgaatatgcagtgttaagaagcggtgaatcatctgaaaatgaaaagatgtattctatttcatactctattaacgcgcagaaagatttaatatgcacagcttcaacatcttatggaaacgcacgtttggcagttaaagttattgctacacagaccgtaggggtatctcaataatgaaacaaaatttgatagtaggccaatctgtagatgatgggtctggtgattacctccgtaaaggtggtcttaaaattaataacaactttgatgatttatattcagagttaggtgatggttcagttccatttgcagcaggtgcatggaaaacttttaaagctagccctactggaactactttaaatgctaagtttggtcaggcctttgctattaatacccaggcagcaagagttaacgttcagcttccaaagggtacagccaacgactataacaaagttattaaacttcgtgatgtttggtcaacctggcgattaagcccaatcacagttattcctgctcaaggcgatacattaaaaggttcagcttctcctaaaattttcaatactaacttccaagatttggaattggtttattgcgcccctggccgctgggaatatattgaaaataaaacggtagataagctaactaacggtaacttaagtactgtagcgaaaaaatcaattattgctgctgcgggtcagactgactttcttaacatttttgatggcgtagaatataacgaagactcgcttaatgtatatcgtcgtggtaatattttatattacggtgaaaccagcgttatggataaagccaatgctgattacggttctcctggaacagtagcaggtcaattggtagaattaaacggtaaagacattcgtttaaaagttccatgtgttgaaggggaagtaataacatttgaaaccttcctagatggaattggtgtttatcggtcttcatacaacaagttggctatccagatacgagattcagcccagactacatcccagacgattcctgggtcaatgatagtagataaccttactactctccgcagaatcactctggatgacatgggtgtacttccgggcgtaggggtaaatcctaactcgcttgaaatttcattgaacggaaaggaattactcgaagctggaactgcaggtcttcctttattttattgtgaaggcgcggaaggtggatatgcagaagactgtataaacaatggtggtcaatgggtaaattctaaccaagactatagactggaatttgactcaactggtactaacgtcgaagctattatttttggtgaggcgtttgaagataaagaccttcttaccgtccgttggttcaataataacatcggtactactatggatattgacgatatcatggcagaaaccgaccaagtgtatatgaatgctgagcaattagtaactctaaaaaatcgcattgaatacacaaattatgatgaacctaatcagaaaaatatgcgtccggttgctgacgatattatgattaaagtcaataatattgcagcattttttgacgtaatttatccgattggcacgatttatgaaaacgctcacaaccacgcaaaccctgctgactatatgggatttggggtgtggaagctttattcacaaggccgtgttactgctggttggaataatgattcatctgatccttatttttcgcgtaacaacaataacttaaacgaaaatggtcagccatcattaacagcaggtggaacggttggagatttgacgtttacattaggaaaagaacacattcctgagttaatgtcaagagacaaagttctaatttcagaccctgaacatggcagcgtagttattggcggatgtcaattagacccagacgcacaaggtccaggttattctaaataccgtgaagacactgttgcggtaaacaacggtgtagttccaaatgacatcactaaaattcagccaacaatcaccgtttatcgttggattagggtaggttaaaatgacgattgaaactaaaactcgtgaaggggctaaagttaattcaagattaactgccttttcagaatatcgcgtagacccgcagaatattgcggtaggaaataaggctcctatagggagcctaacctttgaacaaatggatttaggtgtttggtatccaaacactgaagctgctattaatgatttaatgtcattacagtcagcagaaattggaactattatttgtaatgacaccggaatatctccacaaccagcacagcaaattacacgcgctactttttcaggcgtagtttcgttagaacctaaagaagacggttctgttggcgacccagtaataattcacattcttggattgccaattagaattgcgaatggtgatgactttgcagcagtagctaccaggtggtatgataaggtaaaagaattagaagcagttggaaaagtggttcaacaagttactcaatcacctgcaactcctcagtatgttgatattattcatctggattatcagaaccataattttgaaacatataaaaaatatggtttaactgttgagtttactgttacttcacctgctaaagcgggttatggacaatgggacgctattggtaacgaaactaaaaccttcggtgcaaacacatttacattccactattttagaaggatgggataatggcccagaataactataatcactacagtgatttggccaaatatacgatatttgacccagcaaatacacaatggccagttgctacaaaagacgtccaatcagcgctagcgttgattggaagctgggcaagaactgacattggattacctgcagcatctccaaccgtagcaggtataattcgtacagctacgcaggccgaagttgaagctggaactgtaggtaatgctgcggttaccccagctacattaaaatccacaattacccggcctgaagcaactaccgcaattcttggcttaacccgatacgcaactaatactgaagccgcagcattaaccgcaggaaatagaactattacagctgctgctcttggccatgtgtttaaaaccgtaaaagcccaagaaaacgtagatggaactgttaggttaacgactgccgctcaagctcaagcaggaactgatgaaaccaccgcagtaactcctaagcgtgttgtagaaatgattggaaagttcagcgttaatcctcctacttatacttctgcaacagaaagcaacttgggattagttcgtgtcgcaacccaagcccaggtagcagcaggtgctgttcacgatggatacgcagtaactccaaaaaccttcatggcatcaaaagcgtctgacagcgtatttggtatagtaaaatttgctaaagactcagatgtggcttcagctacttctaacaatttggctgttactccaaaaagtctacaagcgttaaaatcaaccaaggataaatatggattaacccgattatcaggttctccaacatcagatgcttcacttgctgcagctgcgactgatgctgtctttaaaactcgcaaaataaatggaaaaacccttgataacgatataacaattaccaataacgatatcaattgttatacacgccctgagtcggatggaagatatatgccagctggaacgcgtgtcggtaatattacttgggtagaaggtggaacttatattcctgctggaaactggtttgggtgtaattctccatatgaagccacttctagattggcgctgactctcacaataaaattccaacgtaataacgacggctatgacaatagaatttggagatttagaataactgtcaacggggaaaatagaggagaacatacactcaatatagagaataccaagggcggtagaaatggtcattcgtggagatttgaaggatatgctacaggctcatatattataaatgatgttcctcctaacgccagagttcaaattgagccatttgaaaatatccgtggcgataattattcagcgtcattaacgttttgcaccaaccgatagggaattatatgacaaaattagtagactcgcttccgtttgtagacggaattccagacgattttcaacagagaattaactggataaaaaatacagagcctcttaatggggcttcaacccgctatggaaatgatggagaactgaatagagcttctgtgcagattcagaaaaatgtggttcaggtacataacgatttgaacaacgttggaactgctgtagaaaatattcaagtagatgtagaccaaatcaaaaaatcgttagaaattacaggttcttctgacgccattgagcaggtttatatcaataaaaagaatattgaaaagcatgatggacaaattcttaaattagaagaagacaccgaaaaacttcgaactgaccttgattttctcgaagaggatgtaggtgtttatgattctagtaaagatgattattacagaacagttcgtgataatatagtttgggttaaacgtgaaattggtgcgtatcctgggcaagatgttaacggacagcctaagcaagacgctccgggttctggtatgaaataccgaatcatcaacaatgcgtcagctatagtaaaacatgacgagcgtattcaggcgctagaggatgcatacaatgattcagacgtaggttctctgactattgaagtaaacgacctgcgtaaagaagttggtcctaaatccggagctacgtcagcttcaatttatgcaaggcttgtgaataacgctgatgctatttccgcagctaataatgaaatctttgctattaaccaagccattgattttaccaatccagtaaaaattggagctcgtactactagattagaaaacgattatcgtatagttgacgcaacacttaactctgcacaaaccgggttagttcctcgtgtcaataatattgatgctcgtttggggtcttctgataagcctgatactattgaaggaaaaattagttctctttcaactgaccaagggtacatttctgatgttgtaggacgtgatacttcatcagggcttcagggtcaagtagcatggataaatcagcaagttggtattgttcctggcggacagccgattcctccggggtcaattttagcgagaatgaccaatgttgaagggatgcaaaactctcagcagtctgctatccaggacattcaagtagaacttggcaataacagcgaagggttaaaaggttctgtatttacgttacagactcaaatgaatggtgacttttcgtcagaaaatccagttcaacgggatggtgtatacgctactgtagtagaattgcaagataaattcgtgactgcagttactgacgtagaacagactggagcatacctccgtaaacggggcgaatggtttaagaagccttcatcaataggtgaattcagtaaagaagatttcactgttgatttaagttctgatgcattggtaaatcctaactcattggtcgctgcttcatttaatgctggcattcgtattgttgatgatattattgttgatgacgatggcgtattttgtgtagaaactgatacagttatcgaagcttctgattcagataaagctgtccaaattgttattctcgtcaataacattgaggtgtttacttatagcctaggtgttaaagcagtaaccggcgagcaactgttgaaaaccaagaaacttattaagttttcgtctggcgatgcaatcaaaattgtgtatagagctgcttcagaagaatcaaaagttcctgttagtattaaatcattggatattactattcatccagcagtataatgaaagggaccttcgggtccctttttcgtataaatagaatataaagaggagcttatatgtcatacaacacatacaacccaaaaacgcttaaagacgctatacttcgacgtctaggagcgccggtaattaatgtcgaagtaactgaagaccaaatttatgattgtattcaacgagcattagagttgtatggtgaataccactttaacggattgaataaaggctatcaagttttttatattggaaaagatgaagctgacaacgcaagatttttaaatggtgtgtttgatttgcgtggtcgtaatgtatttgctgtcactcaaatcgttagaacaaatgtaggttcattaacttcaatggatggtaatgctacctatccgtggtttactgactttttaatgggaatggccggaattaatggcggaatggggtcaagctgtaataagagttatggaccaaacgctttcggtgctgacctgggctattttactcaattaatgacttattggtcaatgatgcaggatttgcttgccccacttccagactattggtataactctgataatgaaatgcttaaagtaatgggcaacttcatgaagggggacatcattgtttgcgaatgctggactaaatcatttatgaataccgacatgatggtaggtaatactgcaggttacggcttcgctggtgaacaaacttccgaccattggggcttaggagataggtatcagaatcctaaccttcgcaataacggccaatatgcaggtgaaggtaatacaaatagagaaggtgcttataataatcgttgggtaaaagattatgctacagcactgactaaaaagttgtggggtgaaattctgtttaaacaccaagggctacaattagccggcggcgttacagttgatggccaaacacttaaagtagaggcccaagaagaaatcgagaggctccgagaggaacttgatttacttgacccgggttgtcctattctgttggggtaaaagatgactacatttaattctagtttattcgctcgccttgaggattaccgaggatacaataaaactaatgagacagaaattctcaatccttatgtgaatttttataatcacagaaatagccaaacgttagcagatgttttatcagctgaggctattcaaatgagaggaattgagttttatttccttcctcgcgaatataacaatccggatttgcttttcggagaagacccatcaagtaaattcaccaaggcttggaaatttgctgcttacttagactcttttgacggttattctggtgataacacgttcttcagtaaatttggtatgatggttaatgatgaagtcaatttgactattaatcctaatttgttcaagcatcaaaccaataattcagaaccaaaggcaggtgacctgatttatttcccgatggataattcgctgtttgaaattaattgggttcaaccatatgatccattttatcagttaggtcaaaatgttcaacgtaagattactgcgcagaaatacatttattccggtgagcagcttcaaccagaattgcagcgcaatgaaggaattatcattcctgagttctctgaacttgatttagaaccaatcaaaaacattgattctcttgctgatatttctgacgtacaatacgcagaaagcgatgcaattaataaagaagcctctgaatatgttcatccgtattatgttaataacggaagaggacttgagtctcctcctaaagcagattcgtttgatgacggattttttgaataaataaaataaagatgggacctttgggtcccttaggagaaatcatgtttggacattggtataattcgtccttacgccgatacattgtattgcttggagatttattttctcatgtacaaattgctcgttggcgtgaagacactggactaaaatatattaaagtacctatcacttatgcttcaaaggaaaagttcctttctcaactcggaaaatggactgctatccagtctaccgagaataaagcaaagatagaaactgttttgccaagaatgaatttgcacttggttgatatgcaatacaacgcgatgtataaaacatcacagttgaatagaaccaaatcatataaaaccccttcaaaaattacatctcagtataatcctactccgattaagatgatttttgaattgggaatttatacacgcaatcaagatgatatgtatcaaatcatcgagcaaatcgttccttattttcagccgcattttaacacgactataactgaactttacgacaaagacacaagctttaatcgtgatgttagaattgtattacagtcattttctccggatgaagctgttgatggagataatatcactcgtcgtagattagaatggtcgctgatgtttgaagtcaatggatggttatatcctcctgttgccgaggttgacggcgaaattagaaccatttatttagatttcttcgctaacagcaaagagctaactccagaaggaaactttgaatcagtagatagcgaagtcactccacgagatgttcaacacgaaaattgggatggttctagtaaacaaacttattctcacgatattcctattccggtaaatccggaggctcctggaccgagaggtgaaaaatgagtgaattacaattagatatggctaaattattagacatcgaaggaattcctggaatagaaggacaagaaattccagtttatgaaaaacttgaattagttgaagttaaatctaatccaaatgaccgtaaacctgacctcgaagatgactattcggtcgttcgcaagaacatgcacttccagcaacaaatgttaatggacgcagctaaaatatttttggaaactgctaagaatgctgactctcctagacatatggaagtatttgcaactcttatgggtcagatgactacaaccaacaaagaaattcttaagcttcataaagaaatgaaagacattacttctgagcaggttagtactggaaaaggagctaatcctcaacaaggaatgaatattcaaaacgcaacagtctttgtagggtctaccgctgatatgatggatgaattcggtgatgcctatgaagcacaagaagctcgagagaaaatagtaaatggaacagactcaaccgtttaacgttctgagtgatgcccatcctttaaatgacgggaaactgacggttattcgtcacccgtctgaaatggaaacgaaaatcgaaaacggagttcgtttctttaaatcgcaatgggatgataagtggtatcctgagaaatttgaagactatcttaagttgcatgggatagttaaaattcgtttgcaaggtgaagacccagctcatttccaaacgtttaaggacaaaaataataagcgcacccgctatatgggattgccaaaccttaaacgagcaaatattaaaatgcagttgactcgtgaaatagttgcagaatggaagaaatgccgagacgatattgtgtacttcgcagagacctactgtgcaattacgcatattgactacggtactatcaaagtccagctccgtgattaccagagggacatgctagaaatcatggcggctaaacgtatgacttgttgtaaccttagtcgtcagcttggtaaaactactgtagtagcaatctttcttgcgcacttcgtgtgttttaataaggataaagcagtaggtattcttgcgcataaaggctcaatgtctgcggaagttctcgaccgtactaagcaagcaattgaattacttcctgactttcttcagcctggtattgttgaatggaacaaaggctcaatcgaattagataatggctcatctattggggcatacgcttcgagtcctgatgctgttcgtggtaactcatttgcaatgatttacattgacgaatgtgcgtttattccaaacttcatagatgcatggcttgctatccaacctgttatttcatcaggtcgtcgttctaaaattattatcacgactacaccaagtggattaaaccacttctatgatatttggactgcagctgttgaaggtaaatccggctttacgccttatactgcaatttggaactcggttaaagaacgtctatataacgacgaagatatgtttgatgatgggtggcaatggtcacttcaaactatcagtgcttcttctcttgaacagtttaaacaagagcactgtgcggaatttcatggcacatccggtactctcatttccggtatgaaacttgccaatatggattggattgaagttactcctgactcgcacgggttttataaatttaaagaagcggaagcagaccacaaatatattgcaactcttgactctgctgaaggacgcggtcaggattaccatgcactaaatattattgacgtgactacatctgaatgggaacaagttggagtattacattctaatacaatttctcacttaatcctcccggatatagttattaaatatctaatggagtacaacgaagctccgatctatatagaacttaactctacaggtgtttctgtagcgaagagtctttatatggatttagaatatgagaatgtcatttgcgattcaatagttgatttaggaatgaaacagacgaaaaggtcaaaagccgtcggatgttctgcactaaaagaccttatcgaaaaagataaactcattattcaccatcgtgctactgttcaagaatttcgtactttctctgagaaaggagtatcctgggcggcagaagatggatatcatgacgatttaattatgtcactcgtaattttcgcatggttaacaacacagcaaaaatttgctgatttcgtggataaagatgaaatgcgtttagcatctgaagtttttaaacgcgaattagaagatatgaacgacgattacgctcctgtagtgttcgttgacgccgtgaatagcgcagaatatgcgcctcaagaacatggtctttcatttgtataaataataaaaagcaaacaacattgaggatatatcatgcctttagtctctcctggaattgagctcaaagaaacgagcgtacagagcacggtagtacttaacgctacaggtcgtgccgcaattgtcgggaagttccaatggggtcctgcatatcaagttactcaaatcactaacgaagttgaactggttgatatgtttggtggtcctaataaccaaactgctgattactttatgtcagcaatgaactttctgcaatatggtaatgatctacgtacagtccgtgtagttaatcgtgaagctgccaaaaacgcatctccactggttgataatattgagtgggaaatcacaactgctggtagtaactatgaagttggtgataaaattacggttaaatatgcagaccaaactgtagatgacactggttcagttactgaagtagatagtgacggaaaaattatgtcggtgttcattccgacggcaaaaattattgcatatgcaaaaagcattaatcagtatccggatttaggtgattcatggacaactactattacttcacagagttctggtgtttccgctgttattactctgggcaaaattatttctgattcaacagttctgttaactgaacctgaaactgcccatgaagaaatgacaaaaactgaattccagactgcgcttgcgcaatataaaatgcctggaattgtagctgcgtatcctggcgagctcggaaaccaactggaaattgaaattgtatcaaaagccgcttttgataaaggcgaacagctgacgatttatccgagtggtggacagcgtgcatcaaccgcaaaagccgtatttggatatggtcctcagaccgatacacagtacgctatcattgttcgtagagatggtgcggtagttgaatcaacggtgttatcaacaagccgtcaagataaagacatctacggaaacaacatctttatggacgattatttctccaaaggttcttcacgttatatatttgctaccgcgcaaggatggcctgaaggattttccggtgttattcgtctgggtggtggggtttcagctaatgaatcagttactgctggcgatttaattcaaggctgggatttatttggtgaccgtgaagcattgcgtgtaaaccttctgattgctggtgcttgtgccggtgaaaccgatgaaatcgcaagtacagtacaaaaacatgtttcgtctattgcagatgagcgtcaagactgtttagcactcatttcgcctccaaggtcaacgattgtaaatattcctctgactcgtgctgttgataatttaatcgactggcgccaaggcgatggaacttatgattctgctaacatgaacattaataccacgtacgcggcaattgatggtaactataaatatcagtatgataaatataacgacgtaaaccgttgggttccactggctgccgatattgcaggtctgtgtgctcgcactgatgatattgctcagccttggatgtcaccggctggttatcgtcgtggtcagattctgaactgcattaaacttgcgattgaacctcgtcaagcacatcgtgaccgtatgtatcaagcaggtattaacccggtaacgggtcaaggtacaggtgaaggtttcattctgtttggtgataagactgcaaccactgttccaactccgtttgaccgaattaacgttcgtcgcttgtttaacatgctgaagaacaacatcggtgattcttctaagtggcagctgtttgaattaaacgataactttacccgtagttctttccgtatggaaaccagccaatacctcgcaggtattaaagctctgggtggtgtatatgacttccgagttgtatgtgataccacgaacaacactccagcagttatcgaccgcaacgagtttgtagcgagcttctacatcaaaccagccagatcgataaattatattacgcttaactttgttgctacagcgactggagcggatttcgatgagttgatcggaccacaataaattgtacattttcgctaaatcctgatacaattgcacatatgaaatattatgtgcaattaaggaaaaccaagtgattatctctaaatttgttaaagtaaaaataattcctaaaaattttaaatacttttcggaacttggatacaagctgcctcctctgggttcgcctaggcatggattcaaatattattcaattgatatcagtgttgaccatcttgagcccgggtcaaacatatatgttgattgtgtttgtgataaatgcggtgaacaatattcacagcgttattgcagagacactgacgtgtgctatgattgccgtagcggaaaatttaagataggaaatactattggaacagctaataagggtaaagtgttgtcttcgatgacaggagaaaaccatcctcgctggaatccaaacaagacagaatataatgaatatgctagtaaagttagaagagaaacttctaagcataaaccaatttattctacatgggaaaattttgataagattggactatgtggaatacctggagcgtatcaattagaccataaggtttctgttgcatatgggttttacaacaaagttcctcctgaaattataggaagcattgataatttagagataatcacttgggaagaaaatcggtcaaaatcaaagaaatctagtattgatttatgggatctattgaaatgaaccccaggacattctggggtcatctaacctttagatgataaattatattaccgcacactttaatagcctctacgatgatgtagtcaatcaagaggctatataaatatctataggaaacaacgatggaattaacagacatcacccgtgcgtttgaatctggtgactttgcacgtcctaacctgtttgaggtagaaattccttatctgggtcgtaacttcagtttcaaatgtaaagcagcaccgatgccggcaggtatcgtagaaaaagttccagtcgggtacatgaaccgtaagattaacgttgccggtgaccgtacttatgacgactggactgttaccatctataacgatgataaacatgaagtacgtaaggcaattattgcttggcaggctcaggcccacgctcaaggcaatgatatctctggtatgactccagccgattacaaaaaggttgctacggtacgccagtttagtcgtgatggcaaaactatcacaaatgaacacaccattaccggtctgtggccaactaacgttggtgaagtacagatggactgggattcgaataatgaggtagaaacgttcgaaactacatttgctattgactggtgggaataatgttatggggcttcggccccgtatcgaagttctgtgagttatttgcttaaatatctgacaaaacttcgatataaatatacttatagataatttcggagactccaatggcctttcatattttggacttattcgctccgtgggaaaaacgcgacgaagctgaatataagcaacaaatcaacaatgacctagagtcaatcactgctccaaaatttgatgatggagctcgtgaagttgaatcaaacgaaaacgaaatccagtataattcattcaaccaaatgatgtttggttccaatgaacctggaatgaaaacaaccgctgatttaatcaacacttatcgtagtttaatgaataactacgaagttgacaatgctgttgaagaaatagtttctgacgcggttgtatacgaagacggtcatccagtagtttctcttgatttagattctaccgacttcagtcaagcaattaaagaccgcattcttgaagaatttaatacagttttaacatgccttaatttcgagcgaaaaggagccgaccatttccgccgttggtatgttgactcaagaatattcttccacaaaatcgtcaacaccaagaaaatgaaagacggaattcaggaactgagacgtcttgacccgcgcaacttacaattcatccgtgaaatcgttaccgctgatgacgctggcactaaaatcgttaaggggtacaaagagtatttcatttacgatactggcaaagaaagttattacgcagatggtagattatattccgccggaacgaaaattaaaattccacgcgatgctatagtatatgcacattctgggctagttgattgctcaggtcaaaacatcattggttatttacaccgagccgttaaacctgccaaccagttaaagctattagaagatgcgttggtaatttatcgtattactcgtgctcctgaccgtcgtgtgttttacatcgacactggtaatatgccttctcgtaaagcggcagcacacatgcagcatattatgaacacgatgaaaaaccgtgttgtatatgatgcgtcaactggtaagattaaaaaccaacagcataatatgtcaatgacagaagactattggttgcagcgtagagatggtaaagcagttactgaagtagatactcttcctggtatgtcaggtatgagtgatatggatgacgtccgttactttagaacagcgttatacatggcattgcgagttcctctttcgcgcatgccagatgcaaataatcaaggtggtgtgcagtttgatgctggcacagcaattactcgcgatgagcttgattttgctaaatttattcgtagattacagcataaattcgaagagattatgcttgatccacttcgcactaatctaattcttaaaaaagttttgtctaaagatgagtgggaagacgaaataaataatattaagattgtgttccataaagattcatatttcaccgagttgaaagatgctgaagttatggagcgtagaatcaatatgctcacaatggctgaaccgtttatcggcaagtatatttctcataagacagcaatgaaagatttccttcagatgtctgacgaagaaattgaacaagaagccaagcaaattgaattagagtctaaagaggctcgcttccaagaccaagaaaatgaagaggatttctaatggaaaattatatttccgcaattgaatccagagacctcgtagcagccaaaaaagcttttggtgcaattatggctgaacggacatctggtttaattgaagagcgcaaaaaatttatcgcagcgtctgtcatgattgagggtgaagagcccgttgacgatgaagatgaagacgacgaagatgaagataagtctgagaaagacgacgacgaagaggacgagtaatgcttatactgcctgaaaatcatgaattagttatcgacgctgtcgaagcttttcttcctgaagcacaggcacgttttgataagttgtccgcagcgctttctaaagatgatataaataaaattgtagagaacatggttacttctgagcctgatttagcaattgctttaggttcaattaacgaatctctacaattaaatgaatttatcgttaagcacgttgattctaaaggtactattacacgtactaaggatcgtaaaacacgtgagcgtaacgcgttccaaacaaccggactttctaaagctaaacgccgccaaatcgcgcgtaaagcagtaaaatcaaaacgtgctaatccatctgctcaaattcgtggattacgtaaacgtaagaaagcacttaaacgccgtcaggctctggggctaagttaatggaaaacctcaatgaacaacttttaattgagcattggggtcaaccgggcgatgtaattgatggtaaacccatgctggaatctattatcgttgaaggcgaaaatgaatctggcttaaaacctggtctgtatatcgaaggtgtttttatgcaggcagaagtagtaaaccgtaataaacgtctttatccaaaacgcattcttgagactgcggtaagccgttatattaaggaacaggttgctactcgtcaggctctaggagaattaaaccatccacctcgtgcaaatgttgacccgatgcaagccgcaatcattatcgaagatatgtggtggaaaggcaacgatgtttatgggcgagcaagaatcatcgaaggagaccacggtccaggtgataaattagccgctaacattcgtgctggttggattcctggtgtatcaagccgcgggctcggttctttgaaagactcaggaaaaggatataacatcgtacaagaaggctttcgcctgactgttggtgtagacgcagtttggggtcctagtgctccggatgcatgggtacaaccgaaacaaatttcggaaaatacctcggcacaagttgccaatagtgctgatgatgcttttatggctctcgcagagaagttaaaagcgttataaataattatgtaacttaacacaggacatcaaaaatgcttaaagaacttttaatgaccgaagctaaaactatcgatgcttccgtcgctcttgacagtattttcgaatcagttcagctttctccggaagctaaagctaacttcagcactgtattcgaagcaacagtcaaaaaacacgccgtagctctggcagaatctcatattgaaaagattgctgagaaagcagaagaaaaagttgaagaagaaaaagaaaaagctaaagaagaagctcgcgaagagctgaaagaagctgcttctaaatactttgaccatatcgctgcagaatggatggcagaaaaccagctggcggttgaccgcggtattaaagctgacctgtttgaatccatgtttgtcggtatgaaagagctgtttgttgagcacaacgttgtaattcctgaagaatcagtagacgtagtagctgagatggaagaagaacttgctgagcaaaaagcagaaactgctcgtttatttgaagaagtttctaagcgcgatgagtatatcaattatgcccaacgtgagtatgctatccaagaagcaacccgtgaactgactgatacccaaaaagagaaagtagtttctctgacagagggtatggattattctgactcgttttcaactaagctgaaagctattgttgaaatggtgcagggttctgtagagcagtctgtaacggaatctgccgatataaatactatcgacaaagaagcagacggtttaaacttcacaactgaagcagtcgaagaaactcctgcgactaaaaccccatccgttatggatgcttatgtagcccaagcggctcgtctttcttaatttaaaaggttatacaacacatgaaaaagaataaacttatcgaaaaatggcagccgctgcttgagaacgaagctctgccggaaattgttggcgctagcaaaaaagctctgatcgctaagatttttgaaaaccaggaagctgatattaatcaggctccggaataccgcgatgaaaaaatcgctgaagcatttggttctttcctgtctgaagcagaaattggcggtgaccacggttatgatgcacagaacatcgcagctggtcagacctctggtgctgtaacccagattggcccggcagttatgggtatggttcgtcgtgctatccctaacctgattgctttcgatatctgtggtgtacagccgatgtctaacccaaccggtcaggtattcgctctccgcgctgtttacggcaaagacccgctggctgctggtgctaaagaagctttccatccgatgtacgctccggatgcaatgttctctggtcagggtgcaaccgagaagttcgaagcagttaaagccggtgatgctctgactgttggtgatatcgttgttcacgatttcgcacagaccggtcgtgctcatctgcaggttgttgaagatttcactgtagacgctggcgctactgatgctgctaaactggacgctgcagtaactgccgctctggaagctggtaaagttgtagaaatcgccgaaggtatggctacttctgttgctgaactgcaagaagcctttaatggttctaaagataacccgtggaatgaaatgggcttccgtatcgataaacaaactatcgaagcgaaatctcgtcagctgaaagcacagtattccatcgaactggctcaggacctccgtgctgttcatggtatggacgctgatgctgaattgagttcaatcctggctaccgaaattatgctggaaatcaaccgtgaagttgttgactggattaactactccgctcaggttggtaaatctggtatgacccagaccgttggttctaaagctggtgtattcgacttccaagacccgattgatatccgcggtgctcgttgggcaggtgaaagctttaaagctctgctgttccagattgacaaagaatccgctgaaatcgctcgtcagaccggtcgcggtgaaggtaacttcattatcgcttcccgtaacgtagttaacgtactggcagctgttgataccaacgtatctccggcagctcagggtctgggtcgtggttataataccgacaccactaaagcagtatttgctggtgttctgggtggtcgctaccgtgtatacatcgaccagtatgctcgtcaggattacttcaccatcggttataaaggtgctaacgaaatggatgctggtatctactatgctccgtatgttgcactgaccccgctgcgtggttccgatccgaagaacttccaaccggtcatggggttcaaaacccgttacggtatcggtattaacccgttcgccgattctgctgctcaacagccgaaaggtcgtattacctctggtatgccttctatcgtcaactctgttggtaagaatgcttacttccgtcgtgtatgggttaaaggtatctaataccaataagggagccttcgggctccctttagttgttttaatggatataaataaacttataaatccacagaggaaagcgcaatggctaaaatcaacgaacttctgcgcgagtcaactacaacgagtagcaacttaattggtcgccctaatctcgttgcattaacgcgcgcaaccactaaattaatctataccgatcttgttgctacacagcgtactaaacagcctgtagcagcactgtatggtattaaatatcttaaccctaatggtgacctgacgtttaatacgggtgcaacttatgcaggtcaaatcggggcgccagaacgtgagtcaattgaagaactcactatggcaaataaagactcattcaataaagacgatatgttcaaataccagaatgtggtctttaaagtacttaaagatagcccgtttaccgatacagcagaaaccgatgaatttggaattgtatctgaagcagtagcagctaataatattcgtatgatgtcagatgctgcagtcactgaaaaattcgaaggacctgattcagacccaatcaccgaagccagttttaaaattgataaatggcagacccaggttaaatcgcgtaagcttaaaacggatttaactgtagaattagctcaagacttagaagctaacgggttcgatgctccagagcttattgatgatttacttgctactgaaatggcagaagacattaataaagacatcctgcaatcattgattacggtttcttctcggtttaaagtagctggtgtatccgataaaggtgtattagatttaactaagcaggattctgccccggaacaaggtcgtactctgtatcgtttcatttgtgaaatgaattcagcagttcaacgtaatacttcttattctggcacctacgcagtagcatctactcgttgtgcagcggtactggcagcttctggttggttaatgcagaagaacgatgggactattccagaaaacgcatatggcattctgaataacggccttccactgtattgtgatactaacagtccgattgattacgttattgttggtgttaaggcagaatttggtgggaaggaaactgtaggttcattattctatgcgccgtataccgaaggtcttgatttagacgaccctgagcatgttggtgcatttaaagttattgttgacccagctagcttgcagccttctgtagctttactggttcgttacgcgctgtcggttaacccatatactgtaggattggacgaggacgaagctcgtgtgattaatgctgcggatatggataagatggcaggaagaagtcagatgtctgttatgctcggtgttaagttacctaagctgattgcggactaatttatgggagccttcgggctccctttttgctataaactaaatatgtcaaacttcggagagtattcctcctcgagggatttaaacactttcttatcgtatagattaacacattctatcccgtgcctgcgagctatatcaacagctactctcgtccctccagatacactcccgcatcttttctcaggcgcccaatataataccttatctacaggctcagtgcattctaggcccaatacctgcatagaattccgtgcgaataaagtctgcactatcttcgagcattcatcccagtacgacgtaacttctctcgccttaatgatgcttttgattttggcttcgtttgataattcagaccatacaacaacacctgtaccaggaacatggccacaaaagccagaataaggaataatcctacaagaatttgacctatcgtatttcgccaaccacgcttcatctgaacctggagctccacctgaatatgaaaaatgcccctcttccgagaggcgttgacctattgtagtcattagactcagaactctgcgtggcgcttctcgtgaaccaataagcgccaatctcattattctacaacctcatgccatttactacgaatagtattttgaatcaaagtagtgatttctttcttaaccgcagaaggattatcagcgaataacatatcatgaccttcacgtgctgcttcgttaatgatatctttcatagtcagacccataacacgaccgaaatctttagcagttacagtaccaatatgagacagaacgttacttacgcggttccaggttacatattcggaaaagatttccagaacacgcttatcattctcggtgagttcaaccttcgctttaataggcttatcggatttagccttctcgctgaacttagagttcttacacttaatagcaacacgagtaccattattgaagaacttaggatgaaccggcttaagaacatagccttcagctacgccagtttcagaagaagcctgtgggccgaacacatgtttatttgcatgttcaaggtcagtcgtgtcaacaagctcattatagtaattgacaatagatttaaagtcattcacatactgagatagctcggcaaatgaacctcgaccaagaagtggagctaatttaagaccaagaccagtagcaaacgattctactacataatcgtcccaataaactttttcgttaccggaatccgacaggatatcaaatacgtagaaatctttctcaccataatctacgcctttctgaataccaccgccagcaaattcgccgaagatttgaacagatactaaatccatggcgttcagcatgttctgcatcttaacgaaagaatccttatacttcttcatgataatatcatgaccgaagaagctttcaccttctaaaataggaccagtacgcttagcaggaacgatttcggtaggagtaataatcacactaaagttagtgccatgaatcttctcacgagccacccactcaacagtatgcatatcaaaaccagcaccgcgaatcttctcgatgaacttaccgttgtaatgattctcgagactagaatattttgcaaacattataatttccttagaatgtgattttcataaagtcagtatcaccattacgctgggcactggtataatttgtaacaaatccttcatcatgcaaataattaagaacacttgtaatatgtttcttaactaaactgctaggatacataattaactcacgttgacccgctaaagcggttttctcaatctgggttaatacttcttcttttgctgcactcaattcttctgtagcaatattgatggctgtattagccattctatcggcaaggttcataatttttctctcaataaataatataaaaccaggagtctatcttggtcaaaatggtatcagaggatttcccctgagcccattataccacatcgatttttaaagcaattaatagccgctcggcacgaagcgatacatgatatatccgcttttagttagcatgatttcaaattgacttttgcttccaacctcaagtactaatggaatatctttatccatcagcatccaatcaatttttccataccgttcattaatcaaatccgttattttacgtgcaccacttttatagtagtaagaactctgaacagccatcattttactaacaaatttagatgcaaacaaccagacatttaccccattagcagctggcgtaaatttcttagaaagcatttcttcaaatcgttctactacaattgggtctactttaggcattttcataataacctcatgtgtttaacaagtttcttatgacgagattttataccaacgtttgttaagcgtttccgataaacgactttttctttttgcttaaactgttcgtgtgctttctcaactgagacccacaatttagcagcttccgctggagtgatatctaatgctctcgcaatttcttgaaaatctttaccactttcatgcattaagtgagcttgtagtgctttcataataacctcatctatgtgatgaagacatattaaaccagtctgtgaatagcaaaaagggagcccgaaggctcccaaatattacggatagataatacctgcttccagtgcagtacaatgaacaatgtatccatttctagattcttgtacatcgacttctggataatcatctagcattttagccagagtataccgatgcaggtaataatcgctgtcagggtcgtcgagtttccaatctttgccctcaacagtcattcgctggatttcatccattacccaccaaccacaccagatataggctgttccacggaatggtaaaggatgaatatatggaagttctccgtctggctcaggggctactcttttggtaatatttacattaccagttgtagttactgtgactgagttataatcttctgcggaaacctcaacagaaaccccaatcacttgagaccctatatcagacgtgtcaatcactaaagtactagttgaaccttcaacaggggaaccgtctttggtccatgaataagttccggatgcaccttctggagaaccgataacgtcggctttaaaagatgcatcagacccctgctcgactgtaatagattcaggagtcaaagtaactgaaacgccgctcatggtctttttagtaaaagcaacagcaatacctttagttgcagttccattattatagtctggagcagaaaccgtcacttcacaattcaatgtgtagctggtttccgttgattcagttaaggtaattgttttacccgtttggccagaaataacagaagagccgcgtttccaaacataagcaatgcttgctcctgctggcgccccagcaacgttagctgtaactacttgggattggccaatttctttagaaacagaagttgggctcaaagttaaagtaatcgcaggcatggttttgttcttaactgtcagagtagtttctgcttcagccgtttcaggatcgccttcagccggagtaacagtagcaactactttaatagtcttactgcctgcaggacccgcagcaacataattcatggctgcggtaacagaagattgttttacgccgtttacggtccacacaaatgattctgtgcctgcagccgcggctccagaagttgttgcagtaaaattggttgttgctccaatgactgccgaagcagccaaaggagcaatagatacgctataagccataggtgttccttattttaaagttacaaatgaagaattacgtgtttcacgaatcataacagacccgtttcttttgatgtaataaattaaactaaacagtgtctggtgtgctgatgggtgttcaaacgacgttggccgagatttccaatctgggttatctttaatccattggtaaatccaccatggaagagtaatatatcctgggttcttacctagcaattgcatatttggactaaagttttcaggaagctcaatgatttcgtctgttttaataattttaactactttgtccattgctttgaaaaattcttcggggtccgtgatactaaccggaatattggtaacttgtccttcatcatctatatgaataacgctgtctccaataggagcttcagcataaaatcctttatcattgatagaaggtgtttttacttcaaaccctgggtcatttaccttaggggtttctttatagaaacctgggtcaatatcatgaattttaataccaacattaactggagcgtcaaacagtagttttgcctcatcagacgcttcatctttaaatactgctttaccctcaatttcatcatctgcttgaattaaatcagcaattgacagcccatcattatcttctggcataggctcatcggccaatttagccagttctttttctaagtcagcaaccatgttgtcaaatgaacgagttttcttcagtttaataccgaaagtctgggcatattcgtcgagcttgtctttagcttcttttttatcgagtgcctgaatttctttaatatagtctttatctagcattgggtgtgcctcatgtaatgtataaatatgattgtatttataaactgaggatagtacagtgcacgacatccaagtcaaatttaaagattttagtcatgttcatattgagtgtgatgactcgattttctatgaactcagagactattttagcttcgaagccgatggatacagattcaacccgaaatatcgctatggacattgggatggacgaattcgtctgctagattataatcgtctcttaccgtttggtcttgttggccaaattagaaaattcgctgaccaattcggatataaggtttatttcgatccagctatattcgagcaagaaactctttcgcgggaggattttgataattggttgtcaactaaagaaatttattcaggattaactaagattgaacctcactggtatcagaaagatgctgtatatgaaggtctagttaatcgacgtagaattcttaatcttccaacatctgctggtaagtctcttatccaggcattacttgctcgatattatgtagaaaattacgaaggcaaggttcttatcatcgttcctactactgcgttagttgaccagatgattgatgatttttgtgactatcgtttatttcctcgtaatgctatgctgggtattcgaggtggtactgctcgtgattcgaatgcattagtttatgtatctacctggcagaccgctgttaagcagcctaaagaatggttttctcaattcggcatgatgatgaatgatgaatgccatcttgcaacgggtaagtcaatttcaacaatcattgcaggtcttacaaattgcatgtttaagtacggactgtctggttctcttaaagacggcaaagctaatatcatgcaatatgttggtatgtttggtgaaatcttccgtccagtatcaacttctaagttaatggaagacggacaagtaactgagcttaaaattaatacaatcttcttaagatatccagatgcagccgcaaatgctttaaaaggaaaaacgtatcaagaagaaattaaattcatcaccaatgttaagaaaagaaatcgttggattgctaatcttgctactaaacttgcagcgcgtgacgaaaatgcctttgtgatgtttaaacatgtagctcatggtaaagagctattcgagatgattaaagctgctggtcatgagcatgtctattatgtgtcaggcgaagttaataccgaaacacgtaatgctttaaaggctatggcagaaaacggaaagggaattattatcgtcgcaagttacggtgtattttctaccggtatttctgttaaaaacctgcatcatgtaattttagcccatccagttaaatcgaagattatcgtactccaaactattggtcgtgttcttcgtaagcataaagataaatctttggctacagtgtgggatatcattgatgacctgggtgtaaagccgaagtcagccaatgctaaaaagaaatacacacatttaaactattgcttaaaacatgcattagagcgtattcaacgatatgctgatgaaaaatttaactacgtaatgaaaacggtaaatctatgattaaatttgaagatatttacgaagccacaattcgtgaggctactatcgataacttcatgagtaaaattaatgcttgccagaccttagatggtctggaagaactcgagaagtattacgataagcgctctaaagaaactactcttgctgattctgatgatatcattgtgcgtgatgctttggcggggcgtagacaagctcttgaagctgattctgaagatgaagacgacgaagacttctgatataaaaaagccccaaccgaaaggaaggggcaaagccaattggctacatcaacactagactaaattaaaagctgcgtttcttgcaattgctcttctgtgtcttcagtgacaggcaattcaatcgcataattatagcaagctccgggatgaaccgggcctttgtctgtttggacaaccaatgcttcatcgattggtcctttacagacgacacataccgtattcgacatgattgtctccttagtttacaagtttatttattacgcgccagcttcaaactgacgaaggtcaataatatgcttaatgctaaaacctcgtgacttaatagcatccatagcatcactacagaactccaaaagaattccccaatattgcaatttagtatctacacccaagatttctttatcagcgcttaaaacagttttcatttctgatttttcatacacatccatgcatacttcaccaccaacctcgccacggccagtgtaataatccaatcgtgctttaagattttgctttttgagggcatctaatcttaacatctcttttcgacaagtcgagtgcttacgcacccatttaccatacagaacagggttattagccgcttcatactgtagtttagtctggtcgataatcaaatcattatccaattcatcctgtaattcttctaatctcattctatctccactctactgtttctttggaaggactagtaccattatactctactgctagagttagcattactacgcatctgtatgcgtatacgttctagcgtatcagggtcgtctactatagaaaactgcacggtgacaattatagcattatcgtcatataacggaagcacatcaactgatagacggttaatcctaggctcataattacgcacggcagagactatattacgctttatcgtatcaccagttaatggagtcatgttttcaaataattcgtttgtgatatcacaaccaaacgctgggtcaaatggccgagacccctttcttgtggttattattccaagaaggctatttttaaccgatcgtgctcctaccgtttttgacacatcggtatcccaagcaagtcgcatctctgggtcaaggtcagaatataatttatcaatattgctcatgacataatcttaaagaattctttaagccccttaattacatgaatgtgagaaattccgcattcacaagtaatgggaactgccaattgaacctgtggcttcaatagcatatttttgatgttaactacatcttcggttgtaatagcagaatataaatcatcgatttctgcatcatttaaatcattaaagtaaatctgctcatttccaaccacgatataatctatgcattttgatatcatcattggaatgtctgaatcgtcaaaaagattcggatacttgaactttattttaaatccctttaagtcataccagaggtcttctggaggatcgatttgcgcatgtgtataatttaatggcacaggaattttacgcccacaggtgcaattccaggtcacctcatgattaacctcgcctatactatgcgcccaaagtataactataagtaattccgattcctgtttgtttaattcagtggcattagtgcattctctgagcaatgctttaacgcattcatcgattgtaccgtttttcttcgctgcaattaaattagcgtattcttctagtgtaaaagctcggcactggatattcttgccatttattcttgtttcaaatttgtatgtgatgttcatatccactcctcttattcaaatatttataaatagtataaagaggattaccttatggccaatatagttagatgcgaattaccagatggtgtccaacgttttaagccatttacagtagaagattatagagaccttttattggttagaaacgacatgaacaccaagtctgaagaagaacaaaaacagcttatagcagaattaatggatgattattttcatgaccatcctgctgagtatcgtccttatatatttcttaaggtatttctttcaagtattggtaaaaccaaaatacctgtcagaatgaagtgcccaaaatgcggaaaatataagcagtatctttttaatcttaatcagcctccgttgacaaatccgaaagtagaggttgctggattaacgctcaagttcaaaaaacccatagaaataattgacgatacaggtaaaatgattttagataacattatatctgtgaaggattcatctggggaatacgcgtggaatgaattgagcgatagcaataaattgaccgttatcgatgctatagatgttgaaaccttggaaaagattttatcgcagatgaagccgtttaattttgagctaaaaacgtcatgctgtgataccacgacagtattaaaatatgataacattgttgatatctttaagctattgctacatcctgacgagattttcacattttaccaaattaaccatagattggtttctcaaggtaaatatgacttgaattctataatgaagatgctgcctattgagcgtggcataaccttatcgcttattgaaaaggaccttaaatcatgacaacacaaagattaggatatcctaatataagcataaaattatattctggatatgatgcgtggctagctaatagattcgttgaattagcagctacatttattacattaacaatgagagattcattacgcgggactaacgaaggcctacttcagttttatgactcgaaaaatatgcacacgcgtatgaacggtgatgaactagttcaaatatctgttgcaaacagtaacacatcgagaacacaaacccgaatttatgggattaaacactttacagttggtgttgatgataaaggcgatagcattatcacccttcagcttggaacactgcatgacataatgaatctcaagttcagcagagcgttttttagttctgcgtatgaaactataaaagaaatgataggtgcaatgtatgttgaccaaccattgattgctcctcctatcaacggaattaacgcttacgtcccacgggttccctggactagtaccctcaaagattacttacgatatgttagaaatgtaggcatttctacagacaacgatcaatttatttttgcgtgggaagatatcaccggaattaacatgatggattatgaatcaatgatatcccaggatccaaatgtattcatgttcggggctcctcaaacaataggtcagtttgctgcaggattaaaatatccattagcatgggattttgaatggcttgttaaatcaaacagatataatagaaatcccatgaaaaacgcaacattttatgcacactcgtttgtggacaaagatgttacccgaattattaatggagaaggccaaaacagcgtattcattaataggtcaggaggatattctgacatgatttttaggaatggctatgaagaagcactacgcatttctacgatggctcaatatgacgggtatgctcaaactaagtgttacggtaattttgaactaactccaggaatgaaaatcaactttgttgatttaaaggaccagttcagaactgacttttatatagatgaagttatccatgaaatatcaaataacacatctataactaacttatatatgttcacaaatggctctgcccttgaacctgtagatttgattaaggtgaaaaatgaacttaaacgtgattcttcctattaagaaaatagtaataaatgaaaagacgatatcaattccaaaactggggttaaagcaccataatctgatgaaagatgttaagggtccagatgaaaacatgaatcttcttttggattcaatttgtccaggattaacagcagccgaatctgatattgttgtattacatttattagcatttaacaacagaataaaagaaactgttgttaaagatgattttacctacgatttgaataaggtttacatttgccagcgattaactcaaaggttagatggtaaagaattcaaattcagagctcctcctcgttattccaaactaggttcagtagattcaattttgagcgaatttcttgaatcagtagatggaaaaccaatggatataaactttatgaagcttccagcttttgtgacaaagtgggctgatgacttagtaaacactatagccattgatggacctgaaggaccaatcaaaggcatgcttaacgtaatggaaatatttgaatgactaagaaatcagaaatgaattcaatgcgtagaagagttattgctgactcggctccacagaaaaaggctgagtctcaagctgatgctcaaattaatacgctagaagatattggtcgtcgtttagacgaccaacaagcatctactgatttaatttcggatgtaatagaaactaaatcaaacgaaattatcaaatcagtagaagatgtttcagctggtgtcgaattgaccgcagaagcttctgagcgcacaactgatgcagtatcaaaacttaatgatactgcatcattaattaatgataagctcacgaaacttgccgacttgttatctaaaaagcatgatgttcagcaagatgtccaaaagactggtactggaacatcattagaaacgataacagaacaagtcccggatgctcctactcagcagccgctagaggaattactcgaaagacttattcctcctcaggatggcagacgtcctgacgcggatttctttcctagcacagaagagcaagaggaaaaagctgagcctaaaaaggaaactgaggacaagaataaaaagtttcttgacctaaaatttggagaattaattaaaagcgttaaatctggttttggaaaaactatttcattaacagataaaattagcagtatgctgtttagttatactgttagcgctttggcccaaatggcgaaaactgccgccatggttttgggtgtgataatgcttatagatttaattaaagttcattttaattattggactaaattattcgaaaagaactttgttgaatttaacaagcaggctaaagaatggggtccgctattaactgcaataagcgagatgtcgaatgaaatagtaaaatcattcgtcaaaggagattggggcggattagcaaaagccattggctcgggtttggttgatgtaattgataagctcggagaaaccattatgctcggaatgagtaagcttcttgctggaatgttacgcgcattaggatttaacgattcggcagataacattgaaggcgctgctttagacagatttcaaactgttactggagcagaactcgatgaagaagatgctaaaatgagagcaaaatatgttgaccgtcaagaaagagaatatgacgaacaacctgaatggaaaagaaagctttctgctaagttccaaaaattcaccgggcagattgatgacgatgaatataacaaactgctgagcggagagaaaaagcagtcagcgtatgcagacttgccagaagacgaacgcctcaaaatcatcacagctcgtaataatgctgaagcagaaatgaagagaacaaaagcgtatgtagaaaaaactgacgcatctgattccactcgattagactctgctaaggatgcagtacaaagcacaaccaccagatataaagaattggagaaattatctccagaagttgcaaaagatttaaaggttgaattagaccaattgcaaaagcttcttgattctaaaatatcagaacctgctccaactgccgaagctatacctgcagcagaacaacctgaggttaaacagtctgcttctattaaagccgccgcggatagtcgtgaagctgctcgtacacgtgaatctaatacacagtcacaacctatccaggttaatactgctgtaaataagaatagcacacatgtttatagaatgcctccacagacttcgacagctgctcctggaatgcaaggcgctatgaaaacctcttaaggaaaaataatgatttttgaagaactggccgatggccttgaaaacatcaaaaaatcaggaactcgaatttcccaaggtaaatctaaactgacgaatgcgccaaccactaaggtggcgcagttcccagctgaacgttcagctgggaatgattccgcccaagatatgagagtacatgacttatatcgcaatgggttattattcacagcatatgattttaaaggaagaactactcctgatttgcgttcatttagacgagatgtaatgttatcgtctgtattcgattcaccaatgtcagcattggctaattcatcaagttctaccactagtactgcaccagtagctaatattctattaccgcggtctaagtcagacgttgattcagttagccataaatttaatgatgttggtgattctcttgttactcgcggcggcggtactgctaccggtgtattaagcaacgtggcttctactgcggtgtttgggtcgatagagtctttaacgcagggattaatggctgataacggtgaacagatttataacacagctcgtagtatgtatgccggacccgacaacagaacgaaagtgtttacttgggatttaactcctaggtctgcagatgaccttatacaaattattcgcatctatgaaatttttaactactattcttacggtgtgacgggaaattcatcatacgcaaaagaagttaaagctgctattgatgaatggtataaaggaactcttaaatccgcagctccagatggggctaaagtagaaaacacggtgtttgagcaaataacatcgtttttaagcaatgttattgtagtttctaacccaacgatttggactgttcgtaattttggatattctacatcaatggatggtagagaggatatatttggtccatgccaaattcagagtatccgctttgataaaacgccgaacggacatttcaatggtttagcaattgctcctaaccttccaagcacatttacgcttgaaattactatgcgtgaaatacttactcttaatagagggaacgtttatatcggaggtattgaataatgtttactctcgaagaatttaagagtcaagcggctgacatcgatttccagagaactaacatgttctctgttgtattcgctactgtaccctctagtaaaacccaggctcttctaaacgactttggtggagagctgtataataatatgggtttagatggaaattggcttggattgaccccaggtgaattcaatcagggtataacaactatagtgacacaaggaactcggcaagttgttcgtaaatcaggtgtgaatacatttatgattggcgcaatgactcaacgtgtggtgcagtcattattaggagaatttacggtaggtacttatctgctcgatttctttaatatggcatttccaacagcaggattgatggtttattctgctaaaataccagagaacagattatcatatgaaatggataagttccataacgctcctaatataaaaatcacaggaagagatatggaaccgctggttctttcatttaggatggacccagaagcaagcaactaccgggcaatgcaagattgggtaaatgctgttgaagacccagtgactggtctgcgaggattgccacaagacgtagaatgtgatatccaagttaaccttcatgctagaaatggattaccacatactgtatgcttgttctcaggggctatgcctgtagcgtgtggagctcccgaatttacatatgatggagaaaacacgatagcagtgtttgatgtcacgtttgcttaccgtagcatgcaaacgggttcggttggaaaacaagctgctatggattggttggaagataaggctattcagaaaattgagacgattaatccaaatcagggcttgagtgcgtctgcttcaagattgtctcgtttaggcggggctggtggtggaatttctaatatcactactacaacaagtagaataatttaggggccgtaaggcccctttgttttatgcaatgcagccaataaaccctggctcagtgcgaagaagtttcatttcgtttgtggtccaaactactttaacaggaatgataccttctgcctttccattaagaacggcttctacaaacgatggctctgttggcttacggaagatatcttgaataagaaccgtcggagtaccttcgttaaacccttcaagcatgataagaacttcttcattgaacttctctgcatctttaacatcagcagaccattcaataccgttaaagcgaaatacgtgtttcatatcaatttcctcattggtttgtgtaagtctatagtatcacgtccttgtgataagtaaacaactttatgcaagtttttctgggataccatccaggttgatagcaccagccagtagctccatggtacgcgtgtagctaaccttatctgtagaacggtctggcgaaaagtaaatctcatttaaaaagcctttgaacttgctttcttcaagaggttccactttgccctgttccatcaagatgtcaccatcatagagatgaaccgattcatcgatttgctctggcggaactaccgtcatttctaccatgaatgtcttgttattcgctacaccaactccatttctaaaaggagttccccatactttgttgactttcattgccaacccgcgaggaagaataacttcagcctcatcgctaaagcttgacaagacacccgggataactaccttaactttatcggccccatggataacgaatccaaacttaaactcatcgccataggcaacttcctcgcctctatcaactctttccaagttgtctgttccaataacagaagatactgcatctatagttgtttctttgttttctaaatcagaactaggtgcgtctggcattaatgaatcaccagcatttgaataagcaccaaagataattggacttaacgaagtagaaacatagttctggaaataaaacattttagactcaatgttatctttaaagtcttcatattttcctcgctgaccacgatacaaaagagtgcctggttcaagacgcaaacctttttcaaaggcagaatcgagcggacgaattttcttgtcaataattggatcgcctaagctttccatgccaataagatagttattaacaaatgaataaccagaaccacagtaatggtgtattgcatctctttcttcttcgcttaaacgagaatgcatttcacggttatattcaattgctttggatatagaatcgccaacaattgacacataagcggatatcatataattgacaagattttggtattgacgtaaagctccgaaatcgtcagctggaggcatatcaaatccacgagtagctacttcaacgattttacgcattgtttccatagatgcaggatttttagcttgagcaataacgtcagcaacgtctgaaattcgttgttcagcgattttcattttgtctgaccccgaaggaatgaaaaccttccagtcgtcatgcattctcgacatttggcctacaaataatctctcaactgcatcgccaaaattacttccatatccgccacgaacacgatagtgcttgatatcatcaacataaaaaggaattgatttttctaatccggctttgatatctttttggaggtctaccgtatcgccttctgcgctaagaaccggtgtgttagtagttaattcgtaccaacgttcgcgtttattttctggccaatcttcatcaacatatgaaacaaatttgccgtactgtgctcggattaaatcttttcgagacactttcattttactcattacagcgagttcagatttcttgtcttctttttcgccaatggaattagccaatgcttcggctttggtaacgttttcgccggtttctttagacacataaacttcgcctactttggaatctactttggtgtaaagttcttctgaaatttcaggaattccttcaatctcttcaagtttcttacctttacgaaccataatagaataagcatacttacctttgtagtaagccatatctttcattagattgaaacgaccgccggtgcgagtagtaatcaaccgagcaagaatgcgttgaatggctttatcctgtccttgcattttcttcggattaaagcggaacattaccgcatcagctttaatttgcttaactactttgttgacggtctcaaaaatggtattgatagcaccaatcgggtcttggcctaaaccacctttaagcgccccgatgttacctttttccgacacagagaaaacatagacctggatgaatttatcacccatcttgatgttcttaactgcatcaccttgacctgacccttgtactaaccgaatcattaaattgttattacccggcaccttaatcaaaaagacctgtggtaccttaagttttggcttaacgttctcgacgggatagattttactattctcttcatcgaaaacttcatttaaaagttccatgacatatcctcgtttgtttattctatttatacgaaaaaaggcccgaaggccttaattaattattgttactgtacgccaaacttgtagtccatttacagactcatactcttcaatgttttctttgaagtttcttaatgtgttaatgttattaaactcaataacttctgtgtgaacagaaataccaccacgtccgtcaagagatttagcaatcacttcgtataaagctttcattttattcctgttgcctcagtaaagttaacaccaaacgcggcttcgaatgtattagccacttctttatcatatctacgctgtttaatgataggtaagaataatcctactgtaccatcatcacgaccttcagcagttacccaaccattacattcaagttcccagatagttcctggaagagaatctctgtttttccatagatgagtacgatcaagttcatgtaattcttcgggcttatctttaagacctgacccagcgttaacacgaatacgaccacattctgatacgaacattaagccgcccattttaccaggttgttttctatgctcgtacgaaccgacacatttcaaatctacagtgataacctctttaaatttaacgaggttcttagaacgcttatcttcccaataagcaccgatattcttaaggataataccttcgagaccttggtctacgtatgtcttatagatagcccgagcttcatggatgttatgtacgacatggttttcaattagaataaccttgtcatagcctttgctcatcatttccaatgcacggaagcgtacatcataagcaaatccaggaactttaccttcggaatatactacatcaagcggaacataatcccaaacttggaatctcataccttccgcttcttcggcagatattgttcctttaatagccttattagccaatccgtttgattccgtgcgagccgtctgttggaattccttagctttacttaactcaggaagctcaggctctttaaacatatcaaacaggtcgttttcttcttctttcacttcgacatgatataccaactcgccgtcaatcatcacaccgttaggatggcgttctcgggcttctttggtcatctcgataagttgacgcttaagtttatctagacccaggtattcattaccggaacgagtaagaagagtcacatcatctaaatcatctccgcggatttcagcgaagcatcgggctccatcagctttaagttgtgcgaatgcagggaacttaatatatgacagcgctttctcagagtaggctgatgctaacatctgtggcatctcaggaattaatttcttccataccttattagcaatagaacctgaagcgccgcaacgcatatctttaagaagaacccgtaccagtacactagcatcaccctcattcatcttagagagcaaatctactagcccctggattgccatattaccagtaagtactcgtgctgccagaatgtcttggaggtaatctagaccatctgaaaacgtctttgaaggaacatttggatatttaacgggagtatattctggaactttcttaataaagaatttaaatcgcccggaatacgccagcagataagctcgctttaaatcaacgttatctttattgtcaatgagaatttgggttttggctttagaacccttagcatcttcaattgctttgatgatatcaaaaatcattattcacctaattcttttgaaagttcgcttacgctacgatgataagttaatccatcgatataaacaaacccgttattgatgcattcattccaaatcgggcacgactttgcttcacgccaaattggattccaacgataaaactgattaacatgaccgtaatcacatgataaccagcgtttaccaaccttagtatgaactacaaacatatttcctcctagggtatggcaattataccatacccagagtgttagcaattaatttggtgattatcacatgtaatacgaccattattccaccagtcgtttccaggaggaacatgcggaccaggactaaacggaatgataggttgtttccaccaatctcctggaacttgtcgtggaggccaattaaaaggatgttgctctttacgaatttggtctttgatagcttcttcccacaatccagaaagagacttctgcggtttcttaacgaatttcagagattccaggcaagttacaatttgatgccaatcttcaaccataattccaggagcagtcactgaaccttctcgctcaccacgaggcatataaaacacacgggtttcagtgtcttcaaagactttgctagctgcagcaatgtgtttaggcaaatcatctacatagcaaacgatgcgatcgccgtattttactttagccttttccagtaaagcatctttagattcatcataatcgcagaccatgatttctgtaaatgcatcagggaacaaagcattcagattgaaacgacgattaaggttagcatctactgagttgccaagagccgtgatagcgacaaaatcgtatttttctttgagcttattaactgtagctaaagcatcagcatacggagcaagataacgaataaaatcactgttgttgtacttcagaagcagcttaacagctagttcttcttcacaatcaaacagctcagcgggtttaatgaatttttcagtagtcatcatatcaaggatatgctctacaggaaggttatatttttgggcaaagtaaggcagaccactttgccacttaacgatgattccatcaacatcggttgcgattactggctttgacattcggggaaattcctcaatgcttgtttaaatttggcaacgctatttgcggcaccggtgaaattgaaccagattaaccctggagcgtccgagggttctatatcaattaattctatattataatactcagcagtctttagcatttccctggtgatacgtcgggcaaccatatgaccgaagtgaggattaatagacatcgtcgttagcagcccttaattgagtaattggataaagctcagattctgcatggattgaacgattaccatcaacccaattaacttcataccaaggttcaaccgagtaggctttaatggctggagccgtatcacatacaactccaggaattccatttgctaatcttactgtactgaagatatgatatttcatgcatcaagtctcactgcccattcgggcaattcaaagaaatccggagcatcaatttcatactcaacggtgtgttgtttaacatcagctgacatgatatcaaccattgggtggtttttcaaactgcaagaaaaaataccagctttaggtttaggcacggatacaatcatgttgatttcctcaaaatttagttatgaatttttctttcggcattttggcatttgagccatcactgtcagaatacccaattggcatagttgcattaatgaattcaattttagcatttataacattaatgctcagagaatctacgccatcaaccatacgaaattcaggagggcaatacctatcaatgtatgctttcacaccatttttattagcaggtgtaccatcgcgagtatcgctgataatggtttcaacttttttctttcgtgaatcatagaaagctgatacaatcatttcaatttcctcttaaaacggacgaatattaacgtgaactacagggatagcaaaaggctgcatgattacaacttttgtgtctttagttgcattcaggcgttgtacttttgcaagattaacagcttcttcctttgttaatccgccattgtaggtatcatttcctttatttgaggtccaaacaccccaatcattgcttccatcatcgtcggtcttcggttcatgttctttgtagatggtttcttcaaaataatgctgaaactcttgattagtaagaatacaccacatgtgagaaaagcgaacttcatctacactaacgcgtttatattccccatctggcttaatgatttcaaattcaactaatccggtattttccgcatatttaaaggttctggtaattttaatcgggttattaccgatttgctcaaaaacacccttgataagagcgcctggagacaagattggagtctttttaagcttatagaatttacctttttccattatcatttcctcaatagtggggccgaagccccgagttagttaaaacttgatttcgtttgaaacgatatcccagattgcttcacgttgttcttcggttgttttacgaccgaggatgtggcgcagataaattttaacaagcagctgacgatttgtgttccaagacggatgtgaagataaatcacgtttacgaacttcatcatggaatccaactttgatttcagaaccgttgaactgaatatccaaagtaggaccattttcaaagctgaagaatacgtagttatcttcccagtacatatcgatttgagctactgtgccattgttgtgttcccacagcaaagtagtagaaacgtcccaagcattgttctgtacgtatttgcggttgaagttagtgaagttcatttttattctccgtagtttgtttatctgtttgggtggtacaggtctatagtaacccagaccacccaagaagtaaacaacttttattcaaaaacttcagacatttttaacctctacagttttaacagtttttacttctgcaaatccgatgcttttaaacagttcatacttggtagtttctggaacgatatcggttagctcaaggatgatttcttttgcttcctttaaagcgaagacgctacgcccgtctttaaccactggagtaggtttaacgaacgttgatgggatttcaaaaactgcatagcggtcatcagagctttgattttcaaacgctcctatttgcacaacccgtccttcttctaactcgtgagaagaaaataagcatgacagagaccggtcatattcatctcctatggtttttgccgaaatgattttaccagtttcggttttaatcttaacaacccggcccagcgaatcaagttctaacggcgtccagccttgaactccaacaacagtggcaatgagatagttaattgtgttcttagcgtctttccatctacggtaagtttctggggaaatgcaatatactcggttttcgctgtaattcattttgatatcctcaaagatggggccgaagccccgttcaattaacagataaaagtccagtgagttaaatcaacaacacctttagctttcattttttcaattaggtcgtcagccacttgacgaccgttttcataccaagttacatcttctgagtaaccgtcttcttcatctgtgtaagtttcagaacgaatacgaccaacaactggagtgttcagaacatatacagaacctgtgaaccaattggttagcgtgatatgccagcagaaatcatctgatggaccgtccggtgtcatgcatggaacgatatcaccttgaactttagacaaaatccacattttctcgtggacagtctgagctttataaccgtcatggtctttagtcttgatagttgcattcaggttgatggtattcattttattctccgttgtatctgtttgggtggtacaggtctatagtaaccttgttgagcctagaagtaaacaacttttttcattctgcggaaaataaaaaagggactcccgaaggagtccctgaacttatgctttcggcttaccaaaacgagaagcatcatcgcgaagaaccgcacgagcccgacgcatgattttctcaaccgtctgattgatacgcttgttcgacccacgcttgtagccagcgcgtttagaggtagggaccacggtcccacctgcgtcgtcggtcaggttatctgtctgggaccacggtcccacctgcgtcatcggtcaggtaatctgtctgggaccacggtcccacctgcgtcatcggtcaggtaatctgtctgggaccacggtcccacctgcgtcatcggtcaggttatctgactgggaccacggtcccacctgcgtcgtcggtcaggttatctgcctgggaccacggtcccacctgcgtcgtcggtcaggttatctgcctgggaccacggtcccacctgcgtcgtcggtcaggttatctgtctgggaccacggtcccacctgcgtcatcggtcaggtaatctgcctgggaccacggtcccacctgtatcgccggtcaggttatctccctgggaccacggtcccacctgcgtcatctgtcagcttatctgcctgggaccacggtcccacctgcgtcgtcggtcaggttatctgcctgggaccacggtcccacctgcgtca

SEQ ID NO: 25 - DNA, 167682 bp, unidentified
  source 1..167682: mol_type = genomic DNA
ggtggggagtaatggagtcgaaccactcgagccttttgagcaacagatttacagtctgtcccgctacccctacggtctaactccccaatgggtaattttatttatactgctctaaaattaatcagagcagttgatagattaataataacaaagaaaacctaaagcatattacacaatcggtgagctctttgatttaaccaggaataccctatgcggtgaatccatatgagagagcaatacccggtgctcaggaattggacttgtatggaacggaaccacacgataacctttaggcgtaaatcctagcaaaataccaacgcttgctgcagaaagtgacccgccgcaatagtatgataccaaatcaccaggctggatttcattgtcaagagaatcagttttgacatgcttaggcgtaactaaatcattaggaattggaacgccttgtgcatcatagtattcatgggcaagaagcttataattctcttgatagaaagtattaaacgcagctctgatattcatcacaatttcctcacaattaatctttgtatgcttcagttgaacctttagcaacggtctcaaatcgggaattcagtatctcaaaatagtcttgatacgttccctggagggcttcatagcattcttctaccgtagagtagacacctctgatttggtcagagccaggagcaggataataattagaccaagttaaaagtgcgtacattacttacgtttccagctgtagtgagccaaaataagaagcactgcaatagcaagtagtgatgaatgcagtgctgccagtagtgcacctagtcctacacccaaagtaacataatcatacttagttacttcttcacggtttaaatcatagtttttgatgaaccactgcttaatctttttcatgtgctattttatccattatgaaagaaatgatacccattagaaatgcaacacttaacactgatactgtttcaggaagagacataaaggctgcacctataatgccaaaacctaatgctcccatgcagattgttgatgcaacatttctaattaattcacaacgtttcattttattctcctcaagttgatagggttatagtatcactactacaacccgttgtaaacaactttattcagcgccagcggcttttaaaagctttttaagattagcagaacctcgggctgaaaaagttaccttaccatctttttcaccgatgctgccagtcaatttagaaagtttatcactaggaacttttttaaaatcggctaatgtcccgtcaacggtttttgtaacaatcggcagttcatcatcctgtcttttagcttctgtaataaattcttggtacgttttcatgttgcttccgttttgttagtttgtttttgatggagctatagtatcaccactaggaccggttgtaaacaactttgtgaaataaatttctatttcaaatcttctgaccagttcagttttagtggctcttggtactctctatcaagcactacaggtacttgaacttcaccctcgaagtgagctggaccgacattgtagctgagagtaatgtgcggtgagtaatctgggaaatcgtgagttgctcccagagctcttgcatattggtgacggaattttaagtattctgaatctagtttaagaactagtgtacgtccgtcttgcgtgtcccatacttcaagtttacctgatgtagcaacttcaaaacttcctgaagcgcaaacgtatggaacatgaactcttgaatagcatatcgtcgtatgaatcttatgacgaggtacaggattagggaccttcaactcacgctgaaggtcctcaatagcatcaagagttttctcagagaatttagcagctacatatagaccagtgctaaaatcactgaagttcattaggcatcagcttcttcagtagtttcttctgcgaactgtgcttcgatttttgcaaccaggtcatcaagtttaacctgaccgtcttcactgatttcaacgccggacacagcaatcagtttctgtagtacttcttcatactgtgcacgcagagcggacagaccttggatggtttcagacaggtcaaatacacgaactttcaaagtatcgacttgggcttgcagttgttcagtagtcatttttgaattcctaatatagtgttgatttttgaataaagttcttctagagaaccgtcgttagttattacgatatcgccttcgcgaatcggaagtccacgctctgtgacgtgagtatcttttttagaaccttcttgctcaggacgaactacatgaataactgtagcacccatcgccctggctacatcaagttcatggtcttggcgggtatctgggacaatgaaataatcataatcaccaaaagtatcagccataaccaaagtgaatcgtttcacccaatacatgcgatcgagcttatcacagacaatgtcagtcccaagggtctgcatgagacgacgaattgaccatggctcaacaggtttatttattacaacttgacggatgacttccatcgtatcgccgtcaagaattttacgcttgctatcataaaccaccccaggtaaaggcaaatcatgatggacatattcaatagcattcgccataatacgaatcacgtctttagtagacagatttaaatcctgctcacgatcgtaatcaataccttcaatcattgaccgagtaatgcgaggaaactgacgtgatgtatcgcgataccactcagtaagcattgcatcagccaacgcatctttaattggacctgctaactgatgctttgttgcgttatagttatccataatgtagtcagcagttgtatctttgccactacgttttttaccaatcaaaaataaaagcttcaaattattacctcatagaaggatgcattcccataactttctgttgatactgggattcgcgagtatcattgacagaaggtctaccagtaattattataccatctttttcaacttcaatgtatttgtactgcaaagttgctacacataccattgctgggtcggattcttcggttaaagaatactcaatttcagataaatcactcacccaacctccgatgtagcggacagttaatactatatcatgtttatcgttatcaagaacatgcattaaaactgcaccaggaaatccttcaccgccgttattccatccagacttgtctcggtcaatgtagttttgacagcttaacatccatttgtacatttgtacccatgaatcaagattttcatctactaaaaatctaacaggaacagcgtcaaactcaaaagtagacccaggcaatttagcacgatgcatgccttgaggcgaacctacagtatcagtagcaggaatatgaattccaggaactacagctgtttgaagattagctttaaacgcttgggtgaggcccccatcagggacctctaatataaagttagttgtgttagtttgattaaacagtccagtagacattatgatttccatacagaagtagcagagtagcgtttgcctttcgacatgaactgctgcagtggtaacatgactacattcgcccaatcagccggttttatctcaattaaagcaccctttatattaccaggaatatatgctttaatcattttgtcagcgccagcaaatcctttaacttggctccagtttatctttaatctggtcttattagatatcactggcgtattagcatactgtttaagaagttcttctaaaaactgctgacgagcctttggcggaatgtagtgaaggtttaacccatacatcaatgtggttgtaccttgctttccaagaccaagataaactatcaaaggaaatttatcccagaatggaagagtgtctttgtgcttagcgtcatacatgtaagcatatagctttccaggttgaggcttggttacagaatgaccacgtatatttttctttatagtttctgcaaaccatttagcagatttattgtttactgctgcgccttcattacgaattttatctttgatagagcttcgaaatgaatttaccatcacaagagcacgctcttgtttggtcattttgttagcaggttttttctcaatttctgctactttaattgccgttttaattcttgatgcatgacgagccattgctttactgaacgtagcaggatttattcctttgctttcagcgaatgatttagacgtcatgccttttttacgagcagcagagtattcaactcctaatgctacccattgattttcactacgggatttagctttaggcgattctgcagcttcagtgataaattcaaatatagccatcagcctttccatcctaattttttaagtgaatcttcggtaattaacctaaattctatacccattttactggcagtagcttgagctgctttccacttatcaacgtttacagaccaagtgtaaatttcatcaatgtaccgtttcttcgctgatgtcgtcaactttgtgggtttgaccggaggtctagtttctttctttggcttaacttcaaaaaagaactgttgaccattagaaaacttagcccagaaatccatgaaataccggcgtttctttccatctgcattactaaagtatggaattaccacgcactctgaattccattggactacgtctgggtgattatctaaccaccgcatcatgaaattgctcccaagtagatcgatatgtgatcttacgagggtcccccttatatttacttatgttttttggtaaaaattttccgctataagccattaggcttctccttacatttatcaaaatgccagcacttcattccacgaggttttcctgatttaccacagtgaggacatgttactataggctgcaattctgaaacagctctaagctttgctcgtgtttcttctgatctcttctttccggtgttagctaaatttaatttagtttggtgctctttagttctatttttggctgcagtagacatatttttcttcatggtatcactttttgaaatacctgtcatagaaatactgcgcttttcatttgattctagcgtctgagactttccagtaagagctgcagacagtttagctgaccactcctttgaccttggacttcgcttctttcctgttaatacggcagagttagcaatagaaacccttttgcgaatccattcatatgatttgttatttcttcctgctaatttagaagacattatatgaactgcatatgataacttatgattatttggataaatcttagctaaaagctgatgcgccacataatgctcagctgctgttaagtccacaaggttatctttatcatcacttccacccatgcatcgtggcacaatgtgatgccgttctttgtacccttctaaattgcgggatttgcctcttgcaattagttggtcataaattttacggtaattcatgctattctcctaagtagttagtagggtaataatatcataaaccactcgtcatgtacactacaactttataaatactgttattaatatttataagaggataaactatgctcttctcattttttagtccgatagattattctgcaaagaccgtaaaaggtgctaaggcaaaagctatcccaaccgctgacatatttcgtaattatcgcaaatatttcgacactgtagcagaaaactatcttttacaaacatattacataagtggagctcctagaccagaagaattagcatatattctttatggaaatagtcagttgtactggattcttttaatgtgtaataacgtatatgacccgtttagagattggattaaaacccaggatgcatgctatcaatttgcacaacaaaaatatgcagatgtaggtggagaccaaatactctatcacgtggatgcaaacggcaatcgttattataacctcgagcaatatcctgaaaattcaggcatttggtatgataaaggggactttaatcatcagtaccctcaatatactggggctttagctggtgttgacatttatgaagactctattatagaaaatgaaaaactgcgccaaataaacattatcaatcctagtgatattgaagcatttctttctgatattatacgagaaatggaaaaggctcctgacagtgaatatgaatcaggtcgatataaatcccagaccacaattggagaagttgtatgattgaaatgaatgattcgttgaaatggtttaccggtgttgttgaagacagacaagacccgttgaaacaaggaagagtgcgagtacgtgtttatgggcttcacccatttgaaaaggtgcaaggagctataacaggtcttcctactgaagaccttccctggatgtcagtgattcagcctaccaactcagctgggatttctggagttggctcatctataaccggaatggtagaaggaacatcagtgtttgggttatggcttgatgaattcaaaacagcaggactagtaataggaacatattctgcgcatagaaaaacgaagccaaactacacggaaggcttttctgatcctacaggccaatatcctagacaggtcgggtcagataccaacccactagttcaaggcgatgaaactgggtatagtgctataccaaatatcattcaggacagaaatttagacattggcattaatcctgatgatgctgacttaagtgatattcctgaagacccaaatcctgcaattacaataacagatatgcttaatagggatgaaggtcttagattgaaggtctattgggacacagaaggatatcctactataggtattgggcatcttatcatggcgcaaaaagtacgtgatatgtctgtcattaataaaactttatctaatcaggttggtcgtactgttacgggaaatcccggtatcattacaatggacgaagcagtcgcgttatttaagcaagaccgcgataaaatgctttctgatattaaaacgaattcacgtgtaggacctgtatatgctaaagtcaacaaatcaaggcaaatggctttagaaaatatgagttttcaaatgggtgtaggtggtttagcaaaatttggtaaaatgcttgatgccatgctcattggtgattggaaaaccgcttatacagaagcaagaaactctgtttggtttaatcagacaaaaggtcgtgcttctcgtgtttccatgattattctaacgggtaatatggaatcatatggagttcctgctccaaagccagaaggaaaaaacctgtctgctgcttacgtagaaccaaagtctggaggtaatcctgaagacccatggactccggaagattcaagaattcttttcaaagaacctgagtcttcatataatggtcagtatccatatgttcacacaatggaaacagaatcaggtcatatccaagagtttgatgatacacctggctatgaacgctatcgtattgttcacccaacaggttcatacgaagaagtagctcccgatggacgccgtaccagaaaaactgtagccgatttatatgacatgactcagggtgatggaaatattttaatctctggggataagaaggttaacgttggagggaacgagacctattataacatgtataatcgtcgacagcaaattgatggcgataacacgctttatgtacgtggaaatgaaactaaaactattgaaggcgatggtactatttttgtcaagggtaacattaagatagtcgttgaaggaaatgctgatatccaagtcaacggtgatgccactactaaagtagatggcaaccacgacgtaaccgtcggtggtaacttaacttggcaagtagcaggtactgtgaattggaatgttggcggggcttggactgagacaatggcttctatgagctcaatcgcccaaggtcaatacactgttgatggttcacgaattgatgtaggttaatcatggctgatatacttcctattaataccacgttacgcgaagtaatagaaggtgaatacgttgagcagtactttactgctcaattatctaccaacgaaacattaaaatcaataaatattatcgactatcaaccagtatctgatatctctgtgtctgaaacctattataaaggtaattataactcagtttttacttttggaaacgatgtgcttaaataccgtgaaggcgatgagctgaagtccgcttcagcgtgggaggatttacctaatcccaaaactgctgatttatacctgtggaaagcccccagaacactagagaagacatttacctatacagttgagataatatatacagtgacagaagaatcgtctggaggttcatccggaggttctagtgctccaatcataacagaacataaaaagcaaaagatttactctcaaacagttaaaggcaactggagtagatggggcgaccagcttcgtgcttatgtatatgcggggaactaaatggctggactatcatttaataaatgcttaactgccgggcatagtgcgtatcctccgacagaagtaaatgctacacaaagtaaagtattcactggtggaatagcggtattagttgatggcgactcaattaccccacacaccaagacggttgaccctcatgatacgcatggaggagttgttcaacctcgcacatccaaggtatttgtaacaggcaaaaaagctgttcaaatggccgatccaatttcttgcggcgacactgtcgcgcaatcaagctcaaaggtattcatacactaatggctattaaagaacctttaaattatcagttaacgcgtactgcaaacgctatcccagacgcatttactggagcaacattcgacgaaattaaaaatcagcttattaactggcttagtggtcaaaaagagttccaagattttgattttgcgggttcgcgcttaaatgtgctattagatttattagcatataacacgctttacatacagcaatttagtaatactgctttatacgaaagctttattggaacagctaacttgagaagttccgttgttcaagcagctcagcaaaacgggtatttgccaagttccaaatcagcggctactgcatctattatgcttgaggtaactcatccaaatccagagccagcaataaaaatacctcgtggaaccaagtttttagcatatgcacgagattcatcagtagacccatacaactttgttgttaccgaaaatgttattgctttaagagatacttcagcaccagaaggagttaataggtatcttcctattgtcaatttggcacaaggacgtattattcgtactcaattgtcatatgacccgaagaaacctattgttattcgtgatcagtcgattgaccgtaagcaggttaagctgtgggttgatggcgctgaatggactaactggacagacaggtcaatggttcatgcttcatccatttcaacaatttattatatgcgtgaaactgtcgacggaaataccgaattcttctttggtgaaggcgtggcagaagcctctgtagcaggaggagttcttgaaagtaatttcattggtggattaaaacctactaagggcgcgcaggtagttattgaatatattcgtactgatggtgaatctgcgaatggcgcaactgatttcagctatgctgatactctgcaatatatcgtagtaaacaaaatcattgaaaactggtcagattctcctgattatgttggagctgatggcggtggtgaacctgaagacatcgagcgtattcgtgagctcgcccagattaagcgcgaatctcagatgcgatgcgtgtctaaaactgactatgaatcattcgttagttcacgctttggttctatcgtacaagcagtacaatgctttactgatcaggacaaacccggatatgcatttatcgcaattaaaccaaaatctgggttgcagttaactgctgttcaacgagaagacattcaggattatctaaaacctttctgtcttgctccaattactccttcggtaatgagcccagattacttattcattcgtcataatattaaagcttcttatgcgctgaataagttacaagaatctgagcagtggttacagtcaaaaattatagactcaattaatagatattacgttgatgaagttgaaatgtttaacaaaaatttcagtaaatctaaattattgacctatattgatgatactgaccattcaatcatcggttcttctgttgatattcagatggttcgtgaaattgtcaactatttcactcttcctagcgcaggtattaaatactataatactattactccgcggacgttacgttctggtgatttggtctttactgtcactccaactgcagattcatatccagttaatatcgttggaactgacccagataaaaatggtaaaggatatatggtcattggaccatttacaccaggtgatattaaagagaatactcatattcagccatatactgaagacgattttgatagaactactaatggagaaagaactcgttggtacaaaatcggtgaagtagattattatggtgataatatttactggagccttggagctattggagccgatcctcttcagtttgaagaccagagtattgagctttattctactcctacccaggatatcgtcttcgcccgcgatggaacacttatcgtatttgagaatgaccttcgtcctcaatacacaactattaaattggagcctattactcaatgacaattgcaccgttcgtcaccagcttacgaattcataagctatctgcgaatcaggtcaatattcgttgggatgacgttggtgcaaacttctactattttgtagaactggccgaaactcgaaacagagcgggggaagttatccccgctgataacttgagttggtcttcactgggttataccgcggataatgattggttcgaacaaaatcgtattgaaccgcttacttattataaaatgcgtgttcaaactacgtcagcagggtttgagccgtctgaatgggttgaaacagaagagttccaaacttttgaagaaaacgcatacacatttgagcatatgcaagaattcagtttagtgaaagaattcattaaacagaagttttctttaaacaacatgtcgtatgttaacttcaacacatctgccatgatggcatctttgatgactgagtcttttcagtttagtcctgaatattctcatttatcagctattgaaaacttcgttgtaggtgaatctggatatcatgaaattcagggacctattgaagcagtgtgtgttgataaaaatagaactatgctgggagaaatagacggaattttgtatctgtttgaaagattccaacatatggttaaagtatcaaatgataaaggacagaattggcaatacgttcagttatttaatgaccgtgtcggaaatccggtttctagagtggtaatttatcaatctaaaactacttcttatgttttaggatatgataaaatcttttacggaaggaaatcatctgacgtacgttggtcatcgaatgaagttaagtttagcgataacgaagttacatttgctaaattgggagaccagttaaagcttggctttgaagtagagttattcggaacgtatgcatcattgcctgctgacgttaccaaatatgctgaagcgtttacctgcaatgacgactatttgtatgttgttgcaaaagacactgtccgtaaagttaaattaaaagatgctccaatagatactgaccctttaagcccgacatttggtgaaaaggtatttgaaaaggaagtatctcatataacaggcaatcctaaatctgtatgctttaaaatggattccgttgggggcaaaatctttgcccttattaccggggaagttaaaaccttaggattagacccaacagacccaaggaacgttgtggattctgcaactaaaggcgtctatgtttaccaggaaggcacaaatacttggaagcgtgtatttggtaataccgatgaagaaaaacgtcgtatagagcatttatggacttctatgtcaactgacggaaaggaaatattcttttcatcagccaattttaagacaacagagtacgctcaggatattgagcttgagacgaaatatccagaactaatttctaccgcagttaaaaatgttaacccaattcagtatcactctgataagcattatcacatgatgagtttcagagcagatgaattttcaagatgggaaacatttgttcctggaccgatgaggttttatgctgaaccttggtttgtctggatggctcgtgaaggcaacagatgctggataagtacagctgaccatgcagttgtcatttataatgatattctttatcaaaaaagagtagatacagcagcacagggaactaccgagcgcattctttcggaagtgtgggataaaggcgacgcaacgttttattgccctccggtttcatttaacggatttttgcagtatgcttctggtatcatgtttcacgagccagatggaaagctgataggttattatgcattcgattatcgtgttcgtgaccaggtaacgcttaactggaaaccaactgatgtaatgtttaaggcgtttctgcagaaccaaacccgtgaagaagattggactcctgaacatactccaggcttgcgtgacccggatttacgtccgtatcttactaaaatgatgccggatagttacttgctacaagatagtaattttgaacacttttgtaagtactatctccaattcctttcagatggaaatggaacacattacaacagtctcgttaatcttgttaagaacaaatatcctcgcgaagaaaatgcatgggaatatctgtggtcagaagtttataaacgcaacatttatctgagtaaagacgctcgtgacgctgtcgtccgtttctttgaagcacgcaagaatgatttctatgctactaaaggaattgaagactcatataagttcctgtttaaacttctttataacgaagacgtcgaaatcgatattgagtcaaagaacactaccgaatatgacattattgttgaaagtacaaatatttctgacgatttagttggtcgtacgatttatactgcttccggtcgtagtaatgtgacttatatcgagagagaataccgggatggtcgtctgttatggcgtattactattcataacttatcaggacggttcattgaaggccaggaaattaaatcagagcgtacggactttgagggtattatagttcaaggtgttcgtggaaaggatatgctgagtaataacattgattatataaaccgcagccgttcttactatgttatgaaaattaagtctcagcttcctacttctcggttccgcgacgatgtattaaggtttgttcatccggtaggtttcggtttcattggtataacattgctgacaatgtttatcaatagtggcttaaatatgaagcatgttgagactatcataaataaactcaagaactataaatgggatgcaggactgccatcagtttatcctgatagagttgctattatcgcttcagatgatacaatagaaagagacccaataaccaatgagcctaggtattcttcacgtgctcaagctggtgaacctttcccgttacctgctaactataatcaagaaaataacaatagtgttatcgctggacaaaaccctggacaacgacgtaagccgttaagtcctacgtttgaccaatcagcagtaacgtttgctaattatcgcgatttagttaaccaacgtcttaaagacgatgcaggtaatcctcgcgatcctgaaaatccgacacaggtaaaaattgatgagtaattcaacaagagcaagttcaacgcgtagcacgatttatcgtgctatcattacatctaagtttagaactgaaaagatgtacacattttataaatcaattggtccgggaacggaccaaaacacgttgtatgtttcatttggtaaaagcactccgtggtcagataacgaatctgaacctgggtttgcacctccatacccggccgataatgaagacggtgtggttgatatttggacaaatatgatgggtgcagtcaaaattgaatcatctatgcttgactgtgttgttccaagaagagactggggagatacaagatatcctaatccacgcacatttttaatcggcgatatcgttgttgctaactctgcgccatataacagaactgatgctggatttggatggatggtatatagatgtattgatgttccaaagaatggaatgtgttcaattggtaatcttacaagcaaagaagaatgtattaagcttgggggtaaatggacgccatcaactatttccggttcagcgcctcgtgggcgtggtgatgcaaatggtactgtcgatttgggcgatggatatctttgggaatatctatatgaaattccagccgacgtatcaattaacagatgtacaaatgaatatatcgtagttccttggccagaagagattgaagaatctccagctcgttggggatttcaaaacaacttaacttggcaacaaaacgactttaacctaatctatcgtatgaagtgtaatacgattagatttaaagcataccttgatgcaatttattttccggagtttagtcttccgggaaatactgggtttaggcagttgtcaattataactaatccgcttgaagttaagccaatgccaaattctcctaacgttaaggctgaaaaaggttggtatagcgcttctggtcttgaaagacagtcaggtgaaatgatttacatggaaaatcgacaacctattatacgttcaatggaccaaacagaagagttaaatttaattttcgagttttaattatggggagcctttggctccccatttttatataaataagactatactttgatatgaggttaacctatgtatacagataagggtaaaaaaataattgacgtcggtgagattggtaatgcttctaccggcgacattctgtatgatggcggtgtgaaaattaatgataacttcgacgccatttataacgccttcgctgatcaacgattatttgcagccggtggtggagctttaaaccaaaaaatccacgcaacaagttattatcaaaagataaaatttggtgatgctaactcggccggtacagttccgatgggttcatgcatagatgctgattgctcagaaggggcagttcaaattcgtctttcaaaaggtaaagcgggagaagctgtattcgttgtaaatagtaatggctcagcatcaaaagctagatccataaaaataacaacaaacggcgaaggtgtagcagatgcatttaaagacggatcgcgagaattgattatcaacacaccaagatgtagaattgaattgtggtgtgttgaagtcaaagctaacggtgctgcagtttgggattattcaatttcaagtatgtttggcagcacatattcaccgttagaagctacatataatttaacaagttctcctattaatattcggcttggatataacgatgattactctactgttaaattgttattaagcttcagcgcaaatccaggtggtcaaaccatcaaaaggcaatcatctgaagtcatgcttatgattgacccgactattacttcatcagcgccaaacggaagagtatttgacactgaatatgcagtgttaagaagcggtgaatcatctgaaaatgaaaagatgtattctatttcatactctattaacgcgcagaaagatttaatatgcacagcttcaacatcttatggaaacgcacgtttggcagttaaagttattgctacacagaccgtaggggtatctcaataatgaaacaaaatttgatagtaggccaatctgtagatgatgggtctggtgattacctccgtaaaggtggtcttaaaattaataacaactttgatgatttatattcagagttaggtgatggttcagttccatttgcagcaggtgcatggaaaacttttaaagctagccctactggaactactttaaatgctaagtttggtcaggcctttgctattaatacccaggcagcaagagttaacgttcagcttccaaagggtacagccaacgactataacaaagttattaaacttcgtgatgtttggtcaacctggcgattaagcccaatcacagttattcctgctcaaggcgatacattaaaaggttcagcttctcctaaaattttcaatactaacttccaagatttggaattggtttattgcgcccctggccgctgggaatatattgaaaataaaacggtagataagctaactaacggtaacttaagtactgtagcgaaaaaatcaattattgctgctgcgggtcagactgactttcttaacatttttgatggcgtagaatataacgaagactcgcttaatgtatatcgtcgtggtaatattttatattacggtgaaaccagcgttatggataaagccaatgctgattacggttctcctggaacagtagcaggtcaattggtagaattaaacggtaaagacattcgtttaaaagttccatgtgttgaaggggaagtaataacatttgaaaccttcctagatggaattggtgtttatcggtcttcatacaacaagttggctatccagatacgagattcagcccagactacatcccagacgattcctgggtcaatgatagtagataaccttactactctccgcagaatcactctggatgacatgggtgtacttccgggcgtaggggtaaatcctaactcgcttgaaatttcattgaacggaaaggaattactcgaagctggaactgcaggtcttcctttattttattgtgaaggcgcggaaggtggatatgcagaagactgtataaacaatggtggtcaatgggtaaattctaaccaagactatagactggaatttgactcaactggtactaacgtcgaagctattatttttggtgaggcgtttgaagataaagaccttcttaccgtccgttggttcaataataacatcggtactactatggatattgacgatatcatggcagaaaccgaccaagtgtatatgaatgctgagcaattagtaactctaaaaaatcgcattgaatacacaaattatgatgaacctaatcagaaaaatatgcgtccggttgctgacgatattatgattaaagtcaataatattgcagcattttttgacgtaatttatccgattggcacgatttatgaaaacgctcacaaccacgcaaaccctgctgactatatgggatttggggtgtggaagctttattcacaaggccgtgttactgctggttggaataatgattcatctgatccttatttttcgcgtaacaacaataacttaaacgaaaatggtcagccatcattaacagcaggtggaacggttggagatttgacgtttacattaggaaaagaacacattcctgagttaatgtcaagagacaaagttctaatttcagaccctgaacatggcagcgtagttattggcggatgtcaattagacccagacgcacaaggtccaggttattctaaataccgtgaagacactgttgcggtaaacaacggtgtagttccaaatgacatcactaaaattcagccaacaatcaccgtttatcgttggattagggtaggttaaaatgacgattgaaactaaaactcgtgaaggggctaaagttaattcaagattaactgccttttcagaatatcgcgtagacccgcagaatattgcggtaggaaataaggctcctatagggagcctaacctttgaacaaatggatttaggtgtttggtatccaaacactgaagctgctattaatgatttaatgtcattacagtcagcagaaattggaactattatttgtaatgacaccggaatatctccacaaccagcacagcaaattacacgcgctactttttcaggcgtagtttcgttagaacctaaagaagacggttctgttggcgacccagtaataattcacattcttggattgccaattagaattgcgaatggtgatgactttgcagcagtagctaccaggtggtatgataaggtaaaagaattagaagcagttggaaaagtggttcaacaagttactcaatcacctgcaactcctcagtatgttgatattattcatctggattatcagaaccataattttgaaacatataaaaaatatggtttaactgttgagtttactgttacttcacctgctaaagcgggttatggacaatgggacgctattggtaacgaaactaaaaccttcggtgcaaacacatttacattccactattttagaaggatgggataatggcccagaataactataatcactacagtgatttggccaaatatacgatatttgacccagcaaatacacaatggccagttgctacaaaagacgtccaatcagcgctagcgttgattggaagctgggcaagaactgacattggattacctgcagcatctccaaccgtagcaggtataattcgtacagctacgcaggccgaagttgaagctggaactgtaggtaatgctgcggttaccccagctacattaaaatccacaattacccggcctgaagcaactaccgcaattcttggcttaacccgatacgcaactaatactgaagccgcagcattaaccgcaggaaatagaactattacagctgctgctcttggccatgtgtttaaaaccgtaaaagcccaagaaaacgtagatggaactgttaggttaacgactgccgctcaagctcaagcaggaactgatgaaaccaccgcagtaactcctaagcgtgttgtagaaatgattggaaagttcagcgttaatcctcctacttatacttctgcaacagaaagcaacttgggattagttcgtgtcgcaacccaagcccaggtagcagcaggtgctgttcacgatggatacgcagtaactccaaaaaccttcatggcatcaaaagcgtctgacagcgtatttggtatagtaaaatttgctaaagactcagatgtggcttcagctacttctaacaatttggctgttactccaaaaagtctacaagcgttaaaatcaaccaaggataaatatggattaacccgattatcaggttctccaacatcagatgcttcacttgctgcagctgcgactgatgctgtctttaaaactcgcaaaataaatggaaaaacccttgataacgatataacaattaccaataacgatatcaattgttatacacgccctgagtcggatggaagatatatgccagctggaacgcgtgtcggtaatattacttgggtagaaggtggaacttatattcctgctggaaactggtttgggtgtaattctccatatgaagccacttctagattggcgctgactctcacaataaaattccaacgtaataacgacggctatgacaatagaatttggagatttagaataactgtcaacggggaaaatagaggagaacatacactcaatatagagaataccaagggcggtagaaatggtcattcgtggagatttgaaggatatgctacaggctcatatattataaatgatgttcctcctaacgccagagttcaaattgagccatttgaaaatatccgtggcgataattattcagcgtcattaacgttttgcaccaaccgatagggaattatatgacaaaattagtagactcgcttccgtttgtagacggaattccagacgattttcaacagagaattaactggataaaaaatacagagcctcttaatggggcttcaacccgctatggaaatgatggagaactgaatagagcttctgtgcagattcagaaaaatgtggttcaggtacataacgatttgaacaacgttggaactgctgtagaaaatattcaagtagatgtagaccaaatcaaaaaatcgttagaaattacaggttcttctgacgccattgagcaggtttatatcaataaaaagaatattgaaaagcatgatggacaaattcttaaattagaagaagacaccgaaaaacttcgaactgaccttgattttctcgaagaggatgtaggtgtttatgattctagtaaagatgattattacagaacagttcgtgataatatagtttgggttaaacgtgaaattggtgcgtatcctgggcaagatgttaacggacagcctaagcaagacgctccgggttctggtatgaaataccgaatcatcaacaatgcgtcagctatagtaaaacatgacgagcgtattcaggcgctagaggatgcatacaatgattcagacgtaggttctctgactattgaagtaaacgacctgcgtaaagaagttggtcctaaatccggagctacgtcagcttcaatttatgcaaggcttgtgaataacgctgatgctatttccgcagctaataatgaaatctttgctattaaccaagccattgattttaccaatccagtaaaaattggagctcgtactactagattagaaaacgattatcgtatagttgacgcaacacttaactctgcacaaaccgggttagttcctcgtgtcaataatattgatgctcgtttggggtcttctgataagcctgatactattgaaggaaaaattagttctctttcaactgaccaagggtacatttctgatgttgtaggacgtgatacttcatcagggcttcagggtcaagtagcatggataaatcagcaagttggtattgttcctggcggacagccgattcctccggggtcaattttagcgagaatgaccaatgttgaagggatgcaaaactctcagcagtctgctatccaggacattcaagtagaacttggcaataacagcgaagggttaaaaggttctgtatttacgttacagactcaaatgaatggtgacttttcgtcagaaaatccagttcaacgggatggtgtatacgctactgtagtagaattgcaagataaattcgtgactgcagttactgacgtagaacagactggagcatacctccgtaaacggggcgaatggtttaagaagccttcatcaataggtgaattcagtaaagaagatttcactgttgatttaagttctgatgcattggtaaatcctaactcattggtcgctgcttcatttaatgctggcattcgtattgttgatgatattattgttgatgacgatggcgtattttgtgtagaaactgatacagttatcgaagcttctgattcagataaagctgtccaaattgttattctcgtcaataacattgaggtgtttacttatagcctaggtgttaaagcagtaaccggcgagcaactgttgaaaaccaagaaacttattaagttttcgtctggcgatgcaatcaaaattgtgtatagagctgcttcagaagaatcaaaagttcctgttagtattaaatcattggatattactattcatccagcagtataatgaaagggaccttcgggtccctttttcgtataaatagaatataaagaggagcttatatgtcatacaacacatacaacccaaaaacgcttaaagacgctatacttcgacgtctaggagcgccggtaattaatgtcgaagtaactgaagaccaaatttatgattgtattcaacgagcattagagttgtatggtgaataccactttaacggattgaataaaggctatcaagttttttatattggaaaagatgaagctgacaacgcaagatttttaaatggtgtgtttgatttgcgtggtcgtaatgtatttgctgtcactcaaatcgttagaacaaatgtaggttcattaacttcaatggatggtaatgctacctatccgtggtttactgactttttaatgggaatggccggaattaatggcggaatggggtcaagctgtaataagagttatggaccaaacgctttcggtgctgacctgggctattttactcaattaatgacttattggtcaatgatgcaggatttgcttgccccacttccagactattggtataactctgataatgaaatgcttaaagtaatgggcaacttcatgaagggggacatcattgtttgcgaatgctggactaaatcatttatgaataccgacatgatggtaggtaatactgcaggttacggcttcgctggtgaacaaacttccgaccattggggcttaggagataggtatcagaatcctaaccttcgcaataacggccaatatgcaggtgaaggtaatacaaatagagaaggtgcttataataatcgttgggtaaaagattatgctacagcactgactaaaaagttgtggggtgaaattctgtttaaacaccaagggctacaattagccggcggcgttacagttgatggccaaacacttaaagtagaggcccaagaagaaatcgagaggctccgagaggaacttgatttacttgacccgggttgtcctattctgttggggtaaaagatgactacatttaattctagtttattcgctcgccttgaggattaccgaggatacaataaaactaatgagacagaaattctcaatccttatgtgaatttttataatcacagaaatagccaaacgttagcagatgttttatcagctgaggctattcaaatgagaggaattgagttttatttccttcctcgcgaatataacaatccggatttgcttttcggagaagacccatcaagtaaattcaccaaggcttggaaatttgctgcttacttagactcttttgacggttattctggtgataacacgttcttcagtaaatttggtatgatggttaatgatgaagtcaatttgactattaatcctaatttgttcaagcatcaaaccaataattcagaaccaaaggcaggtgacctgatttatttcccgatggataattcgctgtttgaaattaattgggttcaaccatatgatccattttatcagttaggtcaaaatgttcaacgtaagattactgcgcagaaatacatttattccggtgagcagcttcaaccagaattgcagcgcaatgaaggaattatcattcctgagttctctgaacttgatttagaaccaatcaaaaacattgattctcttgctgatatttctgacgtacaatacgcagaaagcgatgcaattaataaagaagcctctgaatatgttcatccgtattatgttaataacggaagaggacttgagtctcctcctaaagcagattcgtttgatgacggattttttgaataaataaaataaagatgggacctttgggtcccttaggagaaatcatgtttggacattggtataattcgtccttacgccgatacattgtattgcttggagatttattttctcatgtacaaattgctcgttggcgtgaagacactggactaaaatatattaaagtacctatcacttatgcttcaaaggaaaagttcctttctcaactcggaaaatggactgctatccagtctaccgagaataaagcaaagatagaaactgttttgccaagaatgaatttgcacttggttgatatgcaatacaacgcgatgtataaaacatcacagttgaatagaaccaaatcatataaaaccccttcaaaaattacatctcagtataatcctactccgattaagatgatttttgaattgggaatttatacacgcaatcaagatgatatgtatcaaatcatcgagcaaatcgttccttattttcagccgcattttaacacgactataactgaactttacgacaaagacacaagctttaatcgtgatgttagaattgtattacagtcattttctccggatgaagctgttgatggagataatatcactcgtcgtagattagaatggtcgctgatgtttgaagtcaatggatggttatatcctcctgttgccgaggttgacggcgaaattagaaccatttatttagatttcttcgctaacagcaaagagctaactccagaaggaaactttgaatcagtagatagcgaagtcactccacgagatgttcaacacgaaaattgggatggttctagtaaacaaacttattctcacgatattcctattccggtaaatccggaggctcctggaccgagaggtgaaaaatgagtgaattacaattagatatggctaaattattagacatcgaaggaattcctggaatagaaggacaagaaattccagtttatgaaaaacttgaattagttgaagttaaatctaatccaaatgaccgtaaacctgacctcgaagatgactattcggtcgttcgcaagaacatgcacttccagcaacaaatgttaatggacgcagctaaaatatttttggaaactgctaagaatgctgactctcctagacatatggaagtatttgcaactcttatgggtcagatgactacaaccaacaaagaaattcttaagcttcataaagaaatgaaagacattacttctgagcaggttagtactggaaaaggagctaatcctcaacaaggaatgaatattcaaaacgcaacagtctttgtagggtctaccgctgatatgatggatgaattcggtgatgcctatgaagcacaagaagctcgagagaaaatagtaaatggaacagactcaaccgtttaacgttctgagtgatgcccatcctttaaatgacgggaaactgacggttattcgtcacccgtctgaaatggaaacgaaaatcgaaaacggagttcgtttctttaaatcgcaatgggatgataagtggtatcctgagaaatttgaagactatcttaagttgcatgggatagttaaaattcgtttgcaaggtgaagacccagctcatttccaaacgtttaaggacaaaaataataagcgcacccgctatatgggattgccaaaccttaaacgagcaaatattaaaatgcagttgactcgtgaaatagttgcagaatggaagaaatgccgagacgatattgtgtacttcgcagagacctactgtgcaattacgcatattgactacggtactatcaaagtccagctccgtgattaccagagggacatgctagaaatcatggcggctaaacgtatgacttgttgtaaccttagtcgtcagcttggtaaaactactgtagtagcaatctttcttgcgcacttcgtgtgttttaataaggataaagcagtaggtattcttgcgcataaaggctcaatgtctgcggaagttctcgaccgtactaagcaagcaattgaattacttcctgactttcttcagcctggtattgttgaatggaacaaaggctcaatcgaattagataatggctcatctattggggcatacgcttcgagtcctgatgctgttcgtggtaactcatttgcaatgatttacattgacgaatgtgcgtttattccaaacttcatagatgcatggcttgctatccaacctgttatttcatcaggtcgtcgttctaaaattattatcacgactacaccaagtggattaaaccacttctatgatatttggactgcagctgttgaaggtaaatccggctttacgccttatactgcaatttggaactcggttaaagaacgtctatataacgacgaagatatgtttgatgatgggtggcaatggtcacttcaaactatcagtgcttcttctcttgaacagtttaaacaagagcactgtgcggaatttcatggcacatccggtactctcatttccggtatgaaacttgccaatatggattggattgaagttactcctgactcgcacgggttttataaatttaaagaagcggaagcagaccacaaatatattgcaactcttgactctgctgaaggacgcggtcaggattaccatgcactaaatattattgacgtgactacatctgaatgggaacaagttggagtattacattctaatacaatttctcacttaatcctcccggatatagttattaaatatctaatggagtacaacgaagctccgatctatatagaacttaactctacaggtgtttctgtagcgaagagtctttatatggatttagaatatgagaatgtcatttgcgattcaatagttgatttaggaatgaaacagacgaaaaggtcaaaagccgtcggatgttctgcactaaaagaccttatcgaaaaagataaactcattattcaccatcgtgctactgttcaagaatttcgtactttctctgagaaaggagtatcctgggcggcagaagatggatatcatgacgatttaattatgtcactcgtaattttcgcatggttaacaacacagcaaaaatttgctgatttcgtggataaagatgaaatgcgtttagcatctgaagtttttaaacgcgaattagaagatatgaacgacgattacgctcctgtagtgttcgttgacgccgtgaatagcgcagaatatgcgcctcaagaacatggtctttcatttgtataaataataaaaagcaaacaacattgaggatatatcatgcctttagtctctcctggaattgagctcaaagaaacgagcgtacagagcacggtagtacttaacgctacaggtcgtgccgcaattgtcgggaagttccaatggggtcctgcatatcaagttactcaaatcactaacgaagttgaactggttgatatgtttggtggtcctaataaccaaactgctgattactttatgtcagcaatgaactttctgcaatatggtaatgatctacgtacagtccgtgtagttaatcgtgaagctgccaaaaacgcatctccactggttgataatattgagtgggaaatcacaactgctggtagtaactatgaagttggtgataaaattacggttaaatatgcagaccaaactgtagatgacactggttcagttactgaagtagatagtgacggaaaaattatgtcggtgttcattccgacggcaaaaattattgcatatgcaaaaagcattaatcagtatccggatttaggtgattcatggacaactactattacttcacagagttctggtgtttccgctgttattactctgggcaaaattatttctgattcaacagttctgttaactgaacctgaaactgcccatgaagaaatgacaaaaactgaattccagactgcgcttgcgcaatataaaatgcctggaattgtagctgcgtatcctggcgagctcggaaaccaactggaaattgaaattgtatcaaaagccgcttttgataaaggcgaacagctgacgatttatccgagtggtggacagcgtgcatcaaccgcaaaagccgtatttggatatggtcctcagaccgatacacagtacgctatcattgttcgtagagatggtgcggtagttgaatcaacggtgttatcaacaagccgtcaagataaagacatctacggaaacaacatctttatggacgattatttctccaaaggttcttcacgttatatatttgctaccgcgcaaggatggcctgaaggattttccggtgttattcgtctgggtggtggggtttcagctaatgaatcagttactgctggcgatttaattcaaggctgggatttatttggtgaccgtgaagcattgcgtgtaaaccttctgattgctggtgcttgtgccggtgaaaccgatgaaatcgcaagtacagtacaaaaacatgtttcgtctattgcagatgagcgtcaagactgtttagcactcatttcgcctccaaggtcaacgattgtaaatattcctctgactcgtgctgttgataatttaatcgactggcgccaaggcgatggaacttatgattctgctaacatgaacattaataccacgtacgcggcaattgatggtaactataaatatcagtatgataaatataacgacgtaaaccgttgggttccactggctgccgatattgcaggtctgtgtgctcgcactgatgatattgctcagccttggatgtcaccggctggttatcgtcgtggtcagattctgaactgcattaaacttgcgattgaacctcgtcaagcacatcgtgaccgtatgtatcaagcaggtattaacccggtaacgggtcaaggtacaggtgaaggtttcattctgtttggtgataagactgcaaccactgttccaactccgtttgaccgaattaacgttcgtcgcttgtttaacatgctgaagaacaacatcggtgattcttctaagtggcagctgtttgaattaaacgataactttacccgtagttctttccgtatggaaaccagccaatacctcgcaggtattaaagctctgggtggtgtatatgacttccgagttgtatgtgataccacgaacaacactccagcagttatcgaccgcaacgagtttgtagcgagcttctacatcaaaccagccagatcgataaattatattacgcttaactttgttgctacagcgactggagcggatttcgatgagttgatcggaccacaataaattgtacattttcgctaaatcctgatacaattgcacatatgaaatattatgtgcaattaaggaaaaccaagtgattatctctaaatttgttaaagtaaaaataattcctaaaaattttaaatacttttcggaacttggatacaagctgcctcctctgggttcgcctaggcatggattcaaatattattcaattgatatcagtgttgaccatcttgagcccgggtcaaacatatatgttgattgtgtttgtgataaatgcggtgaacaatattcacagcgttattgcagagacactgacgtgtgctatgattgccgtagcggaaaatttaagataggaaatactattggaacagctaataagggtaaagtgttgtcttcgatgacaggagaaaaccatcctcgctggaatccaaacaagacagaatataatgaatatgctagtaaagttagaagagaaacttctaagcataaaccaatttattctacatgggaaaattttgataagattggactatgtggaatacctggagcgtatcaattagaccataaggtttctgttgcatatgggttttacaacaaagttcctcctgaaattataggaagcattgataatttagagataatcacttgggaagaaaatcggtcaaaatcaaagaaatctagtattgatttatgggatctattgaaatgaaccccaggacattctggggtcatctaacctttagatgataaattatattaccgcacactttaatagcctctacgatgatgtagtcaatcaagaggctatataaatatctataggaaacaacgatggaattaacagacatcacccgtgcgtttgaatctggtgactttgcacgtcctaacctgtttgaggtagaaattccttatctgggtcgtaacttcagtttcaaatgtaaagcagcaccgatgccggcaggtatcgtagaaaaagttccagtcgggtacatgaaccgtaagattaacgttgccggtgaccgtacttatgacgactggactgttaccatctataacgatgataaacatgaagtacgtaaggcaattattgcttggcaggctcaggcccacgctcaaggcaatgatatctctggtatgactccagccgattacaaaaaggttgctacggtacgccagtttagtcgtgatggcaaaactatcacaaatgaacacaccattaccggtctgtggccaactaacgttggtgaagtacagatggactgggattcgaataatgaggtagaaacgttcgaaactacatttgctattgactggtgggaataatgttatggggcttcggccccgtatcgaagttctgtgagttatttgcttaaatatctgacaaaacttcgatataaatatacttatagataatttcggagactccaatggcctttcatattttggacttattcgctccgtgggaaaaacgcgacgaagctgaatataagcaacaaatcaacaatgacctagagtcaatcactgctccaaaatttgatgatggagctcgtgaagttgaatcaaacgaaaacgaaatccagtataattcattcaaccaaatgatgtttggttccaatgaacctggaatgaaaacaaccgctgatttaatcaacacttatcgtagtttaatgaataactacgaagttgacaatgctgttgaagaaatagtttctgacgcggttgtatacgaagacggtcatccagtagtttctcttgatttagattctaccgacttcagtcaagcaattaaagaccgcattcttgaagaatttaatacagttttaacatgccttaatttcgagcgaaaaggagccgaccatttccgccgttggtatgttgactcaagaatattcttccacaaaatcgtcaacaccaagaaaatgaaagacggaattcaggaactgagacgtcttgacccgcgcaacttacaattcatccgtgaaatcgttaccgctgatgacgctggcactaaaatcgttaaggggtacaaagagtatttcatttacgatactggcaaagaaagttattacgcagatggtagattatattccgccggaacgaaaattaaaattccacgcgatgctatagtatatgcacattctgggctagttgattgctcaggtcaaaacatcattggttatttacaccgagccgttaaacctgccaaccagttaaagctattagaagatgcgttggtaatttatcgtattactcgtgctcctgaccgtcgtgtgttttacatcgacactggtaatatgccttctcgtaaagcggcagcacacatgcagcatattatgaacacgatgaaaaaccgtgttgtatatgatgcgtcaactggtaagattaaaaaccaacagcataatatgtcaatgacagaagactattggttgcagcgtagagatggtaaagcagttactgaagtagatactcttcctggtatgtcaggtatgagtgatatggatgacgtccgttactttagaacagcgttatacatggcattgcgagttcctctttcgcgcatgccagatgcaaataatcaaggtggtgtgcagtttgatgctggcacagcaattactcgcgatgagcttgattttgctaaatttattcgtagattacagcataaattcgaagagattatgcttgatccacttcgcactaatctaattcttaaaaaagttttgtctaaagatgagtgggaagacgaaataaataatattaagattgtgttccataaagattcatatttcaccgagttgaaagatgctgaagttatggagcgtagaatcaatatgctcacaatggctgaaccgtttatcggcaagtatatttctcataagacagcaatgaaagatttccttcagatgtctgacgaagaaattgaacaagaagccaagcaaattgaattagagtctaaagaggctcgcttccaagaccaagaaaatgaagaggatttctaatggaaaattatatttccgcaattgaatccagagacctcgtagcagccaaaaaagcttttggtgcaattatggctgaacggacatctggtttaattgaagagcgcaaaaaatttatcgcagcgtctgtcatgattgagggtgaagagcccgttgacgatgaagatgaagacgacgaagatgaagataagtctgagaaagacgacgacgaagaggacgagtaatgcttatactgcctgaaaatcatgaattagttatcgacgctgtcgaagcttttcttcctgaagcacaggcacgttttgataagttgtccgcagcgctttctaaagatgatataaataaaattgtagagaacatggttacttctgagcctgatttagcaattgctttaggttcaattaacgaatctctacaattaaatgaatttatcgttaagcacgttgattctaaaggtactattacacgtactaaggatcgtaaaacacgtgagcgtaacgcgttccaaacaaccggactttctaaagctaaacgccgccaaatcgcgcgtaaagcagtaaaatcaaaacgtgctaatccatctgctcaaattcgtggattacgtaaacgtaagaaagcacttaaacgccgtcaggctctggggctaagttaatggaaaacctcaatgaacaacttttaattgagcattggggtcaaccgggcgatgtaattgatggtaaacccatgctggaatctattatcgttgaaggcgaaaatgaatctggcttaaaacctggtctgtatatcgaaggtgtttttatgcaggcagaagtagtaaaccgtaataaacgtctttatccaaaacgcattcttgagactgcggtaagccgttatattaaggaacaggttgctactcgtcaggctctaggagaattaaaccatccacctcgtgcaaatgttgacccgatgcaagccgcaatcattatcgaagatatgtggtggaaaggcaacgatgtttatgggcgagcaagaatcatcgaaggagaccacggtccaggtgataaattagccgctaacattcgtgctggttggattcctggtgtatcaagccgcgggctcggttctttgaaagactcaggaaaaggatataacatcgtacaagaaggctttcgcctgactgttggtgtagacgcagtttggggtcctagtgctccggatgcatgggtacaaccgaaacaaatttcggaaaatacctcggcacaagttgccaatagtgctgatgatgcttttatggctctcgcagagaagttaaaagcgttataaataattatgtaacttaacacaggacatcaaaaatgcttaaagaacttttaatgaccgaagctaaaactatcgatgcttccgtcgctcttgacagtattttcgaatcagttcagctttctccggaagctaaagctaacttcagcactgtattcgaagcaacagtcaaaaaacacgccgtagctctggcagaatctcatattgaaaagattgctgagaaagcagaagaaaaagttgaagaagaaaaagaaaaagctaaagaagaagctcgcgaagagctgaaagaagctgcttctaaatactttgaccatatcgctgcagaatggatggcagaaaaccagctggcggttgaccgcggtattaaagctgacctgtttgaatccatgtttgtcggtatgaaagagctgtttgttgagcacaacgttgtaattcctgaagaatcagtagacgtagtagctgagatggaagaagaacttgctgagcaaaaagcagaaactgctcgtttatttgaagaagtttctaagcgcgatgagtatatcaattatgcccaacgtgagtatgctatccaagaagcaacccgtgaactgactgatacccaaaaagagaaagtagtttctctgacagagggtatggattattctgactcgttttcaactaagctgaaagctattgttgaaatggtgcagggttctgtagagcagtctgtaacggaatctgccgatataaatactatcgacaaagaagcagacggtttaaacttcacaactgaagcagtcgaagaaactcctgcgactaaaaccccatccgttatggatgcttatgtagcccaagcggctcgtctttcttaatttaaaaggttatacaacacatgaaaaagaataaacttatcgaaaaatggcagccgctgcttgagaacgaagctctgccggaaattgttggcgctagcaaaaaagctctgatcgctaagatttttgaaaaccaggaagctgatattaatcaggctccggaataccgcgatgaaaaaatcgctgaagcatttggttctttcctgtctgaagcagaaattggcggtgaccacggttatgatgcacagaacatcgcagctggtcagacctctggtgctgtaacccagattggcccggcagttatgggtatggttcgtcgtgctatccctaacctgattgctttcgatatctgtggtgtacagccgatgtctaacccaaccggtcaggtattcgctctccgcgctgtttacggcaaagacccgctggctgctggtgctaaagaagctttccatccgatgtacgctccggatgcaatgttctctggtcagggtgcaaccgagaagttcgaagcagttaaagccggtgatgctctgactgttggtgatatcgttgttcacgatttcgcacagaccggtcgtgctcatctgcaggttgttgaagatttcactgtagacgctggcgctactgatgctgctaaactggacgctgcagtaactgccgctctggaagctggtaaagttgtagaaatcgccgaaggtatggctacttctgttgctgaactgcaagaagcctttaatggttctaaagataacccgtggaatgaaatgggcttccgtatcgataaacaaactatcgaagcgaaatctcgtcagctgaaagcacagtattccatcgaactggctcaggacctccgtgctgttcatggtatggacgctgatgctgaattgagttcaatcctggctaccgaaattatgctggaaatcaaccgtgaagttgttgactggattaactactccgctcaggttggtaaatctggtatgacccagaccgttggttctaaagctggtgtattcgacttccaagacccgattgatatccgcggtgctcgttgggcaggtgaaagctttaaagctctgctgttccagattgacaaagaatccgctgaaatcgctcgtcagaccggtcgcggtgaaggtaacttcattatcgcttcccgtaacgtagttaacgtactggcagctgttgataccaacgtatctccggcagctcagggtctgggtcgtggttataataccgacaccactaaagcagtatttgctggtgttctgggtggtcgctaccgtgtatacatcgaccagtatgctcgtcaggattacttcaccatcggttataaaggtgctaacgaaatggatgctggtatctactatgctccgtatgttgcactgaccccgctgcgtggttccgatccgaagaacttccaaccggtcatggggttcaaaacccgttacggtatcggtattaacccgttcgccgattctgctgctcaacagccgaaaggtcgtattacctctggtatgccttctatcgtcaactctgttggtaagaatgcttacttccgtcgtgtatgggttaaaggtatctaataccaataagggagccttcgggctccctttagttgttttaatggatataaataaacttataaatccacagaggaaagcgcaatggctaaaatcaacgaacttctgcgcgagtcaactacaacgagtagcaacttaattggtcgccctaatctcgttgcattaacgcgcgcaaccactaaattaatctataccgatcttgttgctacacagcgtactaaacagcctgtagcagcactgtatggtattaaatatcttaaccctaatggtgacctgacgtttaatacgggtgcaacttatgcaggtcaaatcggggcgccagaacgtgagtcaattgaagaactcactatggcaaataaagactcattcaataaagacgatatgttcaaataccagaatgtggtctttaaagtacttaaagatagcccgtttaccgatacagcagaaaccgatgaatttggaattgtatctgaagcagtagcagctaataatattcgtatgatgtcagatgctgcagtcactgaaaaattcgaaggacctgattcagacccaatcaccgaagccagttttaaaattgataaatggcagacccaggttaaatcgcgtaagcttaaaacggatttaactgtagaattagctcaagacttagaagctaacgggttcgatgctccagagcttattgatgatttacttgctactgaaatggcagaagacattaataaagacatcctgcaatcattgattacggtttcttctcggtttaaagtagctggtgtatccgataaaggtgtattagatttaactaagcaggattctgccccggaacaaggtcgtactctgtatcgtttcatttgtgaaatgaattcagcagttcaacgtaatacttcttattctggcacctacgcagtagcatctactcgttgtgcagcggtactggcagcttctggttggttaatgcagaagaacgatgggactattccagaaaacgcatatggcattctgaataacggccttccactgtattgtgatactaacagtccgattgattacgttattgttggtgttaaggcagaatttggtgggaaggaaactgtaggttcattattctatgcgccgtataccgaaggtcttgatttagacgaccctgagcatgttggtgcatttaaagttattgttgacccagctagcttgcagccttctgtagctttactggttcgttacgcgctgtcggttaacccatatactgtaggattggacgaggacgaagctcgtgtgattaatgctgcggatatggataagatggcaggaagaagtcagatgtctgttatgctcggtgttaagttacctaagctgattgcggactaatttatgggagccttcgggctccctttttgctataaactaaatatgtcaaacttcggagagtattcctcctcgagggatttaaacactttcttatcgtatagattaacacattctatcccgtgcctgcgagctatatcaacagctactctcgtccctccagatacactcccgcatcttttctcaggcgcccaatataataccttatctacaggctcagtgcattctaggcccaatacctgcatagaattccgtgcgaataaagtctgcactatcttcgagcattcatcccagtacgacgtaacttctctcgccttaatgatgcttttgattttggcttcgtttgataattcagaccatacaacaacacctgtaccaggaacatggccacaaaagccagaataaggaataatcctacaagaatttgacctatcgtatttcgccaaccacgcttcatctgaacctggagctccacctgaatatgaaaaatgcccctcttccgagaggcgttgacctattgtagtcattagactcagaactctgcgtggcgcttctcgtgaaccaataagcgccaatctcattattctacaacctcatgccatttactacgaatagtattttgaatcaaagtagtgatttctttcttaaccgcagaaggattatcagcgaataacatatcatgaccttcacgtgctgcttcgttaatgatatctttcatagtcagacccataacacgaccgaaatctttagcagttacagtaccaatatgagacagaacgttacttacgcggttccaggttacatattcggaaaagatttccagaacacgcttatcattctcggtgagttcaaccttcgctttaataggcttatcggatttagccttctcgctgaacttagagttcttacacttaatagcaacacgagtaccattattgaagaacttaggatgaaccggcttaagaacatagccttcagctacgccagtttcagaagaagcctgtgggccgaacacatgtttatttgcatgttcaaggtcagtcgtgtcaacaagctcattatagtaattgacaatagatttaaagtcattcacatactgagatagctcggcaaatgaacctcgaccaagaagtggagctaatttaagaccaagaccagtagcaaacgattctactacataatcgtcccaataaactttttcgttaccggaatccgacaggatatcaaatacgtagaaatctttctcaccataatctacgcctttctgaataccaccgccagcaaattcgccgaagatttgaacagatactaaatccatggcgttcagcatgttctgcatcttaacgaaagaatccttatacttcttcatgataatatcatgaccgaagaagctttcaccttctaaaataggaccagtacgcttagcaggaacgatttcggtaggagtaataatcacactaaagttagtgccatgaatcttctcacgagccacccactcaacagtatgcatatcaaaaccagcaccgcgaatcttctcgatgaacttaccgttgtaatgattctcgagactagaatattttgcaaacattataatttccttagaatgtgattttcataaagtcagtatcaccattacgctgggcactggtataatttgtaacaaatccttcatcatgcaaataattaagaacacttgtaatatgtttcttaactaaactgctaggatacataattaactcacgttgacccgctaaagcggttttctcaatctgggttaatacttcttcttttgctgcactcaattcttctgtagcaatattgatggctgtattagccattctatcggcaaggttcataatttttctctcaataaataatataaaaccaggagtctatcttggtcaaaatggtatcagaggatttcccctgagcccattataccacatcgatttttaaagcaattaatagccgctcggcacgaagcgatacatgatatatccgcttttagttagcatgatttcaaattgacttttgcttccaacctcaagtactaatggaatatctttatccatcagcatccaatcaatttttccataccgttcattaatcaaatccgttattttacgtgcaccacttttatagtagtaagaactctgaacagccatcattttactaacaaatttagatgcaaacaaccagacatttaccccattagcagctggcgtaaatttcttagaaagcatttcttcaaatcgttctactacaattgggtctactttaggcattttcataataacctcatgtgtttaacaagtttcttatgacgagattttataccaacgtttgttaagcgtttccgataaacgactttttctttttgcttaaactgttcgtgtgctttctcaactgagacccacaatttagcagcttccgctggagtgatatctaatgctctcgcaatttcttgaaaatctttaccactttcatgcattaagtgagcttgtagtgctttcataataacctcatctatgtgatgaagacatattaaaccagtctgtgaatagcaaaaagggagcccgaaggctcccaaatattacggatagataatacctgcttccagtgcagtacaatgaacaatgtatccatttctagattcttgtacatcgacttctggataatcatctagcattttagccagagtataccgatgcaggtaataatcgctgtcagggtcgtcgagtttccaatctttgccctcaacagtcattcgctggatttcatccattacccaccaaccacaccagatataggctgttccacggaatggtaaaggatgaatatatggaagttctccgtctggctcaggggctactcttttggtaatatttacattaccagttgtagttactgtgactgagttataatcttctgcggaaacctcaacagaaaccccaatcacttgagaccctatatcagacgtgtcaatcactaaagtactagttgaaccttcaacaggggaaccgtctttggtccatgaataagttccggatgcaccttctggagaaccgataacgtcggctttaaaagatgcatcagacccctgctcgactgtaatagattcaggagtcaaagtaactgaaacgccgctcatggtctttttagtaaaagcaacagcaatacctttagttgcagttccattattatagtctggagcagaaaccgtcacttcacaattcaatgtgtagctggtttccgttgattcagttaaggtaattgttttacccgtttggccagaaataacagaagagccgcgtttccaaacataagcaatgcttgctcctgctggcgccccagcaacgttagctgtaactacttgggattggccaatttctttagaaacagaagttgggctcaaagttaaagtaatcgcaggcatggttttgttcttaactgtcagagtagtttctgcttcagccgtttcaggatcgccttcagccggagtaacagtagcaactactttaatagtcttactgcctgcaggacccgcagcaacataattcatggctgcggtaacagaagattgttttacgccgtttacggtccacacaaatgattctgtgcctgcagccgcggctccagaagttgttgcagtaaaattggttgttgctccaatgactgccgaagcagccaaaggagcaatagatacgctataagccataggtgttccttattttaaagttacaaatgaagaattacgtgtttcacgaatcataacagacccgtttcttttgatgtaataaattaaactaaacagtgtctggtgtgctgatgggtgttcaaacgacgttggccgagatttccaatctgggttatctttaatccattggtaaatccaccatggaagagtaatatatcctgggttcttacctagcaattgcatatttggactaaagttttcaggaagctcaatgatttcgtctgttttaataattttaactactttgtccattgctttgaaaaattcttcggggtccgtgatactaaccggaatattggtaacttgtccttcatcatctatatgaataacgctgtctccaataggagcttcagcataaaatcctttatcattgatagaaggtgtttttacttcaaaccctgggtcatttaccttaggggtttctttatagaaacctgggtcaatatcatgaattttaataccaacattaactggagcgtcaaacagtagttttgcctcatcagacgcttcatctttaaatactgctttaccctcaatttcatcatctgcttgaattaaatcagcaattgacagcccatcattatcttctggcataggctcatcggccaatttagccagttctttttctaagtcagcaaccatgttgtcaaatgaacgagttttcttcagtttaataccgaaagtctgggcatattcgtcgagcttgtctttagcttcttttttatcgagtgcctgaatttctttaatatagtctttatctagcattgggtgtgcctcatgtaatgtataaatatgattgtatttataaactgaggatagtacagtgcacgacatccaagtcaaatttaaagattttagtcatgttcatattgagtgtgatgactcgattttctatgaactcagagactattttagcttcgaagccgatggatacagattcaacccgaaatatcgctatggacattgggatggacgaattcgtctgctagattataatcgtctcttaccgtttggtcttgttggccaaattagaaaattcgctgaccaattcggatataaggtttatttcgatccagctatattcgagcaagaaactctttcgcgggaggattttgataattggttgtcaactaaagaaatttattcaggattaactaagattgaacctcactggtatcagaaagatgctgtatatgaaggtctagttaatcgacgtagaattcttaatcttccaacatctgctggtaagtctcttatccaggcattacttgctcgatattatgtagaaaattacgaaggcaaggttcttatcatcgttcctactactgcgttagttgaccagatgattgatgatttttgtgactatcgtttatttcctcgtaatgctatgctgggtattcgaggtggtactgctcgtgattcgaatgcattagtttatgtatctacctggcagaccgctgttaagcagcctaaagaatggttttctcaattcggcatgatgatgaatgatgaatgccatcttgcaacgggtaagtcaatttcaacaatcattgcaggtcttacaaattgcatgtttaagtacggactgtctggttctcttaaagacggcaaagctaatatcatgcaatatgttggtatgtttggtgaaatcttccgtccagtatcaacttctaagttaatggaagacggacaagtaactgagcttaaaattaatacaatcttcttaagatatccagatgcagccgcaaatgctttaaaaggaaaaacgtatcaagaagaaattaaattcatcaccaatgttaagaaaagaaatcgttggattgctaatcttgctactaaacttgcagcgcgtgacgaaaatgcctttgtgatgtttaaacatgtagctcatggtaaagagctattcgagatgattaaagctgctggtcatgagcatgtctattatgtgtcaggcgaagttaataccgaaacacgtaatgctttaaaggctatggcagaaaacggaaagggaattattatcgtcgcaagttacggtgtattttctaccggtatttctgttaaaaacctgcatcatgtaattttagcccatccagttaaatcgaagattatcgtactccaaactattggtcgtgttcttcgtaagcataaagataaatctttggctacagtgtgggatatcattgatgacctgggtgtaaagccgaagtcagccaatgctaaaaagaaatacacacatttaaactattgcttaaaacatgcattagagcgtattcaacgatatgctgatgaaaaatttaactacgtaatgaaaacggtaaatctatgattaaatttgaagatatttacgaagccacaattcgtgaggctactatcgataacttcatgagtaaaattaatgcttgccagaccttagatggtctggaagaactcgagaagtattacgataagcgctctaaagaaactactcttgctgattctgatgatatcattgtgcgtgatgctttggcggggcgtagacaagctcttgaagctgattctgaagatgaagacgacgaagacttctgatataaaaaagccccaaccgaaaggaaggggcaaagccaattggctacatcaacactagactaaattaaaagctgcgtttcttgcaattgctcttctgtgtcttcagtgacaggcaattcaatcgcataattatagcaagctccgggatgaaccgggcctttgtctgtttggacaaccaatgcttcatcgattggtcctttacagacgacacataccgtattcgacatgattgtctccttagtttacaagtttatttattacgcgccagcttcaaactgacgaaggtcaataatatgcttaatgctaaaacctcgtgacttaatagcatccatagcatcactacagaactccaaaagaattccccaatattgcaatttagtatctacacccaagatttctttatcagcgcttaaaacagttttcatttctgatttttcatacacatccatgcatacttcaccaccaacctcgccacggccagtgtaataatccaatcgtgctttaagattttgctttttgagggcatctaatcttaacatctcttttcgacaagtcgagtgcttacgcacccatttaccatacagaacagggttattagccgcttcatactgtagtttagtctggtcgataatcaaatcattatccaattcatcctgtaattcttctaatctcattctatctccactctactgtttctttggaaggactagtaccattatactctactgctagagttagcattactacgcatctgtatgcgtatacgttctagcgtatcagggtcgtctactatagaaaactgcacggtgacaattatagcattatcgtcatataacggaagcacatcaactgatagacggttaatcctaggctcataattacgcacggcagagactatattacgctttatcgtatcaccagttaatggagtcatgttttcaaataattcgtttgtgatatcacaaccaaacgctgggtcaaatggccgagacccctttcttgtggttattattccaagaaggctatttttaaccgatcgtgctcctaccgtttttgacacatcggtatcccaagcaagtcgcatctctgggtcaaggtcagaatataatttatcaatattgctcatgacataatcttaaagaattctttaagccccttaattacatgaatgtgagaaattccgcattcacaagtaatgggaactgccaattgaacctgtggcttcaatagcatatttttgatgttaactacatcttcggttgtaatagcagaatataaatcatcgatttctgcatcatttaaatcattaaagtaaatctgctcatttccaaccacgatataatctatgcattttgatatcatcattggaatgtctgaatcgtcaaaaagattcggatacttgaactttattttaaatccctttaagtcataccagaggtcttctggaggatcgatttgcgcatgtgtataatttaatggcacaggaattttacgcccacaggtgcaattccaggtcacctcatgattaacctcgcctatactatgcgcccaaagtataactataagtaattccgattcctgtttgtttaattcagtggcattagtgcattctctgagcaatgctttaacgcattcatcgattgtaccgtttttcttcgctgcaattaaattagcgtattcttctagtgtaaaagctcggcactggatattcttgccatttattcttgtttcaaatttgtatgtgatgttcatatccactcctcttattcaaatatttataaatagtataaagaggattaccttatggccaatatagttagatgcgaattaccagatggtgtccaacgttttaagccatttacagtagaagattatagagaccttttattggttagaaacgacatgaacaccaagtctgaagaagaacaaaaacagcttatagcagaattaatggatgattattttcatgaccatcctgctgagtatcgtccttatatatttcttaaggtatttctttcaagtattggtaaaaccaaaatacctgtcagaatgaagtgcccaaaatgcggaaaatataagcagtatctttttaatcttaatcagcctccgttgacaaatccgaaagtagaggttgctggattaacgctcaagttcaaaaaacccatagaaataattgacgatacaggtaaaatgattttagataacattatatctgtgaaggattcatctggggaatacgcgtggaatgaattgagcgatagcaataaattgaccgttatcgatgctatagatgttgaaaccttggaaaagattttatcgcagatgaagccgtttaattttgagctaaaaacgtcatgctgtgataccacgacagtattaaaatatgataacattgttgatatctttaagctattgctacatcctgacgagattttcacattttaccaaattaaccatagattggtttctcaaggtaaatatgacttgaattctataatgaagatgctgcctattgagcgtggcataaccttatcgcttattgaaaaggaccttaaatcatgacaacacaaagattaggatatcctaatataagcataaaattatattctggatatgatgcgtggctagctaatagattcgttgaattagcagctacatttattacattaacaatgagagattcattacgcgggactaacgaaggcctacttcagttttatgactcgaaaaatatgcacacgcgtatgaacggtgatgaactagttcaaatatctgttgcaaacagtaacacatcgagaacacaaacccgaatttatgggattaaacactttacagttggtgttgatgataaaggcgatagcattatcacccttcagcttggaacactgcatgacataatgaatctcaagttcagcagagcgttttttagttctgcgtatgaaactataaaagaaatgataggtgcaatgtatgttgaccaaccattgattgctcctcctatcaacggaattaacgcttacgtcccacgggttccctggactagtaccctcaaagattacttacgatatgttagaaatgtaggcatttctacagacaacgatcaatttatttttgcgtgggaagatatcaccggaattaacatgatggattatgaatcaatgatatcccaggatccaaatgtattcatgttcggggctcctcaaacaataggtcagtttgctgcaggattaaaatatccattagcatgggattttgaatggcttgttaaatcaaacagatataatagaaatcccatgaaaaacgcaacattttatgcacactcgtttgtggacaaagatgttacccgaattattaatggagaaggccaaaacagcgtattcattaataggtcaggaggatattctgacatgatttttaggaatggctatgaagaagcactacgcatttctacgatggctcaatatgacgggtatgctcaaactaagtgttacggtaattttgaactaactccaggaatgaaaatcaactttgttgatttaaaggaccagttcagaactgacttttatatagatgaagttatccatgaaatatcaaataacacatctataactaacttatatatgttcacaaatggctctgcccttgaacctgtagatttgattaaggtgaaaaatgaacttaaacgtgattcttcctattaagaaaatagtaataaatgaaaagacgatatcaattccaaaactggggttaaagcaccataatctgatgaaagatgttaagggtccagatgaaaacatgaatcttcttttggattcaatttgtccaggattaacagcagccgaatctgatattgttgtattacatttattagcatttaacaacagaataaaagaaactgttgttaaagatgattttacctacgatttgaataaggtttacatttgccagcgattaactcaaaggttagatggtaaagaattcaaattcagagctcctcctcgttattccaaactaggttcagtagattcaattttgagcgaatttcttgaatcagtagatggaaaaccaatggatataaactttatgaagcttccagcttttgtgacaaagtgggctgatgacttagtaaacactatagccattgatggacctgaaggaccaatcaaaggcatgcttaacgtaatggaaatatttgaatgactaagaaatcagaaatgaattcaatgcgtagaagagttattgctgactcggctccacagaaaaaggctgagtctcaagctgatgctcaaattaatacgctagaagatattggtcgtcgtttagacgaccaacaagcatctactgatttaatttcggatgtaatagaaactaaatcaaacgaaattatcaaatcagtagaagatgtttcagctggtgtcgaattgaccgcagaagcttctgagcgcacaactgatgcagtatcaaaacttaatgatactgcatcattaattaatgataagctcacgaaacttgccgacttgttatctaaaaagcatgatgttcagcaagatgtccaaaagactggtactggaacatcattagaaacgataacagaacaagtcccggatgctcctactcagcagccgctagaggaattactcgaaagacttattcctcctcaggatggcagacgtcctgacgcggatttctttcctagcacagaagagcaagaggaaaaagctgagcctaaaaaggaaactgaggacaagaataaaaagtttcttgacctaaaatttggagaattaattaaaagcgttaaatctggttttggaaaaactatttcattaacagataaaattagcagtatgctgtttagttatactgttagcgctttggcccaaatggcgaaaactgccgccatggttttgggtgtgataatgcttatagatttaattaaagttcattttaattattggactaaattattcgaaaagaactttgttgaatttaacaagcaggctaaagaatggggtccgctattaactgcaataagcgagatgtcgaatgaaatagtaaaatcattcgtcaaaggagattggggcggattagcaaaagccattggctcgggtttggttgatgtaattgataagctcggagaaaccattatgctcggaatgagtaagcttcttgctggaatgttacgcgcattaggatttaacgattcggcagataacattgaaggcgctgctttagacagatttcaaactgttactggagcagaactcgatgaagaagatgctaaaatgagagcaaaatatgttgaccgtcaagaaagagaatatgacgaacaacctgaatggaaaagaaagctttctgctaagttccaaaaattcaccgggcagattgatgacgatgaatataacaaactgctgagcggagagaaaaagcagtcagcgtatgcagacttgccagaagacgaacgcctcaaaatcatcacagctcgtaataatgctgaagcagaaatgaagagaacaaaagcgtatgtagaaaaaactgacgcatctgattccactcgattagactctgctaaggatgcagtacaaagcacaaccaccagatataaagaattggagaaattatctccagaagttgcaaaagatttaaaggttgaattagaccaattgcaaaagcttcttgattctaaaatatcagaacctgctccaactgccgaagctatacctgcagcagaacaacctgaggttaaacagtctgcttctattaaagccgccgcggatagtcgtgaagctgctcgtacacgtgaatctaatacacagtcacaacctatccaggttaatactgctgtaaataagaatagcacacatgtttatagaatgcctccacagacttcgacagctgctcctggaatgcaaggcgctatgaaaacctcttaaggaaaaataatgatttttgaagaactggccgatggccttgaaaacatcaaaaaatcaggaactcgaatttcccaaggtaaatctaaactgacgaatgcgccaaccactaaggtggcgcagttcccagctgaacgttcagctgggaatgattccgcccaagatatgagagtacatgacttatatcgcaatgggttattattcacagcatatgattttaaaggaagaactactcctgatttgcgttcatttagacgagatgtaatgttatcgtctgtattcgattcaccaatgtcagcattggctaattcatcaagttctaccactagtactgcaccagtagctaatattctattaccgcggtctaagtcagacgttgattcagttagccataaatttaatgatgttggtgattctcttgttactcgcggcggcggtactgctaccggtgtattaagcaacgtggcttctactgcggtgtttgggtcgatagagtctttaacgcagggattaatggctgataacggtgaacagatttataacacagctcgtagtatgtatgccggacccgacaacagaacgaaagtgtttacttgggatttaactcctaggtctgcagatgaccttatacaaattattcgcatctatgaaatttttaactactattcttacggtgtgacgggaaattcatcatacgcaaaagaagttaaagctgctattgatgaatggtataaaggaactcttaaatccgcagctccagatggggctaaagtagaaaacacggtgtttgagcaaataacatcgtttttaagcaatgttattgtagtttctaacccaacgatttggactgttcgtaattttggatattctacatcaatggatggtagagaggatatatttggtccatgccaaattcagagtatccgctttgataaaacgccgaacggacatttcaatggtttagcaattgctcctaaccttccaagcacatttacgcttgaaattactatgcgtgaaatacttactcttaatagagggaacgtttatatcggaggtattgaataatgtttactctcgaagaatttaagagtcaagcggctgacatcgatttccagagaactaacatgttctctgttgtattcgctactgtaccctctagtaaaacccaggctcttctaaacgactttggtggagagctgtataataatatgggtttagatggaaattggcttggattgaccccaggtgaattcaatcagggtataacaactatagtgacacaaggaactcggcaagttgttcgtaaatcaggtgtgaatacatttatgattggcgcaatgactcaacgtgtggtgcagtcattattaggagaatttacggtaggtacttatctgctcgatttctttaatatggcatttccaacagcaggattgatggtttattctgctaaaataccagagaacagattatcatatgaaatggataagttccataacgctcctaatataaaaatcacaggaagagatatggaaccgctggttctttcatttaggatggacccagaagcaagcaactaccgggcaatgcaagattgggtaaatgctgttgaagacccagtgactggtctgcgaggattgccacaagacgtagaatgtgatatccaagttaaccttcatgctagaaatggattaccacatactgtatgcttgttctcaggggctatgcctgtagcgtgtggagctcccgaatttacatatgatggagaaaacacgatagcagtgtttgatgtcacgtttgcttaccgtagcatgcaaacgggttcggttggaaaacaagctgctatggattggttggaagataaggctattcagaaaattgagacgattaatccaaatcagggcttgagtgcgtctgcttcaagattgtctcgtttaggcggggctggtggtggaatttctaatatcactactacaacaagtagaataatttaggggccgtaaggcccctttgttttatgcaatgcagccaataaaccctggctcagtgcgaagaagtttcatttcgtttgtggtccaaactactttaacaggaatgataccttctgcctttccattaagaacggcttctacaaacgatggctctgttggcttacggaagatatcttgaataagaaccgtcggagtaccttcgttaaacccttcaagcatgataagaacttcttcattgaacttctctgcatctttaacatcagcagaccattcaataccgttaaagcgaaatacgtgtttcatatcaatttcctcattggtttgtgtaagtctatagtatcacgtccttgtgataagtaaacaactttatgcaagtttttctgggataccatccaggttgatagcaccagccagtagctccatggtacgcgtgtagctaaccttatctgtagaacggtctggcgaaaagtaaatctcatttaaaaagcctttgaacttgctttcttcaagaggttccactttgccctgttccatcaagatgtcaccatcatagagatgaaccgattcatcgatttgctctggcggaactaccgtcatttctaccatgaatgtcttgttattcgctacaccaactccatttctaaaaggagttccccatactttgttgactttcattgccaacccgcgaggaagaataacttcagcctcatcgctaaagcttgacaagacacccgggataactaccttaactttatcggccccatggataacgaatccaaacttaaactcatcgccataggcaacttcctcgcctctatcaactctttccaagttgtctgttccaataacagaagatactgcatctatagttgtttctttgttttctaaatcagaactaggtgcgtctggcattaatgaatcaccagcatttgaataagcaccaaagataattggacttaacgaagtagaaacatagttctggaaataaaacattttagactcaatgttatctttaaagtcttcatattttcctcgctgaccacgatacaaaagagtgcctggttcaagacgcaaacctttttcaaaggcagaatcgagcggacgaattttcttgtcaataattggatcgcctaagctttccatgccaataagatagttattaacaaatgaataaccagaaccacagtaatggtgtattgcatctctttcttcttcgcttaaacgagaatgcatttcacggttatattcaattgctttggatatagaatcgccaacaattgacacataagcggatatcatataattgacaagattttggtattgacgtaaagctccgaaatcgtcagctggaggcatatcaaatccacgagtagctacttcaacgattttacgcattgtttccatagatgcaggatttttagcttgagcaataacgtcagcaacgtctgaaattcgttgttcagcgattttcattttgtctgaccccgaaggaatgaaaaccttccagtcgtcatgcattctcgacatttggcctacaaataatctctcaactgcatcgccaaaattacttccatatccgccacgaacacgatagtgcttgatatcatcaacataaaaaggaattgatttttctaatccggctttgatatctttttggaggtctaccgtatcgccttctgcgctaagaaccggtgtgttagtagttaattcgtaccaacgttcgcgtttattttctggccaatcttcatcaacatatgaaacaaatttgccgtactgtgctcggattaaatcttttcgagacactttcattttactcattacagcgagttcagatttcttgtcttctttttcgccaatggaattagccaatgcttcggctttggtaacgttttcgccggtttctttagacacataaacttcgcctactttggaatctactttggtgtaaagttcttctgaaatttcaggaattccttcaatctcttcaagtttcttacctttacgaaccataatagaataagcatacttacctttgtagtaagccatatctttcattagattgaaacgaccgccggtgcgagtagtaatcaaccgagcaagaatgcgttgaatggctttatcctgtccttgcattttcttcggattaaagcggaacattaccgcatcagctttaatttgcttaactactttgttgacggtctcaaaaatggtattgatagcaccaatcgggtcttggcctaaaccacctttaagcgccccgatgttacctttttccgacacagagaaaacatagacctggatgaatttatcacccatcttgatgttcttaactgcatcaccttgacctgacccttgtactaaccgaatcattaaattgttattacccggcaccttaatcaaaaagacctgtggtaccttaagttttggcttaacgttctcgacgggatagattttactattctcttcatcgaaaacttcatttaaaagttccatgacatatcctcgtttgtttattctatttatacgaaaaaaggcccgaaggccttaattaattattgttactgtacgccaaacttgtagtccatttacagactcatactcttcaatgttttctttgaagtttcttaatgtgttaatgttattaaactcaataacttctgtgtgaacagaaataccaccacgtccgtcaagagatttagcaatcacttcgtataaagctttcattttattcctgttgcctcagtaaagttaacaccaaacgcggcttcgaatgtattagccacttctttatcatatctacgctgtttaatgataggtaagaataatcctactgtaccatcatcacgaccttcagcagttacccaaccattacattcaagttcccagatagttcctggaagagaatctctgtttttccatagatgagtacgatcaagttcatgtaattcttcgggcttatctttaagacctgacccagcgttaacacgaatacgaccacattctgatacgaacattaagccgcccattttaccaggttgttttctatgctcgtacgaaccgacacatttcaaatctacagtgataacctctttaaatttaacgaggttcttagaacgcttatcttcccaataagcaccgatattcttaaggataataccttcgagaccttggtctacgtatgtcttatagatagcccgagcttcatggatgttatgtacgacatggttttcaattagaataaccttgtcatagcctttgctcatcatttccaatgcacggaagcgtacatcataagcaaatccaggaactttaccttcggaatatactacatcaagcggaacataatcccaaacttggaatctcataccttccgcttcttcggcagatattgttcctttaatagccttattagccaatccgtttgattccgtgcgagccgtctgttggaattccttagctttacttaactcaggaagctcaggctctttaaacatatcaaacaggtcgttttcttcttctttcacttcgacatgatataccaactcgccgtcaatcatcacaccgttaggatggcgttctcgggcttctttggtcatctcgataagttgacgcttaagtttatctagacccaggtattcattaccggaacgagtaagaagagtcacatcatctaaatcatctccgcggatttcagcgaagcatcgggctccatcagctttaagttgtgcgaatgcagggaacttaatatatgacagcgctttctcagagtaggctgatgctaacatctgtggcatctcaggaattaatttcttccataccttattagcaatagaacctgaagcgccgcaacgcatatctttaagaagaacccgtaccagtacactagcatcaccctcattcatcttagagagcaaatctactagcccctggattgccatattaccagtaagtactcgtgctgccagaatgtcttggaggtaatctagaccatctgaaaacgtctttgaaggaacatttggatatttaacgggagtatattctggaactttcttaataaagaatttaaatcgcccggaatacgccagcagataagctcgctttaaatcaacgttatctttattgtcaatgagaatttgggttttggctttagaacccttagcatcttcaattgctttgatgatatcaaaaatcattattcacctaattcttttgaaagttcgcttacgctacgatgataagttaatccatcgatataaacaaacccgttattgatgcattcattccaaatcgggcacgactttgcttcacgccaaattggattccaacgataaaactgattaacatgaccgtaatcacatgataaccagcgtttaccaaccttagtatgaactacaaacatatttcctcctagggtatggcaattataccatacccagagtgttagcaattaatttggtgattatcacatgtaatacgaccattattccaccagtcgtttccaggaggaacatgcggaccaggactaaacggaatgataggttgtttccaccaatctcctggaacttgtcgtggaggccaattaaaaggatgttgctctttacgaatttggtctttgatagcttcttcccacaatccagaaagagacttctgcggtttcttaacgaatttcagagattccaggcaagttacaatttgatgccaatcttcaaccataattccaggagcagtcactgaaccttctcgctcaccacgaggcatataaaacacacgggtttcagtgtcttcaaagactttgctagctgcagcaatgtgtttaggcaaatcatctacatagcaaacgatgcgatcgccgtattttactttagccttttccagtaaagcatctttagattcatcataatcgcagaccatgatttctgtaaatgcatcagggaacaaagcattcagattgaaacgacgattaaggttagcatctactgagttgccaagagccgtgatagcgacaaaatcgtatttttctttgagcttattaactgtagctaaagcatcagcatacggagcaagataacgaataaaatcactgttgttgtacttcagaagcagcttaacagctagttcttcttcacaatcaaacagctcagcgggtttaatgaatttttcagtagtcatcatatcaaggatatgctctacaggaaggttatatttttgggcaaagtaaggcagaccactttgccacttaacgatgattccatcaacatcggttgcgattactggctttgacattcggggaaattcctcaatgcttgtttaaatttggcaacgctatttgcggcaccggtgaaattgaaccagattaaccctggagcgtccgagggttctatatcaattaattctatattataatactcagcagtctttagcatttccctggtgatacgtcgggcaaccatatgaccgaagtgaggattaatagacatcgtcgttagcagcccttaattgagtaattggataaagctcagattctgcatggattgaacgattaccatcaacccaattaacttcataccaaggttcaaccgagtaggctttaatggctggagccgtatcacatacaactccaggaattccatttgctaatcttactgtactgaagatatgatatttcatgcatcaagtctcactgcccattcgggcaattcaaagaaatccggagcatcaatttcatactcaacggtgtgttgtttaacatcagctgacatgatatcaaccattgggtggtttttcaaactgcaagaaaaaataccagctttaggtttaggcacggatacaatcatgttgatttcctcaaaatttagttatgaatttttctttcggcattttggcatttgagccatcactgtcagaatacccaattggcatagttgcattaatgaattcaattttagcatttataacattaatgctcagagaatctacgccatcaaccatacgaaattcaggagggcaatacctatcaatgtatgctttcacaccatttttattagcaggtgtaccatcgcgagtatcgctgataatggtttcaacttttttctttcgtgaatcatagaaagctgatacaatcatttcaatttcctcttaaaacggacgaatattaacgtgaactacagggatagcaaaaggctgcatgattacaacttttgtgtctttagttgcattcaggcgttgtacttttgcaagattaacagcttcttcctttgttaatccgccattgtaggtatcatttcctttatttgaggtccaaacaccccaatcattgcttccatcatcgtcggtcttcggttcatgttctttgtagatggtttcttcaaaataatgctgaaactcttgattagtaagaatacaccacatgtgagaaaagcgaacttcatctacactaacgcgtttatattccccatctggcttaatgatttcaaattcaactaatccggtattttccgcatatttaaaggttctggtaattttaatcgggttattaccgatttgctcaaaaacacccttgataagagcgcctggagacaagattggagtctttttaagcttatagaatttacctttttccattatcatttcctcaatagtggggccgaagccccgagttagttaaaacttgatttcgtttgaaacgatatcccagattgcttcacgttgttcttcggttgttttacgaccgaggatgtggcgcagataaattttaacaagcagctgacgatttgtgttccaagacggatgtgaagataaatcacgtttacgaacttcatcatggaatccaactttgatttcagaaccgttgaactgaatatccaaagtaggaccattttcaaagctgaagaatacgtagttatcttcccagtacatatcgatttgagctactgtgccattgttgtgttcccacagcaaagtagtagaaacgtcccaagcattgttctgtacgtatttgcggttgaagttagtgaagttcatttttattctccgtagtttgtttatctgtttgggtggtacaggtctatagtaacccagaccacccaagaagtaaacaacttttattcaaaaacttcagacatttttaacctctacagttttaacagtttttacttctgcaaatccgatgcttttaaacagttcatacttggtagtttctggaacgatatcggttagctcaaggatgatttcttttgcttcctttaaagcgaagacgctacgcccgtctttaaccactggagtaggtttaacgaacgttgatgggatttcaaaaactgcatagcggtcatcagagctttgattttcaaacgctcctatttgcacaacccgtccttcttctaactcgtgagaagaaaataagcatgacagagaccggtcatattcatctcctatggtttttgccgaaatgattttaccagtttcggttttaatcttaacaacccggcccagcgaatcaagttctaacggcgtccagccttgaactccaacaacagtggcaatgagatagttaattgtgttcttagcgtctttccatctacggtaagtttctggggaaatgcaatatactcggttttcgctgtaattcattttgatatcctcaaagatggggccgaagccccgttcaattaacagataaaagtccagtgagttaaatcaacaacacctttagctttcattttttcaattaggtcgtcagccacttgacgaccgttttcataccaagttacatcttctgagtaaccgtcttcttcatctgtgtaagtttcagaacgaatacgaccaacaactggagtgttcagaacatatacagaacctgtgaaccaattggttagcgtgatatgccagcagaaatcatctgatggaccgtccggtgtcatgcatggaacgatatcaccttgaactttagacaaaatccacattttctcgtggacagtctgagctttataaccgtcatggtctttagtcttgatagttgcattcaggttgatggtattcattttattctccgttgtatctgtttgggtggtacaggtctatagtaaccttgttgagcctagaagtaaacaacttttttcattctgcggaaaataaaaaagggactcccgaaggagtccctgaacttatgctttcggcttaccaaaacgagaagcatcatcgcgaagaaccgcacgagcccgacgcatgattttctcaaccgtctgattgatacgcttgttcgacccacgcttgtagccagcgcgtttagaggtaccaacaacttcttttactgcagtttttgctttagcttgtttagccattttatcatcttccattttggagaaatacatgggagcacgttcttccgaggttcaacttctttcgacagttctttcggttgtagctcccgcaagccctcaaagggtacgtttaaactcttatctgttgcacaccgttagcttaaaggttccgggtccgatttctcggggataagatatacaccgatggatgtataggccttgaggcgtactcccgattggccatcgcctcggggtagcatgcacttgccgtttattttctagctgcactttggtagcaaatcaccgatggtttcggatgttttacgtggggataaccaacaacgtccacatcatacgttacccatgcgtacacatggtgggcgtacaaattacttcagcgttaccacaaagtggcgaacagctttgcgagcagcagaaccaagatgcttagcatacttcagttcatccatcgcttctaaagtatcacgaaattcagcttgagctgggttcagatgtttaaaacctttcagaacttccagtgcttctgcatagatatcgattgaagcaccgtagttttcgtgaccggaattccatgcattacgttggagttccagagctttagtaagttgtttgttcattgaatcgttcctcaaatgaggttaaaatttggtggacggtaaccgaggtttagctcgggcatccaccgcgtagaattgctcgggtaactaattgtccgacgcccaattcatattattatttatatacgcatgcaagggacttataatgacaagtcacaaacttctgccgaatttctttaggtttcttcacacctgctgctactaacggatgaggtacatttctgatattaccaacaggcagtggagtcaaatcaccgacttcaacaaatcctttcggtacatcatcaccgatagaatagatttcacacatatccggcagttgtccttgttcttcttttccaagaataataccggaaggagaaacaatttcatcaccttgctgtgcaggttcagatacgagaattacatactcgcctagagctttaattggaagttccatgtgttacctttattgtttgaccatgtagttatattaacatggtcagtttaaagcaaattacttaccgatcatctgcagcagatgctcaactttcataccatttaccgagataagtttatcaaaggcaaatgagcgccaaccttctttctcggtatcatatactggaagtgaagtagtgctttctgctcgagcagatttagtagtgctttctaccaaatcagatggaataatgtctttatcacgagtacagcgcagagtacgaatagtgccatcagctttttcaaacacaatctgggattcgcccatgctcagcacagccttcagagtttcacgaatatggatgttttgttcagtagtcagtttcattttgatgtctctttaatagttttgataattacagatttgcgcttggataattcttttaataatcgaactgcttgatcttcaaatttaaatgttgctagtggtttccatttaaaccaataccggcgttctactgagtatgatataacaacatcaccacttaggttaagtttattaatttcaacaattctaagtttcattattcaattccacagaattctttaatgttataccaattcaacttatccaaattacgttttggaacattgaacacctcgattccagcagaacgaagaatatcgtcccagccgggttcgttcttgtcgtatgtttcgcagtatactaattttttaataccagactgagcgatggcttttgcacaatctggacatggagacagtgtgacatacattgttgctccatcaatactactgccgttccgggcagcaaaaagaatagcattaagctcagcatggatttcattgactttagaccatgcagagtgggctgctcgatgttctttgagcaatccgacttttttgacttgaaatccgtcttgacgcaatcccgtagatttgtaaggaatttcaccaatccaaccttgttctgctgcatggtcacaacagttcacgccgccagaaggtgaaccgttatagccagtagaaataattcgtccgttcttttcaattactgcgccgactttccacgagcagcattttgactcttgagatacgagatacgcaatttgtagtaccgtcgacgctttcatttaaatcaccagataagttgtgttatttgttttaaccaattttaactcgtcggtaggagaagcaaaactctctactcgagaagtacgaatgcctgtaccatctggaaacggatgatttcctcgttcaagaacatcggaaaagacataaccataaagaggttggccttccttaacatcaacgttactgtacaaaatagcatcatattcttcgcgcggaattgaccaaacgccttggtcagaaccaataacagcattaattagacgaataccattttggctaatttctgccctaattccacgagcatgttcaattaaaagagcttctacagcctcacgtaaagtcattagatatgtcctaaaatgttagtcatttcaacttggcctgttccggttaaagccaattgagtgtgttgattgctctttccattattaactgtaatgatataagcatcaacatagttaaaggatgactctcgtcggagagtcactttacttccaggaacccggtttgctacttcctgtgcgaagattttaaccttcgaaataaattcatcatgtgaaaatttagcgtcagacaacataagtcataacctgttgggtttcaaaattagcaataattccaacgataaaccaatcgtgttcaccttcgccacaagaaattttaacttcagatgaaccgcctgagcggtcaatagaaaatttaataacttcgccgtttggaataagtgcattcatggcagataaaaactctgcatgcattttggctacttcagatggagtaaactcatctgttaaatgattagcaacaacttgcgtaaatgatacttttactacttcggaatactttggaaacattatactttcctctaaaaatcaccgtgggctacttgccagcattcaacaccgatacgacgccacatttcaaccacctgcgccctgtcatctactgcaagttttacattataacgatcagcaattcggtcccagaagatttcttcttttaccacatcgtctttgcgtgaatcgccttgcttacgttggaagtgttcgcctgtttcgccaacatggtccaacaaccatttcttcgtaatgcgttgataaacagtagggtcttctttagtaccagactctctgccggaaacagtaagaattttatatcctttgttacgaagcattttaagaaattcaattaccatttcctttggatggtctttaccacatttggccaagtcataaggagaacgatgattgttatctgctaacgtgccgtcaagatcaaagataactgcttttggcaatgattcgtctggaatgtacaaatcatatggatgcatcttagaatagaagctacgaagcacttcaataggaactgcattcgcgccacgatagaggttacgattaagcaattcagtccaaggaacgtcaaagcgtttaatttcccacttgacaccatcaatttcgtatgccaactcttgccacttcttgatagtcgttggattaaggttagtatcagcaatgatgacacctttagtggtttccatctcgagtagagtcttcgccatagaaaactgacatacagatactgacttctcacgaagcttagaatatttgtaatcattacgtttatcaaggccaaagatgccttcacgcaaatcatcacgagacaaaacataccaacctggattagctgctacgtattcgttagcccaggttgttttaccagagcctggagccccttgtgtcaaaaccaattttttcattatacatccttaagagtgtcaataaaatcatgaagagccttagacttttcaccccaattagcacgatatttttctttaattgctcgcaatggcttattcattgacagtatatcatttttgtcataattttcagctgcgcgtccaaacacgatgcacgccaattcattttcagcaattaatcctttaagtgtttcatactgctctcggttcattataataccatcacttaacgcaacgaggttctttaaggtcagaacgataataacatatcattccattagcatctttagtatatcgtaaaatgtcattcatccagatacgatattcttgcgactcttcaaacggcataccaacccaggctttaccgtcaattacttttacttcccaatgtccttcccatttttgaattgggtctggccactcaggatgtaaaaccgggacatctggtgcactagaagagcatccagcaagtaagctgataatacccatggctaatagacttcgtttcatctggtagcctcctggatatcttctgcaaacttattgaagcttgcattaatctgtttttcaactaatccaggtttggctgcaactacgtttccacgcttagaatctttattcatcttagcgttagaagtatcacgagctgctcggttttcctgatagcctttatatgttgtctgcagattttttatagaaacaccaatgttttctatttcttttgcttgtcgatcagattcatcttggacgactttgaggtcagctttaagattttctacccgccacgaaagatatttcaatccaccggcggataacgctaacacaccaatcatcaaccaagttgtgtttattttgagcatagtttaaggataacctctacgatatcatcacgggataatcccgaaatgaggatgtgacgatcagaactttccgaaggagaacacttgaagcaagcttctacatattctgccatctcagaataattcagctcgcgatgcataatgccaagacgatgcttgccataaatcgggtcaacgattacatagcatttgcatccgttagcatgaacgtttggctgggtgatgttcttgaacacctctgcaccatacttcgcgagatgattatctaggaaatcaatcatttcatctacagcttcaggaagggcttcggcacgctgctcgttcacacgattagtgtactctttttgcttcttacgagcagcttccttgcgcgccatgtgcgtccgtaggtcagtgacgaagcccaccttcttggtaccattccacacaaaaatcccatcagaatgagtaccatatttgttaacaaccatatctaaagtaatcgcttgcatatccatttcaatatcctcatcagtttgtgtaagtctatagtatcacactctgatgaggatgtaaacaactattcttcagaaatttcaatttctttttcgtactcttttggaacatatcctgcccagtacttcaagaacaccctttcgaggtctttaagcagtttatccacatctacagttccttcgtacatgttcatgataacaccaaaaagatggcgctgattaaccgttgctttctgagcagcaatagcataatctttacgagcacgacctctgtattcatcgtagaacgactgacatagctcaagtgactttcctaggtaatctagataagcttgctcaaacgcagaaattttcttaattgcgtattcatctccagcaaaaagagaacgcaaatcgtcggaatttgcagatacgacagacgcaaacagtctttcatttgacgttattgagtctttagtgtgatgaagagcagaataccattcggttttaaccttaaatctctgcccagtgtttagaactgcaatgtacccttctacgccttcaagttcacgaacaccttcaacccaagttttggggtcagaaattccgtaagcattaattaaataaggacgaatcttagcattagcgtacaaatcatcatatttaatatactcgccagttgcgttattacggacgtttaacacaaacagctgtggctcctgatatgctaaaacaacacgattattaggtgaaacaaattccatgtttaccgtataaccatctagcgctagctcaagaataacctgatgaagcgaagaatattcttcactgttaagcaaagctgaagcttgtcttgcctggtcactgtaaagagaggtttttgatttaaggtatagatacccatcatcaacataagatgatactagagagccatcagccttatccataatgtattctacatcgctaatatcaattcccatcgttagtgggttttcattcaaattgaagaatttttccatcggacgcgaagcaattcgaattggggtatcgccatccatctcaaacatgataccgcggcactcaagagcatcgggttttaaccactcactgtaacttgcgtagtggtatgaaaacactctgaacttaccatccataggaccggtaaaatctttataaaagaattttgcaacttctgagctttcacacagattcattaaatttttatatagctctaacatttctttaccttatgtttgcaattatcgtagtgccatctgatagcaatggcctttgaagttattataccacaatgcgggcatgggctgtacaaaggctttttctttcctttttggctttctgaccgcttgagtttagtttcttcagattgtgttttaccggttaaagattttgatatcttttcgcgtgtttctttggcatgagtctttccttgagtgggacttactctgcctttcagtgctttagataaattctttctatgttcttccgttcgtttctttccggagaataagttagatgtataattagaatgctttattctagagctttcataaaatctggaatgaactttaaaattctttccagaagaattacacatcatccaaagagcataattcattttagaattattatgtatctttgataatagcaaatgggcaatgaaatgttcacgtccagtcaataaaactaaattagaaacatcgtcatttcctcctaatgattttggaatgatatgatgagcttcagtataatagtttaattttcctttatcattgcctcgtaatttaccctttgctattaggttatcatatactttaacatagttcatttagctttgttagtatgttgggtgttccatggaggattgaactttttaattagaagaggttcttccaagtccatagtggatattgacatctcgccaagttcattattaatcaaaagattaaaacactgacgagcatagaactctacttttttgccagccattagtgcttcaaaaatcttggcagatttagccgaatcagaggtttggtctttccgattaatagcagttctataataatttatacgtttacgaagatttttagtcttaccaatgtaaactagttcatcatcaactgcgatggcataaactacgtttaacttgtttgctatcagaattggtttgatggtaaaatctggttctaactcaagttgaacatattttataaaagaaaactcgttagcaatatcattcataataaagaggggccgaagcccctttccttataagtactttttaaatccaattagaacatcatcagtgacatcattgtcaatctgagctaccagataagaacttatctcaacttcctgcggagcagattggactgcatcagagttaagatattcgcgaatccaaggaataggatgacgagttggtgcatccgtgattgggcacggcagaccacagctacgcatgcgagatacagtcagatagtcaatgaagtcatgaagaattttaacgttcagacccggaagaccaccgttgcggaaaagatggatagcccaatctttttcttggcggttaacttccatgaagattttaattgcttcttgttcacactctttagcaatctcaacccattcttcgccatcagtgccagtttgaagttgacgcagaatgtactgcgtgcccttcaaatgaagttgttcatcacgagcaatgaacttcatgattttagcattaccttccatgatttccatatttttatggaagttgaaggtacacgcaaaactaacatagaaacgaatagcttctaatgcgttaataacatgtaagcaaagataaagagatttcattaaatcacgtttagcttctttaatttcgatattatcttgattaaagcagcgatttttggcattttcccatgcgcgagtcttcgctataacatcatcatagtaaacaccaattgactcagcgcgtttcatgattgcttcgtcaagaacgatttcatcaaagattttagctgggtctacatataggttacgcatgatatgcgtgtatgaacggctgtgaatagtttcactgaacgtccaagtctggttccaagtatctaggcttgggtcagaaataagcgcagataaaactgctgctggagcccgtccttgaattgaatcaagaagagattggtacttcaagttatcagtgaagatattacgttggtgttctgggagtttttcaaactgaccacggtccatcataacgttaacttcttcaggacgccaaaagaagctcaattgcttctcaatgagttcctcgaatactttatgacgctgaatatcatagcgtgcaattcctagaccagaaccaaagaacattggttcggtcatgatatctacttgcttggtattaaaaactgtactcattctatttcctattctgtggtgttaaccatccgtggtctaattataattcccttttattaaagcttacaggccgcgcagtcagcagaatcttgaatcatatcatcgttaccggaaccatcacgggtgttatgatagtaaagagtcttaccaccaaagtaccagaaataaagcaagtcgtccatcattaccgacatttcaactttgcctttagggaaattcgccgggtcgtaataagtattagcagagatgctttggtctacaaatttctgcataatcagaacctggttcagataaggcttattaccctgtttcgcgagctgccaggcataatcataaagggaagcattgtgttcaacatttggaacgacttggttgaagcttccttcttttgattctttaactgacactggtccacgtggtggttcaataccgttggtagagtttgatacctggctagacgattcgcatggcataagcgcagataacgttgaatttcggataccgtatcgcttgaggtcttctcgcaggagttcccagtcacagacatagtttggagctgcgagttggtcaattctttcgttgtaccagtcaataggcagttcaccacgtccgtatcgtgtttctttgtaaagcgtgcatggacctttttcgctagcaagtttaacagaggctttgatgagtgcatattgaatacgttccatcatttcgtgagtaatatcattagcatctgcgtatgaagcaaagttgcttgctaaccaagctgcatagttagtaatgccaacacctagtgctcgacggtctttagcttttaacgctttgtctacaggatagtcttggtaatccaaaaggttatccaaagcccttaccattacttctgcgatttcgttaacttcttcttggtcttgccagttgaagttgtcgagcacgaatgctgcgagtgtacacagcgcgatttcgccatcttcttggccaacatccgaagttggtaacgcaatttcgaggcagaggtttgattgcttaaccgtagccacatcacgaataaaaggaccatattcaccaacgttatctaccatgtacgggtaaattcgagcagtaccagcacgttcagtaaggaacaactcaaacagttcacgggctttaatacgtttctttcttacgtctgggttcttttccagctcttcgtataaagtacggaatgcttgtgcatcacggaagtattctgtatacaaagtaccaagacacacatcgggactaaacagagtgatgtaatcattcttaatcaaacgttcaatcatcaggttattaatctgaacaccataatccagatgacgaatacggttttcatctacacctttgttgttcttaagtacgaggaggttttcaacttccaagtgccagatttgatagtacaatgtcgccgcgccaccacggactccaccttgggagcaggatttaactgctgtctggaagtgtttccagaaaggaataactccagtatgtttgacttcaccgaatccaatttttgaaccctctgcgcgaatcattccagcattaataccaatacctgcacgcttactgatgtatttcgtaattgacgcagcagcttcgttaattgaattaagactatcaccaccttcaataaccacgcatgaactgaactggcgtgtcggagtacgaacaccagacataattggtgttggcaatgaaatctttttagtagaaactgcatcatagaaacgaataacgtttgctaaacggttttcgccatcatcttggtgcaagcacataccgatcaacataaaggcaaactgtggagtttcatacaattcaccagtgtgacggtcttttacgagatacttctcgataagctgcattgttccagcataagtcatagtgaaatcacgctcatgcttaatataagaatcaagcaaagtaatttcttctgcagaccacttacttagaatttctttatcgtacttatttgcgttaacacaacgtgaaatgtggtcaataaatgcaggcggttcaaactgtccataaacacgtttacggatttcaaacattgctgcattggatgctacatattgataatctggctcatcaatagaaatgctattcgctgctaccttaacgatagtcttctggatatctgcagtgctcatgccatcacgcagatgggatttaataatttcatacagctcgtatgggtctactttagttccttcgcacgcccattcgaggactttaatgattttctgcatgtcaaattcttgactaacacctgagctcttaattacttgcataagtcctctaattcaaatgtatctttaaaaagtttattcactacaagagctattatatcaccatggcaaggaagcggtttgcaggtgcatcctaatctcattcctcttaaagtttctaagtgctctcgctttatttctccgttccgaatcttagcaataaaatcgtccttaaacgctgcaatagcatcaggacgattatcgcaatctttaccgacgtaatttccccacattgttccacgttggatatttacatcgaagtcggaatggtatttattaaccacccgacatatcttcatgttatatcaacttcaaaccaacagattaattgtgttttgcctatagaccattcatatgatttaacaatagacagaaccctttgttcggtcccatcaaaaactatcttgtcattaacttcaggcaaatcgctagagaatgcatcacacatctcgcctaatactgttttagactggtgtcctttacgaacaaatcgaatattcatatcgccatctttcctgtaattgttgggtgagatttatacccaactagttcaaaatgatgaggacgtgcaaattgttctaaccaacgaacctgagaactagtctgccaagtttcatacgtatctgggaatgcaatttcaagctcacaaagttctttcggttctcgacgaagaatttctttacattgctcaatatgattcaggtaaatatgagtattaccaccagtgaataccaaatgcccaggtttaagatttgtcattttagcaatgatatgaactagtgctgcatatgacgcaatgttgaaggggaggccaaggaatacatctacagaacgctgataccattggaggtcaagatgcccctgacgaacgttaaattgatacagcaaatgacatggtggcaatgccatcttatccaaatcaaccgggttccatgcagtcacaatctgacgacggtcatatggaagttgcttgatacgatcaatgatcaatttcagttggtcaacacccatgaaatctcgccattgcttaccatacacaggtcccagttcacctccggaataccccatgtcttttgcctggttttcatagttgtcgtcccagacagttttaccttctagtaatgagtcatgctgaataagacgtaattcatgcacattagtagacccacgcatgaaccaaatcagttctgcaatacacgctttccacgcaagacgcttggtagttactgccggaaatccttcttgtaaatcaaaccggtgttgagtaccaaactttgcaatagtaccggtaccagtacggtcatcagtctcgtatccattttcaaaaatatctttaattaattcttggtattcacgcattaaatttttcctgaagaggagtaaagaaaagctggtctccacgcttttcaaatcgtccaataatagacactacatcatcgttaaccgtcacattaccgtgtgacattccgatgaacatcttcttataatcacgctcaatttcaataggtatatttccatttcggttatatactgtagttgaaccgttataagtgctaagaccattataactgaaaactagaagatgaataccatgcttaaatggaaatcttttccacttcttttggactttgtcttctgatagctgagtgatatcatagtttgcgctcatagaccacctctgaaatgttagtcacttcatcaatatgataccagtgattttctttagtaatgaatcctgattctggccaagtaggagctgctacaaattcagcaggtagagtgacatcagaattcactctatgactttttctgatggttgtttggataaccctatctgcatatggatatgccttctggatgattccggcaccacctatgatagaataattaaggtctctattaaaagtgatagtactgttgtaagaagtatgagcggccataatgtcaccacccaagaaaccgataaattctaattcacttacataagcatctgcaaagaagccatttttagcagttgccaacgcacgactcatgtcttggacaacgattgtcttacgaccaggaagaggtttaggaaaactcataaaagtctttgctccgcaaatcaagatagtatctcgagtacgattagcaaagtttttcatgtcctgggaaatatgtttccatggaagaccatcgcctaaaccgaaagcattttcgtttttgccgtctacagtttttgtaggagcaaatgcataaactatttgaatcatttaaacctcagcaaaatttagacatataaaaataatcctaatataatgccgctaataaaagcggcagtaacagaaattaacaaaactactaattcagcctcaatcatttcttggccttagcaagtttaaatgcttttttgaattcttcaacatcttcaacaggaatccagaagcctgagccatacccatcttcatagcatgggcagttatcacagtaatcattccaatagacagtttcaccacccatagtgaatggagcttccatctggcacagtacttcttcaacacgctctaattcttctgggtttttgtcgcaaatgcagaaattccatttaccacgatattcagaaccaagtttgatgctttgacgttgaagtttcatttttattctccagtagattatggagctatactatcacaagcatagctccttgtaaacaattattcttcaaaatcttccataaagtaatcaatgtcgtcccattccagagattcaagatatgcaataaccttttctctagaaccgcggaggtcaatatttggccaaccaccaccaggtccatgacgcataatcaagtcaaaatcaataccatggtcagtgtcataaaaacgtgtaccatctgcatactccaaatctacacaaataccgtctttgttgataataggagttgctacgatatcaatgtttaatttacccatgatgttttcctctactcgttttgtttcgatgtagatatagtatcactcatcaactggcttgtaaacaattttgtgaaatattttttggaggaataaagaaaaagggacccgaaggtccctttatattagaggtcgttcaaaatatcattcagatcgtcatcgccaacactgtcaccagcatcgcccatgatatcgtctgcggaacgagaagaggtcggtttggattcaaaatcagacaggtctttgtcaaaggaatccaggtcatcgccaattttatcggcttgagctgctgcttttgccgcggcaccaccaagagctgctgtacccataatctgtttaaatttggcttcgttaacttcaaacgatttaaactgagatggagcaacaatttcgctgaggtcagccatattttcggtcaggaatttctgagtttcttcatcattgatgtttgcaatctcggactgaccaaggaatttacattcatcatagttctggaaaccaccgactttcttaactttcatgacgaagtttgcaccttcatacacgcaagttacatcaaccggagtttcacccatatcaacatcaacttcaaccatcgcgttgattttgtccataattttctgaccgaaacggaatttgaatactttgccttcgttttctgggttagccgggtctttaataaccaggatgttagaccagaaagaggttttacgtttcagaagcttatattcagctgggttgctgttataagaatcgtttttactcagatgagcacaaaccgggcaagaatcaaaatcaccgtgggtagaagtacaattttcgatgtaccatttaccgccgtgtttgaaaccgtgattgatcagttttacaaacggtagagagttttcatctttaccaggcaggaagcgaattactgcttgaccattaccagcattatcggtcttcagtttccattcgtttttgtcttcgttagagaaagaagaaccacctttcagaccagccagttgttgttgaagttgagcaggatttttacgcttaaacatatgattacctttttaaatttaacagttgttgttgcaacatgggtccttgcaactggacgatagattaattatatactaatttctttacaagatttgattatgctaataaagagtttcttagcttcagcaccgtcaacgtttaaaagttttttataagcttttaatttagtggagtaattactccaaactaaattatccgttgcagtatcatgagtatttattatatctaaaaacgagtcaagcatgatgaatgtctcgaaagatataacgtttgactgaagaagtttgaacacataagatgttccgactttctcattatattcaaaaatatcatgaagcttatctacattaactttcttggcaaaatagtaaatgttctttacatcttccgagaacgttgttttaatctgcttcaatttacctatatattcacgataaaacacgagggcatcagcatcactgatatcgccaatccaagcatcttggttagctacgaggttactcatgaatatcagtgttaactcttttaatgtatatttctcagcgagtttctcaaagaaatatttgtctctacgcttttgataagctttatcagagacccgcataacccagttatacttaacaacgtcatatcgaccggcaaagtgttgtttgagcattaaatataaaagataaacgctcttaccgttaacgtatctgttattatttccaggcatgcggagacgaatcataataaaaaatccagactattcgttttatgtgtttgactaaatgatggtcgaagcatattttcttctaatgcttctgacataattttttctatgattgcaggtggaatatatctattgaagtttccctcaggaatagaattttcttctaaccactgagttgttgcttcaagataccccattccaagttctgttaccatagactcaatagtaaatccgttagcttgcttatctaacagctgattaatggattcagagggggatacctccccctcgtctttaagcgaaaatagagtcataagcttctaccacttcatctttttcagtttcaaaacgatcgcgtgtacctttatggaacagggcaagcagctgattaaataatttgccttctacaccaagctctttcttggcgcggtctttaatgtctttgttaagttcaagatagctttctgctttcaacttattacctgaggcttctttaatcatatctcgcagagcctgtccatgtaccgcttcatcaaatactacttgctctttttctttcttagccattatattcaccttaaaagttgttaatttctttcattaatttagacagaccggatttaacaaagtagctataaattttaccacgacccggtaattgatagttattataacaatctaaaatgttagcaacaatgtcttcgcggatgtaatcaaaatcgattaacacgcggttttccaagaaacgcttatactgttcttcagtaagcaaatctttaatgttttcgccagcatcaagacattcttcaacaaatgtcattttcgttgaaggagtacgctcaccatcaacatgggtgtaccaaaaatctgaacgaactttaatagaagctacgttatctttcttgtcacctttaataattttaaccatacaatctaaagcaggagaaccggttttagattttaccagtttcttctgcattggtgaccattgcttaacattaggatacttatgcaattgagtaaagtcaccatccgaagaaacaatcatgactggatggccttcgagactgaactttttggttaataccgcaatgctgtcatcagcttcagctttatcaatatcaatgacataataaggcatatactgcttaaattcatcaattacagtacgaagaccttcaaagtatccatcccagtcccaattggattcttcacgggctttagcacggttctttttatagtaatatgctacgtcccgacgccaatacccattaactgcgttatcaacgcagatgacaattttagtgtatccatctttcttccacttaaaagcattaaattttaaagtagaaagaataagatgacgaaccataggagttgttagtttgtcaccttctttatacgtatgaagaattgtcgccattgcaatttgtgacaagtcaattaaaatgacgccttcttttacttggtcttcttcggcgaataagcaatttaaatcagacatttgaacctcgttcaattagttagtacagccattataaatacttctataatgaagcataaccccataggagactctatgagcgatttactgaaacaacatttccgtgcaacgaacggcttggacgcaggcggaaataaagttataaatgtggcacttgctgaccgcaacgttaaaaccgacggcgtctccgtcgagtacgttattcaagaaaacactatccaaaaatatgacccgacacgtgggtatctcactgattttgctgtgacttatggacgtcgtatctggattgcaaataaagatattccaaagcctgctggagattttaaccaggcgaattggacttctttacgtgttgacccgaactggatttataccgtccgtaaaggagagtttgaaattcaatctggtcagttcatcaacgttgactctaacgctgcaggtaatgctacattactgcttccgttagcaccagatgaaggcgataccattgtagttcgtgatattggcgggcgtcctggctataacggaatcttaattaaagcacaagatactggtgcgtctatcgtatttggtgaatcgcgtctgcgtgaggtaagacttacacgtccgtattcacaaattatgcttacgtttagtaatggtgcatggcgtgcgagtttaacagattttggcgatactgccaagatggtagttccgaacgggattgttccgacgcaagttcaggcaggtgataacgtagttcgtcgttatacttccaactcagagatttttattactctgccgttgttcgctaattcaaacgatatcatcaattttactgaccttgacggtacatcgccaattaaccatatgactgtgcgtacgtttgacccaactatctcaattgggactcctgggcaaacagaggttcaagtacgtacttcaggcaccggatttttggtatatgactcgattgacaaaatctggcgtatttttgaaaatgatttacgcaccagagtaagaataattacttctgatgttactttaatgcctaatgagcatatttctgtatttggcacagataacaataccgttaaaacaattaacgttactttgcctacagacgtagctgttggggatactgtcacaatcgcaatgaattatatgcgcaaaggacagactgtagtaattaaagcttctggtggtgatactatcgctagcaatttgaatttactgcaatttccaaaacgttcagagtatccacctgatgcagcatgggtgcaatcaagctcaattacctttaacggaactacatcgtatgttcctgttcttgggcttgcatatattgaagataaagcatccggaaaaagctattggattgtaactgaatctgaccctaccgtagaacgagttgatgctaaagacaatacaactagagcccgattaggtgttattgctcttgctacgcaggctcaagctaatgcggagtcaaacccagaaaaagaattagcaattacgccagaaaccttaaatggacgtcgttctactgaaacccaaactggtatagcaagaattgcaacttccagcgaagttaatcagtcaacaactgcttcttacttggataatgtaatcgttactcctaaaaagcttaacgaaagagctgctactgaaactcgtagaggtttagcagagattgcgactaatgctaaaatggatgcaggaacagacgattttacaattgttactcctaagaagctgctttatcgtactacgtcggattcacggttaggtgttattcaattagtaaaaactggtggtgctcctaacacaactgctgatcgttcttctgctggcaccggtatattcgatcattctgattacaaaaatgcagttactccaaaaactcttcgtgagtataaagctactgtaaaccaatcaggaatagtctggttagcaactgatagcgaagttagaaacggaactcctgcttcttcaaatattcctacggttgttacaccagaatctttgcataaaaaagttgctactgatggagcaattggtttaatccaaatagctacacaaactgaagttaatgctggcggcgtgactaataaagcagttacacctaaaacattaaatgaccgtacagcaactaacaatcgtactggtattgctcgcttcgcgacacctggtgcccagggtgaatttgaagctggtacttcaagtacagtaatggtaaaccctaaattactgttcgataaatttgctaataccgatcgtatccaagttaatactagttctggcttaactattactgggaacctctgggaccattataccatcaacatacaggaagcaagtacttctcaaagaggtacaaccactcttgctactgctgctgaggttagaactggaaccgacgctaagaaaatagttactgctgccgcgttacatgctaaaacagcaaccgaaggagctatcggtcttgctcagtatgctacacaggcacaagttgatgcaggcacattaagtgatagaattgttcctcctgcttacttgaaacagactattcaggtaacagagtcatggcaagctacagacagcgttagagggaccgtgaggctatctacaggcgatggaacgtggaaaggtaatgataccaatggctcaactcttccggataacgggtatgcctctaagggcgtcgcagtgtctccgtatgaattgaaccttacactgaaacattacttgcctcgtctcggtaaagcctatgacacaggaatgttaggtggtcaaacaccagacaaatatgctcgtcgcgatatagcgcagactatttctggagcttggacatttagtcaggacacttcatttagcaataatatttctgtcaagaatgttatatatgctaatggtggtgaagttaaaatttctccaactgctgacactggaattgtgcatgttcgttttcaaaatagagacggaagcgagcgtggtataatttatgctgagcctcaaacagcttcagccggaaacttaaaagttcgcgtaaaaaacggaacaggaactactgctgcaagccagacctacacatttggcggtaacggtacgttagaagttcctaacgaagtgtcaactaaaactctgaggtcttctggaaatgcaatagttggcggaactgttatggttaaggacgttcagatgcttgctgtcgagggattgaattcaatattcggtgcccaatcacagtccgcatttattcgttcccgtgacgctgatacacaaatttttgcacaggattcaactggatcgtatccaattttaactaccaaaaactacgcaagattagctgatggccgttatgtcaagaaagctggtgataccatgaccggcaatcttaacataaatagttctgctatcgtcattacgggttctgaatcctggtatgtgccaacgaatgaaactgtaataagacaaggttcttggactgctgaaatcaaagacgctactaaattgaaaggtcttcgtggttatatggttccaatcagaacaccgattgaccctggtaacccaagcactttagtagtgactgggtatgaagaaaaaactgcagctggtggtgttttaactcaggttggtgtaactacaaacaatacttatcagctttggacgccttatcctccgacaaccgaaactgctgataagcgtttcgcgcatactgtgtggatgaggatttataatccaaaccttaataagtttgatgattggatgcgagtatttacatctgctactcctccaactgcagctgatatcggagctccgagctcagtatcaactcaggttaaaacccttgaagttttggaatggattaagcttggtccagttaaaatctggccagaccgtccaaatcaaactctcaaatttgaatgggtaggtgattaatggctgaaccaattttaatggcagccttcggcgaggatttcgtggaaacacgaatcctctctgaggcaaactctgtgaagtattggctaaaagcttatgctacgcattctaatgctgttccgaataagccagaattgaatattaacggtgcctttgatatgacctcctccttacggagggggattaatgttgttcaagttaatggtgacaggtttattaactttaaaacatttgacgttaccactgatgataacaacgctaataacaaagcgtttgtagaatatgcaaatggattaacttcgggattgtatattataatgacacatgaacgatttcaatccagcccgctaatagacaggtggtttaaaaataagtggtctgcttcttggccaggttctgatttttccaaatcatttccaaactctgcttatgtaggagtgctcggagcagcaaaaggacgcatattaattgagtcattttacggaaatgatggaaaggttaaagaagattccagagctaaagtcgatactgtatatgataacgttggcgatgtaggatatacaggctgcccttatcgttccattgaagacactaatgagtactcggattctactggatatgaatataagcgatatccagttcaaaatgaatctataagcaaaatagctgattatggactatctcctggggattctgtatttttagtatgtgatatgtatgcatctaaaagtcttcttgatgctggttctactactagagctagcctgcgatggttcaaaggctcatctttattatcttcaaacgtatcattagaagttccaaaaaatggagctgatagatggttaagatttgaaagatttaccgctgttcctacagacgctgatggatttactattgtggtatcaagatatccaaaaacgtctgtagttggtgactctaaaatcaaaaaccttgtatttgttcaaacctctcatagcgaaaaactgaatagtgttgttcaagaatttggtgtgaatggtataagaatgaataaaggcgttgaaggaggaaccactatgattatggaacttccaaattcaaaagtcgatccgagcggtgttattccagttcaatcgttcagagaaacatcagactaaggaagccttcgggcttccttttttcgtataaatagaaaatatataagaggataaactatggccgatttaaaagcaggttcaacagttggcggaaatcctatttggcacgcgggtacttttcctcttgtgccggcaggaaactccctaacttatagaggtaagaaggtttatactgagatagataaacctcaagcaaatgataacgacttcgtgtccaaatcccgtggtggtacgtatacaggcgaagtaaaaatagcatatggcggctctggcaagttaagcatgggtccgttggcaaatgttggtattagagtcggtggtagtaatggtgaagttcttatcatcggagggaattcaacaattcaattgcgcggcggcggaacggaagattccagcggcatagttgaaattgctaaaaatggtaacttaactgcacagactggtagaattaccgctaacgtatttacttctaaacaacagccatctggcgtagacgatttaactcgtaaagattatgttgatggacgaataaatactgttagcaacgtagctaacgcagcagtcaagaaagctggtgataccatgaccggtgtacttagggctaacgctggcgtagttatagtaaataaagcaacatccggtgaatatgctcctagattagatcaggttatttcacgcggggtaacaatagattttggcacatactaagaggtagccatggccgatcaaaacttaaaacaaatacaatttaaaagaactagcacagagaataaagcaccaggtgcagatatcgtagcccgtggcgaaatcgctttgaatacacatgggcgtactcttgccatttatactaaagatgaaaatgatgccgtagtacagctcgccggtaaaggggttcctttcttagatacctccggaactcttagcgttgatggaactactacgttaaaagacaatgtaaccatttctccgaataaagcaattagttttgaaactactgatttgagcggtgaaataactcgtcatatcgttggcaaatgtgctactaatgatggctggtacattggtgccggcggtacaagcaacagtggtattcttgaaatcggtactattgatgatggcgctgaaactattcaattcgtacaacgcggtgcaggcaacgttgaagcccgaaaattggtcttgcttgacggctctggtaatacgactcttcctggcgatttaagattatctaccaataagactgttaaaattaacagtggaagcactcttgttcttgaaatgggtgtaggctctaacgacgtctatattaaaaaccaaagaggcacgggtgttcttcaattaactaatgacagtaatttaacgttcagaaattcacaggtgtattacgctatgagcggaagaggtcctggtaaatccggtactcttctgacgaatgtagaaaacaatcgtcaagcctggcaatatactatttctgctgcaactgcgtcaactgctcgctgggtaaaagtagctacaataaagcatccaggaatggcttcttcgcaactggatttaatgattagcggtggtattgattctgggcacggtagacattacgttgattttatcacgttatcaggacgaaatttaacatcttggagcactaacaatttagataactgggttgaatggcgtcgagttggttctcctgataaaggaaagattccagagtattacgttgttaaaaatgatgctgctacagattcagaggcttcatttgatttttacgctaaagttcctcgatacggcaatgggctttatgttacagtgctaaacactgctggatacaacggccaagatagcggtaaagtaattatctatgaaaccaaccaagacactggtggatatggaccagctggaagtattcttgtttcaatgaaacagatttttgacagttacgcaaaaccagatttcggcgatactacgggtactcttccagttaaccgtggtggtacaggtgctactagcgcaggagcagctcgtaataacttaggtcttggtactgctgctgttcgcgacgttggtgaatctaacggaaacgtgatggaagttggtgcttatggcttaggcggtaatggcggtaaatcaatcgaaaacattacctctaatgctgatatgttgacccgtttaaaagcatatggtggtactttctggcgtggtgttactaaatctggtgttagtgttcaaaatggtctttatagccatggctccggtatttttatgaatgctggcgataccatgtcagctattaatatcgactacgccagcgctaaagttcgcgtatacgcagctaacgacagaagtcttgctgagggaaatgttagatacaacgaactttatggtacagcaaataagccatctaaggctgatgtcggacttggtaatctgacaaacgatacccaagttaagaaagctggcgacaccatgaccggtgatttagctgcacctaatttacatgcttccggcaccggtactgcatcagtgtatgttaatgcaggaagcggaaatgctcatgtatggtttagaacaaacgccaatgaacgcggtgtaatttgggcaactccaaatacagcggatttaggacaaattaatattcgcgcaaaaactactggaggtgtttctgctggtgattttagcttccgttctgacggtcgatttgatgttcctgtagcagttaaagtcggtggagcagcaatgctgactaaagacgggaatattacctctggttcgatgtttggtggtaaccttaacaactatttgacttccattaaaaacgacatcactgctggcgataataagcaagtaagtaaaactggcgacacaatgaccggtaacttgactattaacgctaacttaaaagtcgaaaaccctaatggaacaatggctgattttggttcagagaattcggataagtatagcagaataactcttgctcgcaaagttggtagcggtgctgccgtagcaatgcttaaagttactcctgaaggacacgtgcaatttggttatcaaactgcagtttctactccagctcctagtaaatatattctagttaaatccagcggtcttgaggtagaaggggatttagtttttaatcagacatatagcggcgctgaagaggcagttgatatttccgataagactatcgaccttaatagtctgattattagacgatcagatttaggtactcgtcagttatataaatgcgtatcttctggcggtggttctaagataacaaacaaacctacatctgatggtaactttgttcttgaagttctgtctttacgcaaggtttctgataccgattggtcatgtaagcagacctttactacaaagaacggcggtgttgaaggcacatatatccgctacggacaaaatggttcatggtctgcatggaaagaagttgtttctggtgttcagccaattaatttaggtggtactggagcaacttctgcagcttctgctcgtaacaacctcggtgttggtgaaggacaaactgtaaaattcggtaatttagttacaaccgatttaaccgcaaacggaaacgctagattagtcggaagactgaaccttggttctacttccgcaaccggtgtattacgggctaatgaatctggcgcagttgttttaggttcttctagtggtcaaaacatccacatcagagcaggaagcccagatacttcttctggtgaaacccgctttgagccaaatggaaacgttttagttggcggagttctgacgtcttcaggaagcttacaagtaaatggcgaagctgcgatgagcagaagcttgatcgtttctcaaaacataaagaatactaacgataacagttttattctgatggggaaagattctgatttaggtttcgttaaaaaatctaactcaggcgctaagctggtatttgcttcaggaaaatcatttgttgttgctaaatcatcagcaactgccatagctaatccagcttcggaaacttacactgatgtgtttaaagttgacgcagatggaaaccaaacagtttatggaaactcagcagtttctagagctttgactgtatcaagtacagcaactattaatggggttattaatgccaacggcggtattattgttcctactaccaagtatgtgcaaattgccgatgctcctacacagaataaccaagctgccaacaagaaatatgttgatgataaggttgcttctgctattagtaacgctggcgatacttatcttccattagccggtggtactgtaactggtaaccttgacgtaactggcaccagattaaaaacttataaatcaaatagtacataaattattctccataccaactatgtgatatttatatcacatggttggtatggagaataatttatgtactatttgatttataaaataaccaataacgtaaatggtaaatattatgttggagcccataaaactgatgacatcaatgatggctacatgggttcaggtgtattaattaaaaaggcaattctaaaatacggaattgagaactttaccaaggaagttattcattattgtgaatcatctgaggagatgtatttaaaggaatctgaaatagttacaccagaatttttattaggaaacgtatataatttaaaacttggtggcgaaggtggatttgactatgttaactcaacatattggactccgtcaaaaatgaaagcaagaggaatacttggaggaaattcaaccagtaataaaattagaaatgattctaaatttaaactgaatttttcggataagattaaatctggaattacaccagatgcacgttcccgcattgcagacgcagttaaagctaatatagctaaaaatggaaatccgtttttaggtaaaacacactcttctgaaactaaacgaaaaatttctgataaactgaaactagctcaatccggttcaaaaaattcacaatttggcacaatgtggattaataatggaatagaagctaaaaagatttcaaaagattcccctataccagaaggatggtataaaggaagaaaattagtaaataaataattggactatagacaagcggttaagtcaccggcctttgactccggtatctctggttcgaatccagatagtccagccaaattaatattcattcaacgcgtctacaggggttgaactgatcattcttctcttaatttcgtatgaagtcctcatgatggatggagtgaatattgatgtggccgtagttcagttggtagaactcgagattgtgattctcgtagtcatgggttcaactcccatcggtcaccccaacaatgaaggaatggtggaaaaatacacggtccgcaaaacgctgtggctgtcgctaagcgaattgtgtctatatgacacttccttcaccaattaatggagagtagcgctagtggtagcaaaccggacttgaaatccgggccatcggaaacggtgagggttcaactcctttactctccgccaaatttatgaaagttaaacgctgcccatagcagtggtacatcaacaatcagatgattagctttccatgggagtatagctcatttggtagagctctcgaccgataatcgagcggtgactggttcgagtccagttactcccaccaaataacaggttcttagtataacggctattatgctgggctccaaacccagtgatgagggttcgattccttcagggcctgccaaatttgcatccatcgtataacggctattataggtgacttccactcacttgataagggttcgattccctttggatgctccaaattactccgtatagctcagtctggtagagcgctccatttgggatggagaggtcgaatgttcgagtcattctatggagaccaaattaacggtatgacacaatacaagatggcgtaagctgagtagcgggattgcagtctcgttcagatatgctatcgagtatgggtgatatattaaacacatggattctgcaaagtcaatgtgactcggttcgaggccgggcataccgtccaatcgcttgccattgagaattatattatgaaatattacggcttcaaaacatcccatttcgggaaagcatatcgtacagaaaacattgatagacgccgagcatattacgaatcactgcataaagcaggacgttctcgtgcacgacaagaaggccaaaaacaagcgaaggaaatagaatgaatatttttattggtgttgcgaataaagtaaatgctattacggtgaaattacaatggaatcgtccaactaattttgctttaggattatgtaaatctgaacgtgatttaatgcttcatgctgattttgcatatacttttgatgaacgcaaaggtatgtgggtctggattaaatgcagatacgaagcattaatcaaatatgagtacttcagtgagcgtgatattcaagaagttattgcttatcattctggctgtaaagtaagtaaactgcgtcaagttattccgtttactaatgcttcaaatgtagaagagctaattactgattttaaacgaatttatcaggcgaaatatgatgaaagattctaaaggtcgagacgtacaagttggcgatatcgttttctacggagaacgtacatataataaaggtggtcgtggttctatgcgctgcggtcgtattactgatattgcttcaggattggctaaagtagataacgactacgttgcaatgcgaagcaaatcattcgttaaggtttctcctatgttcgcaacaatgtgggaaaacggaacgattttcgagatttaatgctacaagaataacctgttattattactacatcaaaacaaacaaggaaaaagaatgaaacgtatcgcactgattgttgaccaagaagctatgttcgctgctaccggcaaattccatccggtgagtaaatttgttgctcgcagcgagaaaatcgttggtctggtagaaactgtcgcaggtgatgtaattgtttctattaaaacgtctgaaatttcgccggtggttaaagtagcagttgaaaatgacttctgggaagtagctgattttatgtgtgagtaattctgcctagcaggtggataagcccgacaaggcgccctcttcggagggcttttataaaagtcataagatttctataaaggccctgtagctcaattggtagagcgttcccctcataagggattggttgcatgttcgagtctttgccagggtcaccaaattatcaactgaggaaattgaaatgcatattaaatttggacaagttattcctaaaggcttagcaatggcaattaccacttgggaaaatgatgccgatcggtattctacccaaatggtttatggcttagaaaaagaagagattaatcaagtaattcacgttcttgaatggttctcttctaatggtcgccgcggtgaataccttggaaataatgattacaaccatgaagcaattcttgaaaagcttcatactgaacagaagtatgtaactcctgaattttccaagaaattctttggtgttgatgttcctgcatatgattgctcagacgaagagtttgatgcttatttagataatcattattcttgttcaaatgaagttatgtatgctattcaggcttggctaggtaatccaattgaatatgactatgatttcatgcgagtatttgagaaagtagaaatctttgacattaaagaagaaattcgtattcctgatgctccggttgcattccatattggaattacgtataagcagaaagaaagcccattaaaagttgattggttgaaatacgtgaaggaaaagtaatggatattggttcaggtagttcatatccatcatgtgctttgagtaattttgctcctcataaatttatctatgatggcgtagaatgtgcctcaatggagggattcttgcagtccctcaaattttcttcgcctgaaatgcaagcacatgtatgtacattagttggtaaatcggctaagttcaaaggtaaaaagaaacggtggtggccaactcaaacactttattggaaaggtgttcctattcaccgtgcctcagaagcgtatcagaatttactaacaggagcatacgatgcacttagtaaaaatgaaggattcagaaaagctttggctgctacccggaatgctacgctcactcacagtatgggtaaaaataaaatttctgaaacgattttgactgaacgcgaattctgtaatcaactttatcgtttaagaaatgctataaataatcagtaatataattatcttgttcagtgttgaaatcggtagacatggtgacggacaccttttgagctcgcatattgcatcatatgctggcgacggtggtaaatcgctgacggaatcagtcgtgcaggttcaagtcctgcctgaacaatctcggggcatagctcagctggatagagcagcggacttctaatccgcaggtcgaaggttcgaatccttctgcctcgaccatttcgcatcgatggtggaactggtatacacaggagacttaaaatctcccgccgcgaggattgagggttcgaatccctctcggtgcaccaaattatgaagaatgtctcagtcgtgagaggatcaatggtgaaaagccatggtgttcctgctgcaagccttaagtggacagaacagccaacctagtgacgtaggtaattcttcaccaaatatgccgatttagctcagttggtagagcgcttcacttgtaatgaagatgccgcgggttcgactcctgcaatcggctccaaattctggtatgtgatagctcaaataggtagagcgtgaggccctggtgctgaatggcttgtaggttcgattcctacccataccaaaaattaatgaggaaaatatgaaagtatatgctgtagtaaaaaataactggaactgtgaatatggctatgaagaatattctttgcctcttaagatttttcacactaaatccgaagcaacatcatatgcggaagaacttgaagcaaacgattcctattatcagtatctagttgaagaatacgatgtaatgtaattcgaagggaaacttgcgtataccctcgttgagtcgtcagatagaagagaatggttcgtccattgccgctagtcggttgttcactgtcgcaagcataacctcctgacgctatacttctttggatgagactgatgcctccgagtccaaagaaatgaatttcgcaggtcatctgccagtgggtgatgctgtcgattattagagccctgtcttcggacggggctttttagtataaatagtaatttaatcgacactaaggatttttttgcaatgaaatttaaagattttttaaccgaagaagagctttttgaagcagctcctggccgcatgactaaatcgaaatggcgtgacgctctggtattggttccacgtggtgaacgccatgattttagcaaatttgcggcttctgtggaaaagatttatggtattgggattagcgatcctaaagactatgctaaggtagcagctgcctttgaaagtttaggcggaaaggttactacacctgcacgtggagcttctccggcacaagcaccggccgcaaaaccggctccggttaaagcgaaacctaaaaatattcctggccttaaaattagtggagaccatggagacatcattggttcaggtgaactgtttaaagctatcgataaagctcttccgctagtaagagataatggtcctctttataaggcagttcaattctatttcgataatctgtggaagtatcgtgaatcccaaggtgctaaaccttctgcacgtgaaactcagcatatcggtgaagtgaaaacgcttttagctaaactgaatcatcaccttgttgaactcagtcgtcagacagaattatcgtacaatgtataataaaatgtaatcctacagccctagaattcatctagggcatttttgtatccccggctgtataaatccattctaacttccagaaagttcctccagatgccctaaaatttttgcacaaagttgtttacttcctctatcaactcggttactatagctccatcaaaacaaagcagagtaacggagaataaaatgtctaaattcaactttatccaaattgaacgtggttataacaattacggtactcctgatcgttatcgcgcgatttggattaaaggtgaacatgaacacgcagtgttcaacgtagcagaaactcgtgaactgaaagatttgattaagcatgttcgcaaagattggcctgctgttgaagagtactacgttcgagtttaccatgaagaagctgctaccgaaactgttcaaattaaattcgcaaaaactgctagtgctttaaccaaacgaattgaagcggtaattaactgctaataattttggggagttataatgaactccccacctactgaggaaatagtaatggatacagcaaatatagttccaaaaactcttgctgatatacgtcttgaagctaaaatagctatcgagcgcctaattaaggcaacagtagaagaaggcaaagaaactgttcttattctcgggttagagtcatacgttactgattacatcgagatattcgagcgcagcaaaaatgaacagggtctaatcattaaaccatatgtttatgattggattaatccgtacgaataaaaccaccataactattgaaaggaaataaaatgtctattctgaaaaaacttgttgaattcatccgttctaaattcggtacctttgttgcacagaacacttctgttgaagaccagtataccactgcggcaaatcgtattattgatgaaatcactaaactgcgtaccacgcatgttaaatcggtaaatgaagaaaagcgtctgctgaaacttgctgacgaaaaagaccaggcaggtgcttccaaagagcgtgaaattcgtcgcttgatggcagaaggtatgaatgtagaaacccatgctaaactaggtcttctgtatcgtcgtactgctaaggctttacgtgataaagctgccgaatataaagaaatgcgagcccaaattgaagaaaccgtagttaagcttgatgaccaacgtcttgatttggcagtgaaactcgaatacatccgtgagacccgtaatgcttctgctctgggtattacctctgctgatgacgtgattgaaatcgcggaactcgctaaagtagatgtacaagacatcatgatgaaagttgaaaccttcagcggtactcagcctggtattgaaaccaccactgctgatgtccaggaatatctggaaagtctgaagtaattttatcggggccttcgggcccctaacttggataataaaatgttatatgaatgcgctggagatattccaatggcaacacctcaaattaaagaattaattgcagcaggattcccaaaagaaatcactgatattcttgagaaatttgcttattctgatactcggcctgaaaattggaaaactcgctataacgggtataacaccacagttttaccgcgggctatcgttcttaaagactattccaagctgaaaaacttaatttctaatatttcgtctatttccgacggagttaagcttgtagatatctttgcacttcggtacggaatttattctttcaacgattctccatcaaatctaacatcagctcgtactaatgccgatggatattttacttctagctccacaacatatacagtagttatcgagattatctataataaaactagttatcgtctcggtattaatctggttaaatacgtgacatctcaggatgattatagcaattatttaaattactgtgttaatgaattaccaccaaaagtcatgggtatgtttgactctaacaacatggtaggcaaacaattaatcattgatgaatttatcaaatactgccgtgagagggtgcagaaatgagtaacttatatctgccaagtgaacctcccgtttataattatgtctataaatttgatcagattgattatgcccttgttcctggtattggtgcaactgtcggcgcaatgtgtacctttgccgcgattgatatcatgcatttaactgatattacaccggcagtgttattcggaattctgcttgcatggtggggaactagtttgctcatcatgggattaattgaatgttcccgatgggttaaatggtctcgcaataattataagcgtaaagctgaatggaaagaacagtgcaagaatttaactcttgaatggaaccgcaaaaagtcgtttgagtttattaaagaggtgagaagaaaatgaatgaatgtaaacctgacgggttttggaaccaagatgggctggcgccagcttttggaatcgtgacatggattttatattgtgcttttgtaattgttggagggacattctttggattgaacgtctcagagtttatgattatgcttttatttttaggtgttttcgcattcagcctcatgtggatgctaattatcgcgttgattaattgctgcacatttttagcttaccgtatgaaatacaagaagtggaaagaaaaagaagatttcaacacctggattaggagctgcagaaaatgattaaaacttgttatcgtggaatgattaaagatgatgatttcttgtatttcttcctatttctgcttatcctgttttccttctcaacatttgttggtgttgggatattctgggggttctacttcttttcaccagtatttggtgatacgctgtactatctaggttggatgtcaggggttggaacttggtttgcaatgcttgctcgttggttgcaattcgtttcccagcggcagcggggtgtatttgataaacccaaagtaaagaaagaaaaatctaaagatgattctcgtaatgaaactttatcctggattaaggagatgaaataatggctgttgcagtgcatgtaaaatttgaaaatggtgatactcgccttctgtgttacagcgataatgaatcactgagcggtatcgagatttcacttaaagaagaactgcttggtattaatggacctatctgtgatttctcggtagagggttcatataattgtgatggtgtactagagtctatggtctatactgccatggaagatattcttgaagaaagttggaatgaatgccaatgaaagagctcagtgcaggaatcttattctttaccgatgacaaacggcttttcatgggtcgtatgacaaatacatatgtccagggcagaggctctagatgggatattccgaaaggacatgttgagcctggtgaaacaccaaaagaagctgctattcgcgaatgccaggaagaaacagggtttactgggtttgaccaggacctcttatatgacctcggacgacatgattatgccagcaataaggatatccatttgtttggatatatgctccctgtgagcccagaagtgtttaagaattgctgttgcacagcttaccataaagatgaaaatggaatttctttcccggaaatcgacgcatttgctttaattaaaccttctcaatggaaatatgtgatgggaccaagtttgtataaaatcatgacacagatgtatagcacagcccagtgaggttactatggaagaagctgttgaattaggcattccacacatttataagcatgaactacgatttgttcgtgacggaagatggattagcatatttcatcctcgagataagttgtcacgtacactaatgaagtcacggtatgtcttcggtgacggcgagtatacaaaatcagcatattatatagcagaacagctatatccgggatttagtgaattgcccgaggacgatagaagagattatgtgtggtggaaaggtaaatggacaccatacgagaagtgtagccttgaattattcatagccaagtgcagggccaaataaatactcctataattaataggaggtccttatggatatttttggcatgctgcgtattgatgaaggatacgatagcaaaatttataaagataccgaagggtattggactattggtattggccacttactgactaaagacccgtcaaaatctttggctatttctaacctggacaagcttgtaggtcgttctactggtggccaaattacccaggctgaggcagaagtaatttttgcaaaggatgttgaaaaagcaattaagggcattgtggctaatgctacattaagcccggtatataatatattagatgatgttcgtagagcagctctaattaacatggtattccaaatgggtgtaggtggtgtcgctggattccctgcttccatgaagctcttagctgctaaaaaatgggatgctgctgccaaagaactggcaaattcacgttggtatcgtcagacacctaatcgtgctcgtcgtgtaattgaaactatgcggaccggaacttgggccgcttatcaaggaaaataaatgaaaacttatcaagaatttttaaatgaatcccgtttagcaacagttggcgtaatgactgaatctgttggaagtaatcttctgaaatttaaaaaaggtcagaagatgacagccacgctagaagatggtacagaaattgaaatggacgttgttggatataactacgtagtagacggcaagttatataataagagccatgctaagtttgattcattcgatgatttcacctcttctattgaagatgagtcttctcgcaaagcagtagcatctggcgatgcacgctccttaatggcatttggtcatgagcgtattaagtctaagcagaacaaacctggtgaagataactttgcattagtaggttatcagtctggcaaaacttctaacggttaccaacgtactgttaccatgtacatgcgtaatggtaaaattgcattcgtaaacgatcgcggcgctattcgttacgctaaatcaattaagtaagcaatttcctaataaagccgaacacgacctctcctcatgaacgtcgagtcctctgagtgaagtagcttttcctacctgtaataaggtcgagcccaagtgcggtaaggggtttacatagtgtgtcgatggattaaacatgtgccaaggaatggcccctttaactggaatctaaaatgaaacacttaactcccatttatttgaccctgatgcatgctttcagagacgctgcagacagacgattgaataatcccaactacagtttttatgaaccgtcttgccttatgcgagagtacggtacccttcgtctagacggtggaagacaaaccggaaagaccgcagccttatgccaattcgctaccgattggttgcttgaagatggttcggttataatcttatctactcgatacacacaatcatctgaactgatggaaggtattctacgagaatataattcatcgcatttaattaataaattaccggctaacgagatagctaaatcaattgttccgatgacaatcagggaatttctatccaatgattcctcttataagtttagaggaagaaagtttggaagagcattaattatcattgaagaaccaatgaaagttcccgatatgatgaagttctatgatatgtaccaggaagctatcagatggtctatgcctaatgataccttacctttatttttcgtgataggaatgcaatgatgacacagacagaaattgttgatatgattacagtaatggaaaatacaggattttccgatatgaagcaattaataacaatggttacggctggaaacctgcttgagtacaagcgctacaagtttctgtctggtccgtttaaaggtgcagaattcatttctaatgctcctaacacgaagtggatgaatcgctatcctaattttagaattgagtttatatctggcaagctcaaaggcgtgattagttcaagcttaatcacatatgaccaacgcattcaagagaaaacaatgcaatggctgaaattgttataaagtgtcctccacatttagttgaaagcttctgtgattggttcagtaattctggtgagcaagatttttatgaagctcatcagaatggaacttggaatgaagccacaaaacagtgggaagaagctacaacgtatataggcactcgtggatatggagttgatgagcctattgaaattgtagagtacgataaagaaactgatgaagaaatactttatgctaatgatgccagagaacgcttatggcgagaatctgaattagaagcagaagttattcgtcttaaagaagaattaaaaggaccaacgggttttgctacatggaaagacgctgctatttctgaacgtttagcacgggtaaaattaatgccagaaggtaaaatctcgtacttgcaggctgcatccaagttccattctactgagtggaatactatggacgtaattaccgcgtacatgcgtggttggaataaagaatctaattaagaggaaatatgaaagcatatcaaattcttgaaggtgaacttaaaggcaccatttacatcgaagatggtgatgacgcacgagtaatcgtttcaaaagttcttaaagaagatactattacggatgctgaaactttttatggctacaaggcgcgtgaagtagaaattgaataccagccaacggtaaaagttgaaggcggtcagcacctgaacgttaacgtgctgcgtcgcgaaaccctgctggacgcggttgagcatccggaaaaatatccgcagctgaccattcgtgtttccggctacgcggtacgcttcaactctctgactccggaacagcaacgcgacgttatcgctcgtactttcacagaggcactataatgtcaatcgaagatattaaaggatacaagccacataccaatgaaaaaattggtaaagtgaatgctatcaaagacgctgaaacccgtcttggtcttatctttactgctcttgaagaagaggcattaatcaactaccaagagtcagccaatgaacccaagcaggtactcgatgaagcatacgaacgtattgcccagattcgtacagcaaaacagaaactgaaggaagcttctatgtgggcttgccgggcagtgttctgtccagaagaaaaatattaaaaagtagtttactttccttacgggccatgatactatggccctacaaacaaaggagaatgaactatgtcaactaacccagaagtattcattcgcagaactaaactgcgtcgtaagtttgaggaagcttttcgctctttgaatttatctgttcgtgcccgggcgaaagccgagggtaaagagcctttcttcactaagtactctgatcatttgttggaccgtgctattcaacgtgaaattgatgaagagtatgtattctctgttctttccaaaattcctaatcatcttaaagaaattaatgaattcttagcaatgccttggcttccaattgacccaaaagacattgatgaaaacatcgagtataagccaatgcggttagaaattacggatggaaatctgtggctagggtttaccatggatattccaagaccaggaaaaggacctagtataaagtgtcgtatggcattcgttaatgataaacgtttgaaaggtaaaatcagcacaaaagttatacacattaattgaggtaaacatgaaaaaagcgcttatcggtctaatggccttatgttcaacggcctttgggtctgagccaactttcagtaatgttcaacttgacaacttacattacgcatataattttggtgagcaatatcaaaaatccggaaaggaaaaatctccgcataaccgatatgataataacggcttaggatatataatggctgctatatcatggaaagaatcttcggcaggagccaatttaaaagcaggaaaggggcatcattcttatggggtatttcaaaattacttgcctacggttaaagccagagctaaattagaaggcaaaaaccttagtgattctgaaataagaaaaatgcttaaatctagacagaattccgcggaatgggcatatattgagctttcatattggttaaatatacataacggcaatatgcgaaaagctcttgctagttataatgcaggatggaatgtcaaaaggggaaactcttatgcgtcagatgtcctagagaaagctaatttcttaaagaaacataaaatgctacatataaaggtggaataatggtaaagtacgccgcgcttcttggattggtactggcattctctgctaatgctgaaaattcaatgacagattcacttcgtatcgctaaaacattttgcaatacgaactctgaatgtgttgatatattagcgcttgaattagattcagcattcagcgatggagtaaaagattcacgtagcccggcccagtggacaacactaataaatcgtaaggctaagagcatgaaagatttatgtgtcaatgctcctaacgaaaatatatgtttaatgtatcgtgaccaattaatggctcgttatatgtcaggactatcatcaaaatgaaaaaagcagctattttattatgctgcgcattttcagttaatgcctgggaaaagctcccaggctatcctgaacctgtactagcggcgcaggggactaaaatagaaagcaacggtccattcaagaacaatattgaaatagcatttgtgcctagcagtagaaaattgctaatgtcattttataattaccaagataaagatgaccaggtaatagttccacttgtcgaatataatgctcgcggatgtggaatgcagagcgatggcgtttctattgacggagtaatgcatcctaaagaacaaggagtgctgaaccctatccttaattgtaacaatgctatatttttaagagtatacaataatcttaatgaatatgcaacatataaaattccataggtgaataaatgattactggatatattaagggtaatattgtagaattattcatgaagcatgaatgcgatattgctcatggatgtaattgctttactacaatgggtgctggtgtagcaggacaacttgctaaagcatatcctccaattctcgatattgacatcgatgaagaccgttattatgacaataatttagctaagcttggaactcatactcgagccattcacaagaatggcactgcatattgctataatttgtatactcagtatgctccaggtccaaatgttgattacggcgcaatttttaatgcattccatgaactaaattctggtcgtattgtttataatcgtcctctatacattccaaagattggtgctggtattgctggcggtgattgggaactaattgagaaacttattaatttagcaacccctgatattgacattacagtggtagaatatgaagaggctaaaagctaaatacgtcttgttagaggtaaatagatgattactaaagagcaaaaaaataaactgtggcagttgattgacgattatgcaggtgccgagcaagtagtagctattagtgccatttacggaaatggtctacctgaagaatacgatgaactcattcgttctaagaatgctatttctgattttatggagacactttaatggcacagctttatttcaactacgcgagtatgaatgcaggcaaatcagctaaccttcttacagcagcccataactataaagaacgaggaatgggaactctcattctgaaacctgctattgatactcgggattcggcaacggaagttacttctcgtattggtcttcgtcatgaagctaatacagtagacgaatctattgacatacttgaatttttcaagtgggcacaaacacaacgtgatattcattgtgtatttgtagatgaagcacaattcttgactgctgaacatgttcttcagctatgtaaaatcgttgacttgtatgatgttccagtaatggcatatgggcttcgcactgattttcgcggcgagttattcgaaggttctaaagctcttctttctgtagccgataaacttgttgagctcaagggcgtttgccattgtgggcgtaaagctactatggtagctcgtattgatgaaaacggaaatgctattaccgacggtgaagtagtagaacttggtggtgaagacaaatacgtttctctttgtcgtaaacactggtgcgaactggtaggtgtttataatgaagccaagaacgtataatactctcctgatgctagttttaagtatgttattcatttggattggtgtggcagcatctatacaaagtgatagacgagaagaaatgcaaaatcgtcttaattccgaatgtaaagtattggcacagggtaaagactttattgctaatatgaatgggtgttatattaaacatgagtagcttatttgctatagcgggtggtatagtactagtactcgtgattgggtttttactatacgtaatattgctttcgttattggtttaatatgaaaaaatatgtgatgtgctatcgttgtcttcatgtatatgattacaacactgctccaaagactgctaccaagcgtcttaaaaccaaagaacctgaatgtccaaaatgtaaatgtaaggtcatctattcatgaatattaaattttttaaatcaggattttactatcgttgaggtactttaacttaacgaggtaataatgtctagaacaattcgccgtaaaggctggcatgtagtaaaatcttccaaatggaacgatcagaataataacgaatttgcttatattaaaagctataacgaatacgttaaaactcagaaagataaagaaacccaacagaaatatgttgaactgcgtatttctgaaaatcgggaaagaccgctagaggccaagaaactgattgctaaatcaaagcgcgatggattctggaaaactctacgttggacccgttatgctatgccgatcccacgtctatttcataaagccgaaattaaacgcgcattgaagtatgacgaagaatataactgggacgaagctggtgctagaaccattgagcaaggcatctgcgaatggctttgggattaagtaacacatacttatataaatactattactaactgatgaggtgtatatgcagcatttaagtgaaaagcaacttcgtaatcttactgtagaacaactggacgaacttcgtcgtgagattgggcatggtatttcgcaccttcaggaagaaattcgtcagcacagttcaaaagcagattatacccgtaaacgtaagctggacaaatacctcaaagaagttaaggctgtacttcagcacaaacgtaatactggacaaaaataataggaggccgtatggcctttaatcacatttgcttagccctggtgttgggctgcgggatttcactcccagctgcatcacacaacgacatttcggattataactcgtatgttgagggagctctacaagtttatgctaaatttaaggagcctagtaagcaagagtctgaacagttctattcttttatacaaagtaaatggaagagtgagtcttgttctaaagattgcgattctttaggacgttcagcaggtgaagaatatgctaaccgcatgaggatacaactcgataatgaaattcaatgattttgtaaaggacggtaaacttactccacaagatgaattcatcggtttacttatggcgtctcaggcgtattttcattcagcgcattttgataccaaatcgtatgccagacataaagcgtatgaagttttctttaacgagattccagatttgatagatgcttttggtgagcagtggttaggattctcaggtaagagttatacaccggctttaccatcgcagaaagagctgccaaaggacaccattgaaatgctagacctcattctggctaaggccgatggtatctacaagtcagttcctgccgccctccaaagtgttctggatgacattacaggtctatgctacaagactaagtatttgttatcattgcagtaataccctccgcctcctccgggaggcattttcttttcaaaaagttgtttacttcccttcattacatgatactatagacatatcaacaaccaaacgagaaaaacattatgattaagttaactactgaacttcaacctggaaaaatcttttatcacgtgtgtggtgttaatcgcacagaaactaaaagcggcgaaataacgcgttacattgttgcttcaggcacgtatgatgttgaactcggtcttcgcggtgtatattcgcgaaaatctcctttcttccgggtgatttgtgaatatgaaaactatgctggtcaaactgaaagttattcaactgagcgttctgctcatgatatgggcgtattcaagccaggtgaaaagcgttcggttcataatcttaatcgtgggttttggacgcgtgaagaagctgaacagttcattaaagaacttcaggaagacaagttcagcgatccagatgatcaagcatatgcagacagactgaccccttctgaagatttccgccgtcaacaagaatttatggattcttatcttgacagttgtgattatgattactacgactttgatgatggcgaagaatgagaaacgttttacttatcatctacattgtggtacaataccagcatccgatgtttacatataatttggtgcaaatgattctggagagtttgaaatgaatggatggggcccatcagatgacggatttgcaactcgcgaagctacaatagcagacgggattgaatgggcccgtcttcagaaacaactccaagaacagcgggaatccgaagagttctgtgttgattgtgatgaggaaatcccagtagctcgtcgtctgttggttaaaggctgtcaacggtgtgtagaatgtcaaggaaagtgggacattgtaatgacttctgcttataatcgtcgtggttcaaaagattcacaattgaggtaattatggaaagtattcttgatagtaccaatttagataatccgtacagtgatgtgcgtgtaaaggttgtgaattcatatttcactaaaaagttgagtcgtatcgtgctaaaacaaggcaatgatataattcatcttgatactaaacaaattgattcattaattcaattcttgatagaggcaaaagatggcgagtaaattagtatgggacggaaaatcccgtaaaggcgatgcagtaattgaagatgaaagcccgcatgttattgatttgtatcttacggtattccacacgtatgaacataatactatcatcgaaattgaacgtgacggagattgtgtagctattgataaaagcgacgctattgaactggtcaaatatcttgtaactatgattccaactatgaaggactgataatgaatattaataaaaactcttggcatttcaaaatgaacctgtggtttaaatctggcagcatgtggaaaatgccaaaaactctatgtggatacttctggacgacagttcttcatgttgtgttttcttcggcgattatcacgttcatcggttctgttgcatggatgttcggttggccgattgtggcagagacaggaattctctcttggataggtattagtttatccgcgttttggttaaacgttgtagcagtaccagttggcgcagtggttatagcagcatttgtgcttttatttgcagctatagcgtttggatttattttcggtttagaaaaatttaaagaataccgtaaaaataaacaatttacgaagaaacttgctcgagtaaaagcgggtcttcctgcagaagccgaaccatcggtatttgtccagtatttaaaagcccgtaagcggaaagtctgcccaatgattgattatgtagaaggtgataaatgaaacgttttattcgcatgaaatttgaagaaagccttattgaaaaacccttaaaggttggtgataaagtagaaattgggtttgataaccaaagcaatcgatttgagcttgaagttgaatttatttctatcttcaaatgcagctcagcgcatacggtatcgattttctttaaaagtaaagacagcaaaatcgtagtatattacgaccatagcagccgagaaacaactactgtagtatatccaaaagacggctaccgtggaatgtatatcgatgattacctaaatgaatcggcagacgatggattttatatctgcaaacttttaccgggtagttctaagtcggtaattaatctcagcagccttaaatacacagtttatgagaagtgtaaagttaatgttcctcttgtagtgggtgataaattctctacaactaataactgctatgaagtactagcaattgcagcagatggaagcatgttttgtcagaacgataaaagaaaagctcacgtgtttagtacaaatgacatctcgctcgttaaatctatgcttgatgttacagtaggtgaacctagtgaagaatgatcaagtttatattgtgaacggccttcgggccgtatttcgtgctaaaaccgaacgtggtataatttctacataccctattgccgaatttacttttgatgacggcgaaaaggttacggttaaatttattcctttgactggcaagtacagcggcaaagataacattgatttagacatacattatgagggcgggtcatggaaattgaaatcgtaactactaagaaaaaacttagtatgagcattgtgaaacagatgccgttagcttcagccgaaaacattaaattcgcaatgatggacccggaatcacgggtcctaggatatatcaatgcatttcgctggaacagacttgacattcaggtggcaatcattagcacaggaattgattgggcattagttcctatgtatgaaaccacactgcgtgaagaaacctgtcgtgaacagcatcctgatggacaagagtaccatacccacgaagtggtgtattattacaccagtcaaaaaattggtaatgtttaccgtacatcaaaaagaactacagataaaactcgagcagaagaagcagccaagcgttctaatgcattagttaaattcgctaaagggaatcatatttacttatgaaaacaatcgtaaaatcttattttggttcacatctgtatggtacttcaactcccgagtcagatgtggattttaaagaaatctttgtacctcatccgcgtgatattctaatgtgtcaggcgatgaaccacaccaatcgtaatactaacaacagcgcaaccaaaaataccaaagacgatattgaccatgagttgttcagcttaaagtatttcttcaagctcgctgctgacggtgaaactgtcgcgttggatatgctgcatactccaccggaattggtagttgcatctgaccttcctgaagtatggaaattcattcaagacaaccgagctcgtttctataccactgacatgaaggcttatcttggatatgtccgtaagcaagcaggtaagtatggcgttaagggttctcgtttagcagatttacataaagtcctggatgttatcagagatgttcctgaatggaaatatgacgatcgtcctcagcagaagggtatcaatgagcgttggaaagtacaggatatcgcagagaaacttcctctaggtgaattcctcaaatggaccaccttcgttgaccacaaatcaggcgagcagaagttttataacgttctgggtcgtaaattccagacgactatcactatcaaagagatgaagtattctcttgagaaacttgatgctgaatatggtgaacgtgctcgtaaggcagaagctaacgaaggcgttgactggaaagcactgagtcatgctcttcgtgcaggtctgcagcttcaggaaatctatatgactggtgaccttcaattccctctgacccatgctaaaatggtcaagatggtcaaagcaggtgagttaccgttcaaagaagtacaggagcttctcgagtctgtagtagatgaagtagaaattctagctcatactgctgaaaagaacggaatgcctaagaaagtagacatgaagttctgggacgatttcgtcgagaaggtttatcttgaaaaccacaattcttactacaaatgatacaatgaaggtcttcttgaattacggaagacctcataaaggtagacggtggtatttggaagcagtttgcagagagactggtcgtagagaaaatgctaaattctctgctcgaccaactcgaaaacaaatccaccgatttatgtcatgggccggagaagagctccggttctcactttattgggctgaaatatgattttactgtggagcgtagtagtgccaatcgttgttgcaataatttactttgtcgtgggttggtctgtctgtaagcatctaatcaaaaatggaaccatcgagaaagcaggagagtattggttttatctcatcttttggttccctgcgtttattgccggagcgattatcatgttcttccgctgggcaggtaaacttccaaaacgtatagcagaaaatgctatcaacaagcacgcataactgaggagccttcgggctcctctttttgtttcaaaagaatgaaaaaagtagtttacaagctcgcgagctggtgatactatagctccatcaaaacaaaacagagtaacggagaataaaatgtcaactatcaccatcaagaaagggatttacttcggcaaagagatttcaggtacttatgagttactcggtgagtggttcccggatagcttaagtgctgaagattctcgccagggtgatggtaaagtctttgttgaactgaatggcaaaaagcgcggtgtttgggtattcaaagatgatatcacaattgacggagtagctgctaaaattgaagttgttgaatccgttgatgaaatgaaagagcgtatcaagaaacgctttaacgtcatgggattaatgactaacggcttaatccacgggaatattcgttctctgattatctccggagcagcaggtatcggtaagacttactctttggataaagcattacaacatgctcatgatactaacgctattgattacaaatcagtgaacggtaaaatctcaggaattggtttatactgccgtctctgggaatcacgtgaagcaaattcagttcttctgattgatgatgtggatgtattctctgatatggatattttgaaccttctgaaagctgctttggattcaggggagaaacgtaaagtatgctggagcactgcatcttctttcttggaagataaaggaattcctaatgagtttgagtttgaaggtactgtggtctttatcactaacgttgatattgaccgtgaattagagcgcggttctaaacttgctccgcatcttcaagccttggtatcacgttcagtttatcttgaccttggtgttcacactaatgaagagattatggttcgtgttcaagatgtaataatgactacttctatgttacagaaccgtgggttaagaaattctgaagttattgaagttttggaatttatgaaagataacgtaaatcgtctgcgtaacgtatctctccgtactgctctttatattggtgatttcgtcgcgactgaccgtaaaaactggcgtgaaattgctgaagtaacaatgctgaaataattttaatgggaggagaaatcctccctaactgaggaaaatataatggctactttaatttctaatgatgtaaaacgtgttttgtttaaaggcggaatgtatatcgttgatactcctaaaggtgatacctcttcctggactattaacgagtggattaattacattgatgaaaatggagcgtgggtacaatgagtttagcagctattaaagatattgaatgttggttaaacgatattaaagtatatccgcctggtcatatctttgcaggtaaacccaagggtaaagcagagaaagcctgtgaagcaatctgtgaaaaactttataagtttaactttggcgataagaaaaatgtattagctgaagtccattcttcttatcatgaactacgtgtaatggtaaacgtatttcgtgctcctccgttcattgagctcaggaaagaatacgctaataaagtatttgatactttccttgcaaatgtgcaggatgcagtaaagcatttagacgaaatgcataaacaacaccaagatttaaatgcctattataagccttggcgtaaatcataccaagagcttaaaaaccgtattgaacttattcgttatgaggtgctaaaatgaaatgggtaatgacagaaagtgaagcctatgcagcgtatgtctctccagacgatcgccgtagtgagttgtttggttattatggttcatattgcgttgccgaagaagcagttaaggggcagtcttggtggggctcagatggtacagttaatcgtaagccaacggaactaattacattcaccgatgaaaatggcgaatcatggacttttcctaaaagcgctgctattagtgttcaggaagaaacacctgaagctaagcgtaaacggttggaaaaaattaaagaagccgctttggctaaattaaatcctgatgaacgcgaggcgctcggattatgaacaaagaatttagtactgctcgtatggtagatgcttttggatatccgtgcagcggatatcgtgaatttattcacccggaagttgaaaatcaatttaaagaagttgtaagaaatattttgctcaatgcatttaaaactcaaggaactaacccgagagatttaggcatttatcttgaagaagccatcagagacgtacaaaagagcgtatcggctaaacttcattgggctgaagaaaatattgcgtggtcaaacaagaaacgttctgatttaaattggcccgctgatcgtgaacaaatcgtcaattatgctaaggtgtaataatgttaaaaacctatgaagttaaatttaaacgctttattgatggcaaatgctatgacaataaagaacgttcaacccgaatttctgcgccgtcagcgtaccaagcagtatttcagcatgggcagaccaatggcgtggcattccctgagcaagacgttgaagatattatcttagatgttattgaggtaaaatgtgtttagtactatagtgtctatacatgcgtattacgaagggcagttaaatgctgcccgaaccaagtataaacgagggatggaggaatctgtggaaggtctcaaaggtattcagacacttgctcagaagacccagaacctcatcctgatggaccgtaaacagttattattggctgaagagctaaaagcctctaagatgcttatagaagacaataggaaacatcaagtgaaattgcttaagcagcgacagcaccagtcgccatggtttaacagtgatttccgatctttttaagggccttcgggcccttttgttgtttacatcttagaaaagccatgataagatagcttcgttaactaatgaggagattgaaatgaaagcacctacttggaacgaacttcaagaaatgttcaatactgaagaagcttttggaactatttctgaaatggttgagaatttagtagattctccttcagaagataatcttctgtgtttagcacagttcatcattgaaacctacatcgagaatcagaaatgacagtatacgtagatgtcttgatgaatcatggttggaaaatgagaggtcatcaagtaaagaactgtcatatgtttagcgacaaccttgatgagttacacgctatggcagaagccatcggaatgaaacgttcttggttccaggataagcgagttccacactatgatttgcgcgatgttcgtcgcaagcaagcagttgctctaggagcagtagaagtatctcgtagagatgcagttctgctttggagaaaatttttcacaaagtagtttactttcggcgaggctgttgataagatggtctcgtcaaccaaactggagaataaaatgaaaactttaaccgagattatctctgcacttgttgaagaaaatcgtgtagcccgccaagcacaccgagcgaaagttgaaaaacgcgccgaggagttgaatgctggatgggcgaagacccgtttcggtcgtgaatactttgataaagttgtagctcctacttggggcaaagatgatcgtcctcatgctccctttgatggttatctttgggaaaatgaattaggtgaagttgaagcttatcacgcaggcagttacttgccgtatgttacagaatttgattcactggataagcctgagtatacaggtgaccacggttggtggaaactccgcttaactcaagaagagtataaagaacttcgtgagtatggttatcctcttgaagtacgcgttccatataaagagtggaaattgcaagacggaacggatgttgttatggcagaagttagagcccataagagcatcttagaggctatccaggaacattcaaaagaggtctttgataatatattcaatgagctgaataagaataaaggggatgcaccagaaggacgagtgactgtctccggtaccgtaacgtcagtaaaagtttatgaagactattacggcgtacaatgtaagatgatggttgtacttgagaatggagctacggtttacggctcccttccaaaaagtattccgtttgaatacagaggcaaagtacagtttactgctacatttgaattagcgaaagatgataaaactcatgctttctataagcgcccaagcaaagttataatgcttgaggaataattgttgtataatgggttcagggagattttgagatactctttgagcccagtccaaaatagaggaaaagataatgaataagaatgaattaaagatgtttgtagccggtgaatttgataagcataatggaaagggcttgtcaaagcgtgagaagcacgtaaaggttttggcagctttacatgatttaaatccagctgcttataacgtagcaattgctggtaacgtagctcgtcgtgtgctaaatagcatggcagcacacgaagcaaactatgtcagttttgttgtagaaaacattcgtcgttctcgctggttaggtgcaatgtcagcagagaagcagctcaaaaagtttgctatcggcaatgctaaaatttatggtcagcgttatagctttgcggcaggggcgtttaaaactgaagaaagacacgaccgcagcgctgcccaaatcttctgctctgaatttaatgcaaacctgcgtcgtattcttaatcgttcaatttgcttacttaaaggcgatgaccgtgtgaaataccaggtatcttctactagttctagaaatcctaagggtgtttcatttattcgtgccgaagaacttgacaatgtaactgtacgaattcatattaacagccatttgtccagcggaaagtatccggcccgggcgcttttagcgcaagttcgtactgctttagaccatatggatgtagttaaaaaatcatgctgtaaacagcagggtgaaaactcatctgttcttgaagtacatttggacccatttaagatttttcctaaaacattgagcacacaggttattgatgaagatgtagcgcatatgtatctcaatgttgttaagcctcttccgttaacaccagtaaatcatgttgaaattgccaaaaacagtattacagctgaaatggaatcagttaagcggtttattgatacaaaagaagctgaattaagtaagcatgaattgatgatggcggatttagtcaaatcgcttaatgagtacaaagagcggtatgaatctctcgagtatgcccggagcttactgtgaaaaatcaattaaaagaagacatggtcgttgatgataacgaccttgaaattgagtttgagtatccacctgtacctgaatttaaaattgattgggatgcctgtcttgaaatggtagaccgtcgagaagctgcagctaaacaagttgtgccttgtgaaaaatgtggtagtattcaagtacagcttgttgattggacaaccgatattctgaaaatgaaatgccggacttgtaagcataaatttgagagaaaattaaaatgattactaaaactattactggtgctaatactaagttttttgtcgagtatgctaataacctcataaaagacaaaaactttgataacatcattgcagatatgattcttgacgcatacgaaagtggcatcgaccctatgcagcttaaagaatatcttcgagcgacaatggattttacagttcttaacatgatgcttagaactgatactgaattcaatgaaatgattgctcgtcgtaatgaaggcaagttcaatttgactgatgacgaagtattagcgtgtgctgctcacgaagcttggaagaaggtgattaaatgaaaaccactggcgcgctttggaaagaattttataacgatgaagccttctgggaaggctattatcatgatgacactttaatactctttgatgatgttgaagtagaagaatatgaagacccttcgcctgatgcggtagtaaaaattgaaagcggatatgtttacaaaaccgatgatttcttcacttcccatgatttgagtcttgccactttctttaaacgttggaaaaagaaacagaccgctcgcactattgtagtcaccgttgataaagataactttgacgaagtatttgaaactatctctaatattcctggagtgaaaaaggtaaaatgattgacattaaattagatacacatgcagtacgacagttatttccagaaggtacagaagctcgtgcccagcttcagcagtcggtaatcaataacatcgttaaagaaatggtgttaaaagattcccagaataaactaaaacaagcagtacaatctgaagttaatattgctgctgtgactattccagatgtccgagcagaagttaagaagcaggttcagcagatgttccatactcgcggttggaatgatatgtctgctaaagaagaaatgtcacagatgatgcgtaacgctgcccaatcatgcgctaaaaatgctattgatgatatggttcgtcaaactattgatgacgctgttaagcaagctgaaggccgtattaagatgtctattgaaagagctaatctccgaattcaagaaatcattgttaatgcaatgaataagaatttcgctgatcaaattaacgctgccattgctgctaaattggcagaacacttcccggtaactgctaatggataaaattgattttagcaaattaaatattcctcgcatgggaattcctgatgatattgccaagcaattagctagcgttcaaccaatgccagataattgcatcaaagatattctcgatgcgttagatggtaaaacattagttataactactaaggctgaaaatggctcgtaaacgatatatggaagaagccgaacgagtaatgctactcatgtattcggtttattataatgagactggtcaaatagttgatagttctaaactcaaaggagctatgactcgtggaagaaattttgcccaagctgcaattgatggcgaagtaatgaagcgtcttggtatgacaaattacgttaaagcagtatgccatccagattggaaccaagttcaagctcaagtatttaaggaaatagaagaagatgttcacggtttttggttacgacagcaacattcataagtgtgtgttttgcgataatgcaaagcgtctgctcgatgttaagaaacaagagtatgcattcatcaatgtaatgccagaaaaaggtgtatttgatgaagtagttatcagtgatttgcttcgtcgtctaggtcgcgaatcgcaggttggattaactatgcctcagatttttgctcctgatggcacacatatcggcggttttgatgaactccgtaaattcaaattcaatgcatgattatcgcggaaccctccttcgggagggtgatattgtagctctttattacggctatggcggattagaaaccggtgaaattaagcagattaagaatcaccgagcaaaggtagaggtaacttactctaatggagttaaggttatgtctaaatggaaatacggcgagtgtatggtgaaattatgaaatacccaattgagtttgtttttcctgaaggcgaccaagtagatttagaacgtaatcttcgtaaagcaatgattgaaagagctatatctgatccgcagtatgctttcatgcaccaatggggtgaattctttgtaaagcaaggaaatatcattcatggtgttcagtggagttatattggtcttgaagttgattacgatgctggtaatccattagggtcttggcgttgggaagatgaagagctcggaccagattttgaagttgattgttcttggcatgaggaagagttatgagttatgatattgatgatttaaaaactccacgaatggtaacagttccagctgaagagattgatcgtctccatgctattgaagaactgttatgggaaattgaatgctcacttccatctggtttagaaagctggattgacgatgaagacttacaaaaactgcgaggctaaaatgactaacgctgaattgcttaaagaaatcaaacatattgctggtgtcactggcgaatgggacgacaactatgatttcgaatatccaccgaacggtgatgatgaagaggaagaaatctttgttttagtagaagatggagattggacacaggaccataagtatcaaagccgttctcagatttggtattatccagcacgcggcgtccatttcatggtatcagagtctcgttcaggttcatatcataccgattggtattataatcctcctgaagtagatatcgtcactcgtcacgagaaagtagttactcgtactgaagttgaatggcgtattgaatacgattctgttaatgattccgctccggcaccatgcaaagcagcaaaggcataaaaccttggtatgcggctcggtgggaaactgtcgagccagaggaagatgctattcctgaagaagattataatacttctgaacctaccattaacgaactacttgattatgaggacaaagtgaatggaacttattggtaagcagtttgaagttatagaaaatgatgatgaattaactgaacaatttccccagtttgttcctggatttaaatttcaggttatcaatgcagttaatgaagatgaccttgaaacatgtggcattacagcagtaattgatttgctcacaaataaaatcatcacaattaatgacccaactccacacggcgaatcttggttctggtgtttctacagcgaagatacgatgcaccaaattaaagaaattggtcaaggtgaagatgttcctctgatttctgaaattaaacttaaccatttccaaggtgcaatcgttccaattaccagagctctttatgcctttgctggacaggaaaattgcgattcagaagagtatgctttaatgcaaaaagcagcagattatatcgtcgcacttgaacaacgtcttggagttcgccatgtctaaatcgtgcattactaaaactattacagtaaaaattctcgatttcgctgatattcatcgtgttacaagagaaattttacgcagtcattggtatgaagttggcgatgtagtagaatttagtggaggctattacgacgatgacatcaatggaatggcttggactaaaatgagtcttcttcatgaagaaactaattcatatattgagttcaatgcggatgattatgaaggcatctatgctttctgtacttctttctgcataaaagagtctaatcataacatctatagtagttactcgttaatttaactataaatactcttatctaatcgctgaggtaagagtatgttattaaccggtaagttatataaagaagaaaaagaaaaactatatcaggcacagaacggattatgtccttgctgcaaacgtcctttagatgaggatattcaaaagaatcacctcgaccatgaccatgcgttagaaggtgacaatgcaggaaaggtcagaggcttgctctgtaacctgtgtaatgcggcagaaggccaaatgaagcataagttcaaccgctctggtttaaaaggtcaagatattgactacctcgaatggttagagaatttgctggtctatctccgccagaatcgtaaagacagtaatattcacccgcaatatgttgccgatatggctaaacgcttttcacgtcttggtaagcctgagatgattgctgaaatggaattgcatgggtttacatacgaggaaagtgatggaaaatcacaacttgcttcaaaatacaagaagcagcttcgtaagagtttaaaatgaatatcgaattagaaatccagggacttattaataaaaccaacaaggaccttttaaacgagaatgctaacaaagattctcgtgtttttcctacccaacgtgacctgatggctggtatcgtatctaaacatatcgccaatcaggtcattcctgcctctgtaatggaagcacacaaagaaggtgttatccattttcatgatatggactatagtccagctttgcctttcaccaactgctgtttggtagatttgaaaggtatgttgcagaatggctttaaacttggtaacgctcaaattgaaactcctaagagtattggagtagctactgctatcatggcgcaaatcactgcacaagtagcatctcaccaatatggtggaactacgtttgctaacgtcgatttagtattggctccttatgtagagaagacattcgctaaacacgtacgtgatgctcgcaaatatcaagtagcattagtaaaagattatgctatttcaaaaacagaaaaagacgtgtttgatgctttccaggcgtatgaatatgaagtgaatactttgttcagttcaaatggccaaacaccgtttgtgactatcacatttggtatgggaacgtcatgggaagaaaaattaattcaacgagctattcttgataatcgtattcgtggattaggacgtgatggaattactccaatttttccaaagcttgtgatgtttgtagaagaaggcattaatctacgtaaagaagacccgaactatgatattaagcagcttgcattagaatgtgcagctaaacgcatgtatcctgatatcatcagtgctcgaaataatagagcaattaccggttcagaaactcctgtatctccaatgggctgtagaagtttccttggtgcttggagagactcttctggcaaacccgttcttgatggccgtaataatctaggggtagtaacactgaacctccctaggatagctctggatgcaaattataaaagttcggatgacagtaataaactgttcaaactattggatgaacgccttgatatttgtaaagaagcccttttaactagaattaaatcccttgaaggcgttactgcatcagttgctcctattctttaccaggaaggtgcttttggtgtgcgtatgaaacctgatgatgaaattcttgagctattcaaaaatggacgtagttcaatttcattaggatatattggcattcacgaatttgatatgcttacttttaaaggaagcggtaaactcgtcctgaagtacatcaacactaagctaaacaagtggacggaagaaaccggctatgcctttagtctgtactcaactccggctgaaagtctgtgctatcgtttctgtaagattgaccaagccaagtttggcgatgtaaagggcgtaactgataaaggctggtacactaatagcttccatgtgtcagtagaagaaaacctgtcaccttttgaaaagattgaccgtgaagcaccatatcattccattgctaaaggtggtcatatttcttatgttgaacttcctgacatgaagcgcaaccttgaaggtcttgaagcggtatgggactatgctatcgagaagttggattattttggtgttaacatgccagtagataaatgtctttcctgtggttctactcatgagatgacacctactgaaaacggattcacgtgttcaatttgtggtgaaactgatccaaagaaaatgaatacaatccgtaggacttgtggctatcttggtaatccttctgagcgtgggttcaatcttggtaagaacaaagaaattatgcatagggtaaaacatgttagagaaaccaatgaagcaagttgattggaaccaacttagcgaatggggattgatttggaaaatcaacaaagaggttctgcacccgcttggaattgctataacccgtgaccccgaaagtggattatcggctggggctattcaaactgatgagccctggaaatatgatgcagaagtagaagcacgtaatgaggtaaggttcaatgaatttcgacagaatctacccttctgactttgtgaatggccctggatgcagggtcgttctttttgtcaccgggtgtttgcataaatgcgaagggtgttataataaatctacttggaatgctagaaatggccagttattcactatgaatactgttaaagagcttgcatcccatttaagcaaatcgtatattcaaggtcttaccttaaccggtggagacccgctttatccacagaatcgggaagagatttcaaatttagtttcttgggttaaagcaagatttccggagaaagatatctggatgtggacaggatataagtttgaagatatcaaagatttagatttgctacaacacatcgatgttataattgatgggaaatatgagaaatcactgccaactactaaaaactggcgtggttctgacaaccaaagactctgggtaagaaatggttctacctggacacacgattgaggaaatagatatgctgacttacaaaattatgtttaccctgaaccacatggctactgaactgtttggaccggaatttctggctatgacagcgttcatctttactatttaaggaaaattatgaaattcattaatgctattcgtaaatttatttctaacgttatcgctttggttgcattaacggcaggtgctttcgtagcaattccgttcattgtccttattatcatcgcagattggattaatcctaccaagaaagatgaaaagttatctaatgaagaatttcagaaacgagttaacactctgactgctaaactccaacaggtcatgaaatgatagaaatctatggcatccctgaagaagtttggagatgccctggatgtaaagcagttcgtgacttgctcgataagctgcaacttccgtatgagttctataacgtaatcaacgaggttgacggtcaaccggtttatgaccgtccgttgattgagtcacttgctaaacgcatcgggtgctatccatcgcttgctattcggtatcctgtcatttttatggataacgttaagcagtatgacattccaacattcaaaaccaatcttattgctgctgggcatgacccagatatcatagaagattaaccagttcctttctaaggtcatcttgaccaccttctgtatatttctatacccttcatttagaggttcctatgggacctctcttttattttaaatccatttcacaaagttgtttacaagctagctgatgagtgatactatagccctatcaacggataacagcataccgtttaactcgagaggaaaatatgaactggttaaattggcaagaagctctagaagctatgagtaaaggctgtaaagtaaagcatgtgcattttactgatgatgaatacttcttgatgaagaacaaggtcatctgtgacgaaaacggatatgatatgactcgctggtacaagggtgagtcttggcaaaacgaacattggtacatcgcatgaaaacttttgctgtaggtgatatcgtccgtaccagaatttgggatgggcttcaatttgaagtagttgtctacgtcggttcagatggggttctgcttcaccgaattaacaatctgattaagtggcacctagaacgcttcgtgaaataccatgaattcaatagctaccactgcactgtagctccggttgctagtaaagaatactacgatatgctcgaagagctaaaatctctcaaagattgatttgctacaggagatttgatttaaaatctcctctgtcaaaacaatcgttactgaggaaattaatatgtcccaagcaatcaaaaacgtactgaactcttttgcttatgataaagtatctgcaatgctggaagaaggacgttgtgtaactccgtctttgcttgatcagtgggaagttgagcttcacggtacgatgaaagaagaaggtcaaaaaattggtaaagctcgcatccgtgaattagttgttgcttatcttctgtctgaatttggcatcaaagcctttggtgtagaaccaatcactccgggtatcggtgaaatttctgaaagcactattcgcaagatgaagaatcaacgtaagaaaggcttccgcgatgttaaagcggttaaggcggcgaaatgatttcatatatcgtgtgcgcatctattcctaccggtgtatggcatagaaggattaagtatatccgggctcattctgagcctgacattagtcaagctaaacggatactcgcaaatcaatgggatgaagatactagcgtaattatcagagtatttccaattgattcatccactctagacagccaacttccatctccgtcagagatgtggcaagaagggttaaacgagcaggaactgcgagagtatcttgatgcgtaaggttattctatacacagaaatttttactaaccgttgggtatttgatagtattttgcttgctgataccaagtttgccgatgatattggcagagctagaaaactggcgtatgaattggcagaaaaatccccaacatttgtacgtatttcatacattataacaacttctgattatgtgtataaagtatcaaaagaagcattatacagattttgtaatgttatgatttcttctggaaaggcattaaactataatcaattggtggaaattctaaatgactgaagaacaaattgtagaagttggtttgcttggatggttcatatctaaaacgcctgatggcagaaacaatattgaaactcctaacggagaattcattattgaagaagattttgatgcgttttggatttatgaacgttctggagagaatgaatacacatccgtggatgctttctctaaatttgaagacgctattgatacggtgaaagcatggctaaaataaaccaaattatgattgtggtagaaggcattggcggatttactatagattcttatatgggtgtttggtttgacaatgaagagggcatgtattgggaaacgcatgcctctatgttaaatgaaactcattatgaaagtttatactcttcattcatggaaatgatgcatgaagtagatgaatctgattggtttgaacttagtttggttgagttcaaacgtatcatggaacagctgttccaatgctatcgcattatgaagggtgaactatgaaaatccagctgactcttacccatgaaaatatcaatggtgtgttttgtcttgaaaatagccaaattacttttgcacaagatggaacgtactggtatgcagaatcagatgatatcgctggttatggaatggagcgggtgtttgaagattttgaagccgttattgatgttccgctaaatttcacatataacgatttttatcgtatcatgatgaaattaattgcatgcgctgaattgattaagtaatgctttaatcctctcgcttcccaaatttgatataatagatattattaattgaagcgaagaggcaatatgagtaattatgtaaataacaaggaactgtataaatcaatctgtgcatggaaagagaagtgccgggagtctgaagctgctggcggccctcgagtagtaaaacagaacgatacgatcggccttgctattatgctgatcgcggaaggtctgagtaagcgtttcaacttttcaggatacacccaatcctggaagcaagaaatgatttcagacgggattgaagccgcaattaaaggcttaatcaacttcgatgaaactaagtatgataacccgcatgcgtatataacccaagcttgtttcaatgcattcgttcagcgtatcaaaaaagaacgcaaagaaatggcaaagaaatacagctattttgtccataacgtgtatgattcacgggacgatgatatggttgcgttagcagatgaaacctttattcaggacatctacgataaaatgacgcagtatgaatccaccgcttataaggcgccagggtctgctaaaaagagcgaacctacaagcgatggacctaatctggaatttttatatgaggctgaagattaacctcgacgggtttttagaagatgtgcaagacctagacgctatcccttatttgctaaagatgtatttaagggaggtgcttgatcttgatattcacattgacccgaaaaatccacatgacgctgatttcaggtcagattctgctataattgaacatagttataattggactgatactgaattcacatttgaaataaattaccatccaaaggaataacatgaacaatattacccaggaagagcgcgacgagctgcaacagaaactaatggaagcggcagaagaacaagctattgctcgagccaacaaagttgttcgtaaaaaccgtcgtgaacttgagcgattacgagctcatgctggagacgcggtattagacaataatttccctgcttacaagtatgctattgaaaaactgcgtactattttaaaacaaccttttaatgatgagattattctgacttgttggaatacctctcgtaaatctgtttgggacattctaaatgctggtacaagtaaaatttaaacgtgttcgtaaagacgcaggatttactttaaacactgcgactggtacgatggcagtaaaggtagcagataatcaatatcgcgtgttaggctctaccgaaggatgtaagctaattgataagaactctcttgtctgggttgacaccttccaagttaaacggtggtatgaatggtaaatgaagagaactggggattcattgatttagatgaacaccctgattttattactagtgaagagaattgggatgtatgacgaatttgatgggttctaatcctggacatgattggccggaaggaaattacacgtgccggtgcagtaattgttcagaacgttatacaggaccaaagcgtagttacttctgttataaatgtgatactgctcggagagaagcacctgctcccgattatgaagcgattcataatgctaaggtagatatgcttagacgctttgaagaagctaagcgtatatgtgaagcagtgggttatgttgtatacaagaaaatttaaagggcttcggcccttttgctttattacgggaatggtaaaatatccaaaattaacaacaaaggtcaatatatgaagattaatattttaatggctcgcggacttgagggatgcggcgtaaccaagttcagtctcgagcaccgtgagtggttagtaaaacatggccatgaagtaaatatcatttacgctaaagataaagcgtttactcgtaatagagcacatagctataaagatgtaactattcctgtgtctcttgcagatgactatgataagactttatctctgcttaacgcatgtgacattcttatcattaactcagtacctgctatcaatgctccagaagcagcgattgataactataagaagctcatagagaacattaaacctgaagttagggtagtcgtatatcaacatgaccatagagcattgtcacttcgtagaaatgctggtcttgaagaaaccgttaagcgtgctgatgtactgtttagtcatagctcaaacggcgattttaataccgtgctaatggaagaatattttccaagcggcgggttgagtttctttgatgattctgactcagctcctccggtttataactttcaacctgctatgaacatcaaagcaattcgtgataagtattggaaagacttctctgctattgattttgatattcatcgttggattggtcgtactactacgtggaaaggctatttcttgatgtttgactttcatgaaagtcatctgcgccccgcaggcaaaacgactatcttggaagggttagaacgcagtcctgcatttattaacatcaaagaacgctatgaaattgattattgccgtcattatcatcaggttaaaactggaccaggtctgaatcctcaagttcttgaccgatatgttaactctgaaatgcttgagcgtatgtctcagtctggatttggttatcagctgtcacgtcttccagataaattccttgagcgttcgctggaatacacgcatttagaactaggcgcttgtggaactattcctgtgttccataaagctactggtgatgctttgaaattccgggttgatggaaagccgttgacttctcatgattctggcattctgtggttgaatgatgaaaataaaaatgaagtctttgaacgaatgaaacatctgtcatctgaccagaagctctatgataaagagcgaaataaagcatttgaattcctggtagaacaccaagattctgagcattgctttaaagaacaatttgagttaatgacaaaataagtaatgggccttcgggccctttttgctattcatggaataatataaaattaaactctactagagaggttatatgaaaattattcactcaggcgattggcatttaggtgtccgcgcagatgacccgtgggtacaggatgtacaacgacacggaattaagcagcatattgattatgccaaaaagcatggaattaaaactatcattcaatacggtgatatttttgacgttcgtaaagctatcactcataagacaatggaattcgctcgtgaaattgcggagtctcttgagaaagaaggaattaacttaattacgatcgtcggaaatcatgacatgcactacaagaatacgttgacgcctaatgcatcaaccgaagttcttggtaagtataagcatattactgttattgaaaagcccgtgactatggattttgatgggactttgattgacttgtgtccatggatgtgtgaagagaacacatcagaaatcatgaagcatatcaaagaatcgtctgctgaatactgtattggtcactgggagcttaatggcttttatttttataaaggaatgaagtctcatgggctggaaccagatttcctcaaaaagtacaaacaagtatggtctgggcacttccataccatatcaagcgcagcaaacgttaagtacatcggaacgccttggacgcttacagcgggtgacgagaacgacccacgtggcttctgggttcaagacactgaattatcaacctttgatttcgtccctaatgaaatcacttggcatagaaaactgatttatcctgttactggaaaaattgactttgaagagtttcgtaatctcgcagtacgcattattatcactgcggtcgatgaagaccttcctaagtttgaatcagaacttgaaaaggtagtacatgaattaagaactgtttctaaagttgacaactcggttgagtctgaagatggcgaagaagtagaagttaaaagcttattggatttaatggaagaatatatccaagcacttgaagacctatccgcagatgatatcaaagccttaaaggttatgtctaaacagttatacattgaggcacaaaatcagtgaagacttttaaactaaatcgtgtcaagtataagaatataatgtcagttggccaagcggccattgacattcaacttgataaatgccaaaagaccttaatcacaggtaagaatggtggtggcaaaagtactatgcttgaagctattacttttgccttatttggtaaaccattccgtgatattaagaaaggtcaattaattaactcattcaataagaaggactctgtagtagaactgtggatggagtatgatggtcatagtttctacattaaacgtggacaaaaaccgaatgtctttgagattttacgagatggcaataagcttgatgaagccgcaagttcaaaggattttcaatcctactttgaaagtctcatcggcatgtcatacacatcgtttaagcagattgtcgtattaggaacggcaggatatactccgttcatggggttatcaactgctaatagacgaaagctcgttgaagatttgcttgaagtgtctcttttggctgatatggacaaactgaacaagacacagataagagaaatcaatcagcaaatccaggttaatgatgttcagcgtgaagcattgactaatgaaattaaaactcatcatgagtatgcagaaaagcagaagaaactttctggtgataacgtagctcgcctgcaggcgatgtatgatgagcaggtgaaagaggcacgaggatataaagcagaattagaaactcttcaaagcgaactgcttgaactcgtgattggtgatgacccagcagagtcaattcaagaagttcaaggtaaaatctttaagattcgttctaaaattgaatcatactcaaaggttcttgggttgtatgataaaggcggtcattgcccaacgtgcttgcaggatttgcattctaatgacactctaatcactaagattaatcatcatgttgaagaatgtaataccattcttggcgagttaaagacgcgccagagtgaactggatgaactagctcgcgagtataatactattcgtacgcgtgcaagagacatcaaaaatcaaatgagtaatttgaaacagatgactttaactgcagttgataaagcacgtcgtattaaagcagcaattgataaagcatcacaggagttcattgataactctgacaagattgaactgctacaagaagaattagataaaattattctcgtcaaaactaatttggttatggaaaaatatcgtcgtggtattttaactgaaatgctgaaagactccggtattaaaggagctatcatcaagaagtacatcccgatgttcaataagcaaattaacagctacctaaaaattatggaagctgattattcgttcacgttgaacgaagagttctctgaaacgattaaatctcgcggacgagaagagtttagttatgcctcgtttagtcaaggtgaaaaagccagaattgatatagcattactattcacgtggcgtgatattgctgaaaaagtttctggtgttaaaataaactgtttgttccttgatgaagtctacgattcggctaccgacgcagaaggtgttaaggcaataactgctattcttaataagatggtagatgccaatgtgtttattatttctcaccgtgaccacgacccgcaggcatatggccaacaccttcaaatgaagaaggtcggacgattcacggtgatggaatgaatgagtttactacgggccaacatctgttggcctttcctgaagtaaagcgatatgtgttaactaatttgttttctgatgaaaaacacttagtaacagaagaaatgttacgagatgcttttacaggaaatgaatataatagagtcatgtccagcaggaatcccggttggatggttgaagattattacgattaaggtaaatataatgattaattttgttgatgtgaaagatatccaggttaaaaacgtacgtgcagattccaacccgaataaccaaaatcgtattcgtaagtcttgggttctggctctaactgaagaaactaaagcagctattaaagataagattaaagattctgaagctcgctttgctttctataaatctattgacgacgaagttgcagaaaaatggattgaattgatgcgtaagcattacaacgaatcaatcaaggctggtgctaaaattgttactgaccgtcatggtggcgaacgtctagaaaatgattactgcgtagatgctgatgagcaactcgttgcggcaggtcagattgttgcagaagaattaactgctacattcgcagcttgatataattatcctgaacttaattaaaaggtattgaaatgaaattctctaaagaaactctgaacattctgaaaaacttctccaccatcaactccggtatcatgctgaaacctggcaattttatcatgactcgtgctgttaatggtacgacttatgctgaagccacaatctctgatactatcgatactgatgtagcaatttatgacctgaacagtttcctgagcattctgtctctggttggtgatgatgcagatattatcatgcaggaagatggtaacctggcaattaaagatgctcgctcaactatcttctggccagcagctgacccgagcacaatcgtgttcccgactaaaccaatcccattcccggtggcaaacgtaattatcgattttaaaggtgaagacctgcaacagctgatgcgagtatctcgtggcatgcagattgacacaattgctatcaccaatgttgatggtaaaattgttctgcgcggttataacaaagtagaagatgctgcactgacccgtccgaagtattccctgaccctcggtgattatgatggcgaaggtaactttaactttatcatcaacatgagcaatatgaagatgactgttggtgattacaagctgatgctgtgggcaaaaatgaacggttccaagaaacagactgcagcaaaatttgaaggtgcatcagcctcttatgtggtagcaatggaagcagatagtacctttgactttgagtaataacttcggggcttcggccccatctttaatctgaatgaggaaatataaatgaaattgacagtaaacgaagcagactttatgtgggaacagaaatatcgtccaggtactatttctgagtgtgtattgcctgctgaagataaagaaattttttcggctttagtagctaaaggaaaaattcctcatttaattctccatagtacttctcctggcaccggtaagaccacagtagctaaagcattatgtaatgacattaatgctgaaatgatgttcgtgaatggttctgattgtaaaattgatttcgttcgtggaccgttaactgcattcgcaagttctgcatccattgcaggcaagcagaaaattatcgtgattgacgaatttgatcgtgcaggtcttgcagaatctcaacgacatctgcgttcattcatggaagcgtatagcacaaactgtactattatcattactgcaaacaaccttgatggtatcattaaacctcttcagtctcgttgccgtgtaattaattttggtaaaccatctccatctgatgttaagccaatgcaaatcgagatgctcaagcgttgtctcgcaatttgtgaaaatgaaggcgtggtggttgaagataagaaagttgtagctgctttggtcaaaaagaattttccagaattccgtaagaccattaacatgcttgatcattattcttctaagggtgtgattgatgcaggtatcttgtctatcgttctgaatgaccgtggttcaattgaagatgtcatcgaagctattaaaactaagaacatcaaagaactccgtgctcttgctccaaaatatgcagcagactatacttggtttgtagataaactttcttctgagctgtatacaatggttactggcccaagcattatcagaatgtatgaaatcatcggtgaaaataaccagtatcatggcatagcagcttcgattgaattacatttggtttatatgcttattcaacttgttgtagagatgcagtggaaatgatgagtttatttgaagatgatgatcagtataatgagcaccaaatagcttggttaggtaaagactggacgaaagtccaggaattatctgattcatataaagaaaaagcagaaaatcaattcttcacaattattgggtctattaacgaaaagcaagagcatttgaatatctcgacgatggattattcaaaattcatggttgaaaacgctctttctcagcacgctgactgtatgcctgcggtttatgttatgaaccttgttggtcaagggttatctgaccaagcacactataactatatgatggcctctgttcctagaggtcgtcggtatggtaaatgggctaagttaacagaaaacatccaggatgcattgattcttcaagttataatgacatattacaaggtcaatgcgattgatgctaggatgtatagagagaccctggaagctaaaaacaagcttaaacctgctctcaagaaaatgaaaggtcttgtgactgatgaattggtcaagacaatcacgaaaaacgtgaaagaacagaaaaatcttaagaaaacagcattggaatggtaaagatgattgaaattacactgaaacagcctgaagacttcctgaaagttaaagaaactctgacccgtatgggaattgctaataacaaagataaggtactatatcaaagctgccacattcttcagaaacagggtcgttactatatcgtccattttaaagagatgttaaagcttgatggtcgccctgttactattgacttagaagatgaaattcgtcgagactcaatcgcacaactgctctctgactggggtctactgagtattaatcgtggtcaaactcttgcacagatgcagaataacttccgagtaattacattcaaacagaaacatgaatggactttaaaatctaagtacacaatcggtgcgtaagaaaagggcttcggcccttttactttataaaaatcggagtataattatcccacctaaagactaataactcggtctataaacaaaggaaacccatgaaagaattttatatcagcgttgaaactctaggcaatgacattgtagaacgttatatcgattctactggtgaggaacgcatgcgtcgtgttccgtattctcctgttatgtttagtcattgcatggaagaaacaaagtacaaagacatctatggcaagtattgcaagaagaatacattcccaactatgaaagatgcacgcgattggatgcgtcgtatggaagatatgggaatggaagcaatgggtatggatgatttcaaacttgcttatatcagtgatacttacggttcagaaatcgtctataataaaaaattcatccgaattgcaaactgtgacattgaggttactgcatctcaattcccagacccgatgaaagcagaatatgaaattgatgctatcacccattacgattcggttgatgataagttctacgtatttgatttactgcattctctttatggttctgtttccgagtgggacaagaaactcgctgctcgtttagattccgaaggcggtgatgaagttccacaacatattcttgatcgtgtggtgtatatgccattcaattcagaaaaagaaatgatgcttgagtacatcaatctttgggaacagaaatgcccagcaatctttactggctggaacattgaaggatttgatattccgtacatcatgaatcgtgtgaaacagattcttggtgagcgtgcgatgaaacggttctctcctctgaataaagtttcatctaagattatcacaaacatgtatggtgataaagaaatttattctatcatgggtgtgactattcttgattacatggatttgtataagaagtttagtttcacgaaccaaccgacgtataagttggatttcattgcttattatgaaaccaagaaaggtaaattagcatatgacggtccaatcaataaattgcgtgaaactaaccaccaacggtatatttcgtataacatcatcgacgttgaatcagtacaagcgattgatgctgttcgcggatttattgacctggctatctcgatgtcttattatgcgaagatgccgtatcaaggtgtaatgagtccgattaaaacatgggacgcaatcatctttaacagtctgaaagaacaggacaaggttattccgcaaagtcgttctcatgttaaacagtcatatcctggtgcgtatgttaaggaaccagttcctgctgcatatcgttatatcatgtcgtttgacttgacatctctgtatccgtcaatcatccgacaagttaatatttcaccagaaaccatcgttggacagtttaaacttcatccattgggtgagtacattaacaagactgcaccacgtccgtctgacgaatattcatgttcacccaatggttggatgtatcgtaaagatgtagatggtgtcattccagttgaaatcgcgaaggtattttatcagcgtaaagagtggaaaaataaaatgatgggtgccaaacgaaatcaagaactgattaaaaaggttctgaatgataagaagtttggaactatcgataaattcgcagaagttaatgtctatgaagatttctctgatgatatgaaagcagaactgctgacatataccgaagagtgccttgacaaactgatgtttgaatgtaaacatgctgaaatcttgggtaatactaatcagttaaaccgtaagattctgatcaactcactttatggtgcattgggtaacatttacttccgttattatgatttgcgtaacgcatcagcaatcacgttgtttggtcaaatggcaattcaatggattgaacgtaaagttaatgaatatctcaacaaggtatgtggtactgaaggacattcgtttgtagtagctggtgatactgactcaatttacgtttgtgttgataaggttatcgagaaggtaggtcttgagcgtttcaaagaaactaacgatttggtcgaattcctgaaccaattcggcaagaagaaaatggaaccttggattgaccaatcatatcgtgagatgtgtgaatacatgaacaataaagaacatttaatgttcatggaccgtgaagctatttcttgtcctccgttggggtcaaacggcattggcggattctggaaagcgaagaaacgatatgctctgaatgtgtatgatatggaaggtactcgatatgcagaaccgcatctgaaaatcatgggtatggaaactcagcaaagttctacaccaactgctgttcagaatgcgttggaagaatctattcggcgtatgctgcaggaaggtgaagaatctttacagcaatattataagcagtttgagtctgagtatcgtgaacttgactataaagtaatagcagaagttaagaccgccaacaacatcggtaagtatgatgatggtgcaggatatccagataaaggtacgccatatcacgtcaaaggtgctttagcgtataaccgagctaccgcgggctttgaaggtataacaccaatcatggaaggcgagaaggtgatggtcatcccgctgcgtgaaggtaacccgtacggtgagaaatgcatggcatggccatcgggcactgagctgccacaagaaatccgacaggaagttctagtgtggcttgaccacagtgttctgttccaaaaatcgtttgttaaacctctgacgggtatgtctgaagcggcagggttagactatgaagagaaatcgtctcttcttgacatgttcgatttttaaaaaagttgtttactttgccacaaggatgtggtaccattgttctcgaaataacatactgaggagattacaatgaaatcgttacttgctgttatcgttgctctcacgctgactggttgtcaaatgccacaaggtgatatcgtcccggcttcttctgttggacaggtgcgagcaattggcggtactgtaggatactatcgtgctagcaaccaggtctctgctgaatcgctcgcggttgagcgtcggttggcgaaagaaaaagctaatcctaatcgtcagctatctgcgatggaactcgacatgattgagcagaataagcatgagctggaagaaattaagcgtctgcgtaaaactcaaaaagaacgtacatgcactgctcaagcggcagcagtgaatgaccagattcgtttaactgattttgctaacggcggattgagttataatgagcataaacaacgtatggagcagttaaaatctctccaaaatcacatctacaacaaatgcatgtctaactgaggagattaacatggaagcagtatttggtttaatcattcttttcttcatctattttttgccgacctttgtagcttgcagtcgtaagcataaatcacggggtggaatctttatcacaaatctagtattcggttggtccattatcggttggttaattgcgctgatttggtctgcttctaacgcacagcagaatacaattattatccagcaagttaaataagaggtctcatgattgtaactccaatgacagtacaagatatccgtcaagaattcgctgatgctttgctcaacaaagaatttgtgattgataagacgggtgtgaagactattgaaatcgtaggtgcatcatttattgcagatgagcccctgatttttggtgcagttaatgatgggtacattgcccgtgaacttgagtggtataaatctcaaagtttattcgttaaagatattccaggtgaaaccccagctatttggaaagcaattgcatccaaacatggtgagattaattctaactatggctgggcagtttggtcatcacaaaactattcgcagtttgctaactgcgcaaaggaacttatcagtaatcctgattctcgccgcggaattatgatttatacacgacctcaaatgcagtatgattttgagcgcgatggcatgagtgatttcatgtgtactaacaatgttcagtatctgattcgtgataataaagttcatgctgttgtaaacatgcgctctaatgatgtcgtctttggatatcgtaatgactatgcgtggcagctctatgttctggaacagttaaccaaacttctgaatgcatcaggtaaaaattattcagttggtgacattatttggaacgtcgggtctttgcacgtgtatgagcgtcatttctatcttgtagataactatgcttatactggtgaaactcatattgcaaagaaagactataaaggtgagtggaaatgattcagtttgtaattccaagttataagcgtgccggggcagttactgccctgactatgtttcctgaaggttatgttccgcatcttgtagtacgtgaatcagaaaaagaagcatacgaaacttggcacggtcatgctgctaaaatcgttactgtccccgatgatgttgatggaattgcaggaactcgccgtctgattactgaaatgtatgcaggacaacgaatttggatgcttgatgatgatacgaccattcatctgactgaaattcgtgaacgcgacgatcgccgtgttccacttggtgccggcgaggcaatgagtcaagaggtatttgatgatatggtcaaatacgtagagactgctatggattgtggttattatcacggtcatgctcgcttgccgattttcaaaatcacatcaagctggggtcattatcgcgagaatagttttgggttcaccaatactttctatgatttgactaaacttaccgcagaagatattggttacggagttattgaccttaacgaagatgcttatgcttttctaaaattaattaacatgggtcatcctcatctggctctgtttaagtatctcgttaaatccggcaaagtgcagtctcctggtggttgttctacacagcgtgatactgctcgtcagaatagagcccttgaacagctacatgctgctttcccaaatcaagcccgttggaaatctaaagacggcgaaagacgtgggttattcggtgataatgaacctctgaaatcaattcgtatgtgtattaacactcgagtgaaatctcaggccttccatgaatttggtaaggtagaaccatatctgtgagggcgaaagccctccaaggacctcttatgaacatctatgataaatctgacgtagctggtaatatattcaaggctgaagaattcagatgcttcgtatgtaaatctgatgagtttgttcatgaaggaactactggctcagatggaatgcattgctggtggcatggcatgtgcgttggatgtaaaatacactatgaaatagatatggaaacagtggtttataacaccaagaagaaatggaacttctgataatagcttcaagaacaaagtaatataattactctatcctttaacctgtgagaaaaatataatggagacttatggaatataatgaatgtctgacttaaaatctcgcctgattaaagcatccacttctaaaatgacagcagaactgactaaatcaaaattctttaacgagaaagatgtagttagaactaaaattccgatgcttaatatcgcaatcagtggagcgttggatggtggtatgcagtccgggttgactatcttcgcaggtccatctaaacacttcaaatctaacatgtctctgacaatggttagtgcttatcttaataagtatcctgatgcagtctgtttgttctatgattcagaatttggtatcactccagcttatctgaaatctatgggtgttgaccctgaccgcgtaattcatacaccggttcagtcggttgaacaattaaaaatcgatatggttaaccagcttgaagctattgagcgtggtgaaaaagtcatcgtgtttatcgactctattggtaacatggcgtctaaaaaggaaaccgaagatgctctgaacgagaaatctgttgcagatatgactcgtgcgaaaagtctgaagtctctcttccgtatcgtaactccttacttctctattaagaacattccttgtgtcgcggttaaccacacaatcgagactatcgagatgttcagtaagacggtaatgactggtggtacaggtcctatgtattctgcggatactgtgttcatcatcggtaaacgtcaaattaaagatggtactgagcttgaaggatatcagtttgtcctgaacgctgagaaatcgcgtactgtcaaagagaaaagtaagttcttcatcgatgttaaattcgatggcggtatcgatccatacagtggtctgcttgatatggctctggatatcggatttgtggttaaaccgaaaaacggatggtatgcacgagaattcctggatgttgaaaccggtgagatgattcgtgaagaaaaatcctggcgggcaaaagatacgagcagtacggaattttggggtcctctgtttaagcatgagccattccgtgacgctatcaaagcccgttatcagttgggtgctattgattcaaacgctgcggttgatgaagcggtagcagaaatgattaactcaaaagtttcaactaaggttgatggtgttaaacttcctgagagtggttcagtatcagctgctgaagttgaagatgaattagagaacttcatgaatgaagactgagtttgatttagaatctgaactcgagaaatttgaacaagaatctccctcggaagagggagacttcgagcgtcaagaacgagtgttcaagaaaagccatgaaataatccaagaagctatgaagactgttatccaagaaattgtgataaaattaaatggtcaatcacacttggtttatgttcataaattaaatatttctccttcgggggaagtaactattgagttcagtacaccatctgaagctcataaggatgaactttatcctcatgtggaagcttgtgttaaacaacaaatccagagtgcattaaagaccaagaaaaaatcattatggaaaatcttttaagaggttaaagtggtagaaacaatcttagctaatctgatttacaaccaggctttctttacgaaggtttggccatatatggacaaagagtacttcgagcaaggacctgctcagacggtgtttaacataattaagaaacacgttaatgaatacacagcaattccttcaaagactgcgttatgtgtagcactggataattcgtctataactgaaacggaacatgaaggcgcaaagaaacttattgataagttatctgatgctcctgaagatttgaattggttagttaaggaaactgaaaagtacgttcaagaaaaggctatgtataacgctacgtctcgaattattgaaattcaggctaatgcccagcttgagccaaataagcgagataagcgtcttcctgatatgggagctattcctgatatcatgcgcgaagcgttatcagtatcgtttgatagctatattggtcatgattggatggaagattatgaagctcgttggttatcataccagaataaagctcgtaaagttccgtttaaacttagcattctgaacaaaattactaaaggtggtgccgagactggtacgctgaacgtattgatggctggcgtcaacgttggtaaatcgttaggattgtgttcattggctgcagactatcttcagatggggcataatgtcctttatatttccatggaaatggccgaagaagtttgtgctaaacgcattgacgctaatttgcttgatgtatcacttgacgatattgatgatggctgtgtatcatacgccgaatataaaggcaaaatggaaaaatggcgtagttctagtactcttggtcgtttaatcattaaacagtatccgactggcggtgctaacgctaatacattccgagctcttctgaatgagttgaaactcaagaagaactttaaaccgactgttatcatcattgactatcttggtatttgtgcttcttgccgtattcgtcaatatactgaaaacagttacacgttagttaaagctattgcagaagaacttcgtgcattggctgtagaatctgaaactgttctttggaccgcagctcaggtaggtcgttcagcgtgggatgcttctgatatggacatgagtgatattgcagaatctgctggtctacctgctacagcagactttatgttggctgtgattgaaacccctgaacttgctcagatgaagcaacaattaattaagcagattaaatcacgttacggtgataagaacatcaacaataagttctctatgggtgtacataaggctaatcagcgttgggtagaaattgagcagcaaaacgacccaactaagcctaatccaagcaataccgtccgagaaggtgccggtgcacagaaccgtgtagccgaatctaatcgtcaagaacgagtatcacgttctaagcttgatgctctggcagaagagttaaaattctaaggaattctatgatttttgtgtttagcgcggtccgtgaccagtcaggtcactcttttgttgtaacagccacagataccattcatcgaggcattgaggcatataacaaagcagacctatctgtatgcgactatggagaggtcaaggtgtataacagcgatggcatctgggttaactctgctacatacctacctaccaagaatctgacctctgacattttgttgaaaaaattgttcaaaaggtagtttactttctccaaaggccatgatactatggccttactgaaacaaaacgagtagaggaaaacatcatgtggacaattgaaaaagcattagacgtagtctttaagagtaaagatgaatcagcggaaactgtaccgcattgcggtatggtagttggaagcaaagtagttaaatctccacatgctaatctgcgttgtgatggcgtagtacgaaaagcattagatgaaggcgatacagttttagtagttgttgagccattcaaaaacactgatggcaatgtgtcaatgttagtatacgcaaacggtgattatcgcctgatttctgctcttaacgtacaagctgcttgaggaaaccaaaatgaaaaagattgtacttgctttagtgttcgcagtatcaagttgctctgcagttcctgccatggccaactatgacaaagacttatgcgagtggtcaatgactgctgatgagtctgaagtagctcagcagattcgtgcagatgttggtcatattgtggaaaacgtagacccgagcaaacaaacagaagtgcaagcagaacttaaagacgacggcgcagcacttaagttgaattatgttctttactgtgatgcccagtttgataacttcaacatcgttaagtggattttaggatgattacatacgttttaataatggcgctatctacgggttcaggtggaatgtctactgaaaagatggcattcactggtaaagatgaagccgtgattaagcaaaagtgtgaagatacaggcaagcagtttatgcttatcaaagacaatccaaaatcaatgtctccgacgctgtatcctacatataaatgcttacgtattacgcatgaataaatagtaggaggctctatgaaaacatacaaagagtttgttactgagatggtcgcaggtgatgcgggcggcaatccacagaatattgcatcaggtacaacttccggggacatcgtcaataaaggacccgaaactcttccaaagaaacgaaaagcggataaagacgctgccaagaaaaagtgataaaatggccttattagtttaaggccagaggaaatattatgtcttgggttgataacgagtatgcaattcgcgcaatatctcacctacctaaatttagacacgttactacatcttcaacattcaagttaaactgccgttgcccaatttgtggtgactcacagaaagatatcaataaagcacgattctggatttttgatgcaggtcaaggattacgctgtcattgcttcaactgtgagtataataagtggctatcgcagtatcttaaagataatgaacccgacctctatcgagagtatcttcttgagaaaagaaaggagcaggtctttgataagccaaaggctgtagaaccgtctgagaaaattaatgcaaaactccccgtaatagaaaaacttaatttctgcgagcgattagatagacttcctaaggaacatccgatagttaaatacgtgactgccagatgtattccaagcacttcttggaaaaggttatggtttactaaccaatggccttctcttgttaactccgttaatccaggaacctataagaatgagacgaacgaaccacgtttggttattcctatcttcaacaagaaaggagagattgagtcgtttcaaggacgagcactacgaaagaatgctccacaaaaatacatcacaatcaaagcccacgaacacgcgaccaaaatttatggtctcgacactattgatgagtcaaaactcgtattcgtcatggaaggaccaatagattcgctgttcattgataatgctattgcaattaccggtgggtctttagatttagctcaagttccatgtcatgataaccgagcatggattatggaccatgaacctcgtcatcctgatacgattaagcgtatgaagcgtttagtagacgcgggtgaaaaggtagttttctgggataagtcgccttggaaaagcaaagatataaatgatatgattatgaaagagggggcaactgcttctgaaataacggattatattaatcaaaatatatcgcaaggtttaatggctaaattgcgccttgacaaatacgcgaagatataggggccaaagccccttaaattaaagcaatcctccggtcataataaacgacacaactttttctaacggcattggaggaagaactagaccgtgtgtgctagctaatggaactaccacataattccatgcagctaaagcagcagtggcgattccgacgtaaagatatcttccaaatcctcctttgtctttacattcttgtttcacttcagacatgaatcctcctgctatttatgttaagtgatataatatttatctaattgaaaggatatctgtgaattaccaaaaaatttactcagctttagttacaaaggctaaatgccggcatcttgatggatataaagaacgccatcatataattcctagatgtatgggaggagcagatgacaaaaacaatcttgttgagttaactgcgcgcgagcattttatagctcatagattattaactaaaatatatccaaatgtgaaaggattgcattatgctgtaaatttaatgcgatataataaaggtgttaaattaacaagtagattaatagaaacccttaaaatccaaaactctgttcttttctcgggtgaaaataatccaaggtttggaaagccatcatggataaaagggttaaaaacaccagaagaaactaaggctaaaatgcgagcttctcacaaaggcaaagttatttcggaagaagctaaagctaacatgagcaatgctcgtattggaaggtttagtggtaaaaattctcctagatacggtttaccgaatccaagacgtggtgagatatggaactcgtatgattcgctttacgagttgtgggtttataataatagacctaagcgcacaaaatttaataaaatagctgtcaaggcaggttatcctaatatctgctatagacgtatgatagaaaacttcataagaaaggaaaaataacatgccacatttcaacgaatgtagtcaactgatcgctggtgcagataaagctgaagcccgatacgcaggtatcgtacgcaaagttggtggtgaccctctgcaagtaatgcttgatatgcaaaaatctcttcaggttcgtcttgcaaatgacaagcctggtactaacatgcatcctgatgaattggctcaagctggtgatatcgtacagtggctgcgtaatcaaaaagattacattgatgacgaattccgcgaattgctgacgtctcttggcggtatgagtaacggtgaaaaggcagctagtgctgtgtggaaaccatggaaagctgaccacgtcaagatgcaggaaacttatatcaaagacctgtctgataaagaccagcttgaaatcaaatttgaaatgattgatatcctgcactttgttctgaatatgtttatggcgcttggtctggattctgaagaaatctttaagctgtattatctgaaaaacgccgagaactttgctcgtcaagacagtggttactgatggctaaaagaatatctaagcgtcgtttaaaaattatcagaaaacaaaaagaacgggccttagtattggcccttcgagaagaaatcactcgagaaattgataaagaaatattaaagacgcttacagcagctatataaatactcctgtaaactaaataggagattaaaatggcttacgtaaatatcaaaacttttgaccataccactgctgatggcgaggttaaaggtactgaagtatctgtagcttttaaggtatattctgactcacatcgcattgctaatgcacagtatcagattttcccatccgaaaaagccgcttattcaacagtagttgatgatgctgcaacttgggcaaccaccaacgcgaaaatgtttgaagctgttccatctgatgcagaagtataaaaattaaggactccttcgggagtccttttatgctatattgggaatagtatattattcctactaactgaggagaacaaaatgatatgttatactaagccctggtatcaatcaccattaaagaagtctcattttgattgttggtacagaggtgtaagagctgcagcgttattactaaaagctgcgcctgctttaattaaagcaaatgataagtggtttgaagacaacaacatgactgaaggagctatgtgtggccgacgcaaaaatctataaagtaagtttacagcgcaaactaaaagaaggttttgattctgataaagtattcactgtagcaatttacaattattcttatgacgagtttaaagaactggtcaataaatttgaagcacgcgggtggtgtcctaatagtaaatatggacttgtcaaaacagcccatacttttgatgtttcacacatgccaggaagtccaattaatattttaggtgctttacaccttaaaggatataccaatgcatatcatgagaccgatctgtttgaatatgcaaatgataaaatcgttaacggcaaaagtatcgtcattgacaatgaagacgcttttatagtatttactcagttagtatggtcatttatgcaagctgatttcgccagatttactccgagcgatttgcttcaaaaagctgctgatgcatataataatagtaacagtcaatatcgtcggatggagtggttcatgtgatggatttgtttgaaatgatggaagagcctcaggaagaggttcaggttcatccagtgatttctaaggacatcaaagacgaataccgtataattatacagaagtatggtattaaagccccagaagctcttctagatgaactagcttcaatctggtctgacccgccgccctggtctccgtgggcaaaataatttcacaaagtagtttactcttctaaaaagccatgatatgatacctctcgtaaccaaaaatggagaatatcatggctatttcattaaacccatctatttcagtaaaattatcaaaggttattcctatcgaagaacccattcgctccattgatgttcttaacttcgcgcgagaaagcaaaggattacctttatatgatttaagcgtatgggaagcattagccaatcgttttgactgcaaagaacagtcaattctgtggcagtgcatgaacaataagattggcgaagaatttcataagaaacttgactctatcgttagacgtcatcaaattgataacagtgacattctctatagaggtctatcatgccgcgaggctaaagccttttatgacgctcttattaaaggagagaaatttgacttcggaaaggtagcatcattcacaacagatgaaacgattgcccgagaatttgcaggcaaatggcattactcgacctttgtagtcattgaagtcaataattgtcagcaatcatttgattatcataccaacatgaaatcgcttttaattactgcaccagattctgaattcatgcgaccaaatgatgtgattgataacattgctcagcgcagaagcgctgacatcgagatgattgataaagaacaagaaaggatgctaccgatgggaactaagttcaaagtggtgggtcataacaaagttgaaaaatctggtttacttatggactactttagtgttactatagcttagtcaactagtgattatctagaactagggacctagacccattataccgtccgtaagacgaaagcatttttgaggaaaacatgatgaaatttactgctgaaaccgctaaagtttatactcgtttaattacaactttaggttctgctcaacgtcggcacaaggagttcaatctcaccccagaatatctgtttaacatcatgcagcagacacattgcgcatactcaggcgaaaagtttggaactgttaaaggaaatcatcctgatagcatgacgctcgagcgttggaataatgacttgggttatgtaatggggaatgttattcctgttaagcaaaagtattatacttttgcgcggaaataatacgattgaaggccttgaacgaaaagcgaatgaaatcgcagcacgcatagttcgttcttcagattctgttaagccaacaagtgataaagaagcttctcgtttggaaaagattcgtgagtatgaaaaaactataacatcaattaaaactaacttacgtaatcgcgaaaatcatctttctcaatttgtgcaaaaagaaaagaatggaactgcaacctcggcagatttagaacttattaatgcattgagaactcgtatcagtggtggtaagtctgaattagctaaagttgagcgtaagttatctgctattttagcgtcagttccgaatcgtccgtcagatgctgaaatccgtgtacaatcaatacggctaattgttagctcacttcgtcggttagaaaaatgctcaatgctagataagttaaaattgaaaaaaggtcttccattgactgcgtccttcttccaacttttgagaggtaaaatgtaatgcaacactatggatatgtagtagcgtataaggataaagacggatttgaccatccagtcacaactgatatgtacgatggagaacgatgtgtggtcttcactaatgaagaatcggctaataaagcacggattcgtacaatgtcggttttaacagacaaattagcaaaagggaattttactggaaaaagcaaaaccaaaggaatgctttggtggaaaacaactgagctagtgtatgaaccacttagcgatgttgagcgcgaaaaactcaaagcaaaaattaaaaatctacatgtagtgagggtaaaagtggcatgattacgtttgaccaattaaaagaaagtcaaaaagcgatttttaataaagtcattgaaatggtcaaacaaggagccaaaggtcaacacattacgattaatggacctgctggtacaggtaaaacaactttaaccaaatttatcattgacgctttgatttctcagggtatctctggcattgcgttggcagcacctacgcatggggccaaaaaggttttatctaagctcagcggaatgcaggccagtactattcatagtcttctgaaaatcaacccgacgacatatgaagaaaacgttctgtttgaacaaaagaaagttccggatatggcatctattcgagttcttatctgtgatgaagcttcaatgtatgaccgtaaactgtttaagattttgatggcaactattcctgcctggtgtattgtcattgccattggtgataaggctcagatacgtccggtagaacctggaagtaatgaacctgcactgagtccattcttcactcataaagatttcttacaacttcatttgaccgaggtgatgcggagtaatgccccaatcattgaagtcgctactgaaatcagaaatggtggatggattcgtgactgtgtagttgatggtcatggagtccgtggttttacaaaaggaactgcccttaaagattttatgctaaattattttaatttagttaaaacaccagaagatttatttgaaaaccgaatgcttgcgttcactaataaatctgtggataaattgaatgaaataatcagacgaagaatatacgaaactgaacgaccattcgtagtaggtgagattgttgttatgcaagaacctcttaccaaggaacttaaatttgaaggaaagaaattcagcgaaattcttttcaataatggtcagtttgttcgcatattagatgcaactgaaaccacgtcatttttaggtgccagaggtgttccaggtgaatatctggttcgtcattgggtattagatattgaaacctatggcgacgatgaagagtacgctagagagaaaatctgtgtcatctcatccgaagaagaaatgaataagtttcaatttttcttggcaaaaactgcagatacatataagaactggaataaaggcggtaaagcaccctggtctgagttctgggatgctaagcgtaagttccataaagtgaaagcattaccggcttcgactttccataaggcccagggcatctcaattgacagaagcttcatttatactccatgcattcacatggcagatgcttctctcgcacagcagttattatatgttggtactactcgtggtcgatatgatgtgttttatgtgtgaggtaatatgtttgaattgaaattagaagaccttcaaacaatgattgttggcttacaagaatctaagtttgaagcaccagacaatgttaagcgtgctattaacattaaaattgatacagttctgaatgagcttcgtgatatagcagataatgctaatgctattacttggttcacaggatatgacccaaaggtgtatctgagcgaatatattggttgccagttacgcgaaattaaatttatgctagaggctcaaaatggctaaagactttattattgattttgaaacattcggaaatgtgtcaagctcttctgtgattgaccttgctctaatcacctttgattctgaccccgaagttttggaaagcttcgatgaattggttaaacgtggtcatcgtattaagtttgaccttaaatcccagaaaggtcatcggttgtttggtaagtctactcttgagtggtggaagaaacaatcagctgaagctcgggctaacctggcctcaacgccagacgatttatcagtaattgctggaattaaagaagctcagcaatatctgattgataatggaattcacccatgggattcctttggctggtgtcgtggacagagctttgactttccgatttttgttgattgtcttcgcgatgttcaacgagcccaaggaatttccgaagaagaaattgatacatttaaagaagagccgtgtaagttctggaatcagcgtgatattcgtaccgcgattgaatcactgcttctgactcgtggtctgacaactacccctcttccaaagggtacgctcgacgggtttatcgcgcatgatagtatccatgactgcgctaaggatattctaatgcttaaatatgctcaacgctatgctctaggcctaagcgaagcaccaagtccagaagataccgatccactgagtttacctaaggggcgtggctaatggaagagtttgagttcgatgaaaacttcgaagagtggttcaaccgggaaatcctcccggaaatctctccaacgatggttctggtggccaaggctatgatggctaagggctgggaagctgggtatctgttcggcgtcgatgttgggtgtgaaatttctcaccgataactatttactttatgaaagagccgttatataatggctctacattaacaaactgagagaaacacgatgaaaggtttagttgtaggtgaaaacgttaaagtaattggtggtaagtgggttggtcacaatggtgtaatcgttaaagtagttaatcgtaatgacggtaaatctgggtataagatttaccgtgaagattttggtgattacatccactgcttgaaaaaattcgttgaatctagtgaaagctatctgcgcaagtgggtacacgtgaattcgctggacaatgttattacccaatcggtgagttctactaattcagccactaatctgtcgctgcataaaaatgttcttgtcactgatgagtgggaagaagacggtaaaactttagtaaatgtagtatttcaaggtaactatgcggttctgcctaaagccgatgtagagccgacggaatcacagcgtcaaggtttagtataaaaagttgtttactttgccacaaggatgtggtactattatcttatcaactactgaggagaataacatgaaaactgaaaacaccgtaaaaattactgccgaagcttttgaagacattctgttcaatcctgacttaattgtcgttcagaaagagaaaaccttcggtaaagaagagcattggacctggttgtatgtattcgcgaaccatggtgatatcgtcccagttcgtacctttgctcgtgtaatcacagttgatggcccagaatacatggagattgtgtaatgaattttaaagaaggcgtacagtacaaattcgtcaatgatgaagcggaagaagaattttcttcacgttatgagtttaatgaagactttgtgtatgaactccatgaaaatggcgggagttttactgttactaaagttgaccaccaaaataacagagtatccggaattacgtgggctaatggcacagaatgtgatgaagttggtggtgaagaccttgtaatttttgatagcgaattcaaatactttactgaagttggaacttccgcgaatgtaattccaaccgatttggttatgaatctttctattcataatcgtggtcaagcaatcgctgctattgcagcactgcagagtgcatatcaatgttaaatttagctcctatttttgaagcatcaaaattatcttatcctattcccaaccgtagcattgggaatgtcatgctgcaactttcttcagaaactggagaaatgtgtgattggattaatcgtccatggcggcagaaagaagaatttgaaggcgagtgcgcagatgttattaactgtgtagtggatgcactttggctgcatttcagaaatcgccataaaaatgatactcatgtatcagatgatgaaatctccatgatggttactcgtgcactgaatgagcaaatcatggtcaaaacacaaaaatggaaggatgctgttaatgccaacgtatgattacaagtgtgaagtctgtggaaaaaagatagaaattatgcgtaaaatttcccatcgtgactatactgttaactgctttaaccctaagtgtgaaggccaaatgaagcgggtggtttctgctccggcagttcactacgatggattaaagagtggtgattattgatgggaactaaagcacgcattaccatgaaacccggagaaatccgggttattaaagtaggtaatataacttatagggttaaattaaaatgaaaaagattttaattacagcgcttgccttcatgatgattggatgcactgacgctgataacgcaactcgcgtgttagataacgcgggatttactgatatcaaaatcactggatataagttcttttcttgctcagaggatgattttcagcacacaggctttacggctattgggccaacaggaaaacctgttaacggaacagtgtgctcagggctttttctcaagaacagcacaattcgttatgaataaatgaccttcgggtcatttagttgtttacatggacatcgtgttttggtattatagtcttgttggccagaggagaacattatgattattgggatgacaactgcacaaaggcgtgctaaacggcaattaaaaatggtagagcgagctattggaaaatacaggtttgcttggtggccaatcaatgacgtgaatggtcgtactatttggatgcagaaatattatgaagtctgtgaagagtggatttcacttaatgaaaacaacgagtaccggattgaacagtactacggaaattctcgatatgcatacgctaacgttagtgatgctcaatggactatgtttgaacgacagcggccacgatatcccgagtataaagcggttaaaggaggccatgaggttcttggtaaattgatgtatatcaaagaagaattacttgctataattaatagttgatataattccttcactaaccgaggaaatgtaatgattaagaacgaaattaaaattctgagtgaccgagaacatatcattaagcgtagcggaatgtacattggtagttctgcgtttgaagcgcatgaccgttttctttttggtaaattccaatcagtaaagtatgttcctggtattatcaaactgattgatgaaatcattgataactctgttgatgaagctattcgtactaatttcaaacacgcgaataagatttcagttgatgtcaaaggcaacaaaattattgtaacagataatggtcgtggtcttccgcaggctcctgtagtaacacctgaaggagaaactattccaggaccagtagctgcatggactcgtcctcgtgcgggtggtaactttggtgatgatgctgagcgtaaaaccggtggtatgaacggtgttggttctgcgttaacgaatattttttctgtgacatttgtgggtgcaacctgtgatggaaaaaatgaaatcgttgtccgctgttcaaatggcgcagagaatgtttcttgggaagaacatccagctaaagataaagaatttattaaagacaagactggtactgtcgtgtcatttatcccagatttcacccactttgaatctgatggcttaactgatgttgaccaatcaatcattcacgatcgtctgatgacgttagcagtagtttatcctgatattgaatttaaattcatgggtaaacgggttcaaggcaagtttaaagcttacgcccacatgtatgacgaaaatgctgtagtgcaggattctgatacttgtgctattgccattggtcgttcggatgacgggttccgtcaactttcatatgttaataacattcacaccaaaaacggtggtactcacgttgacctagttcttgatgaactgagcaatgaacttattccagcattaaagcgtaagtacaaactagaagttaataaagcgcgaattaaagaatgtctgactgtcatcatgtttattcgtgatatgtctaacatgcgatttgattctcagactaaagagcgtctgacttctccttggggagaaattcgtagccatattgatattgattataagaaacttgctaacgctattatgaaatccgaagatattcatatgccgattattgaggcgatgttagctcgtaaacttgctgcagagaaagctgcagaaactaaagctgccaagaaagcgcagaaagctaaagtagctaagcacatcaaagccaacaaatatggcaaagatgctgacaccactttattcttaaccgagggtgattctgcgattggttatctgctcacaactcgtgaccgtgaacttcatggcggatatcctctacgtggtaagttcatgaatacatggggaatgtctgctgcagatgctatgaagaacaaggaagtatttgacatttgtgcaatcactggtttgactatcggtgaacccgctgaaaatactaactatcgaaatattgccatcatgactgatgcagacgttgatggtgttggttcaattttcccaagtcttttagcgtttttcagtaattggcctgaactgtttgaacagggtagaatccgctttgtgaaaactccggttattattctcaccaaaggtaaagaacaacgttggttctattctcttggtgaatatgaagaccataaagatgatttcaaaggttggaaacttcgttatattaaaggtcttggttctcttgaagaagatgaatacgaacgtgttattcaagacccggtttatgatgtagtcactcttcctgaaaactggaaagaactgtttgaattaattatgggtaatgatgctgcaccacgtaagacatggatgagtgaataaagaataaatagtaagggtactattgcccttacttagaaggaattaacatgcaacgttattggattactttgatctcaggcgactatggatatctgttcgctgaaaagaaacctctgcccggaacttgggttactatctgggtggaaaacattgatggttctaaacatgaggtttatggtcgagttagtagggtgtggtaatctaagggacctccgggtccctttttctttataagaatggatttatatggctttaatcaagaagtgcttggagatgattctaggattcttgcttaaagttatagtgatataatttccctaaatcactgaggaaaatattatgaaacgcagttacatcccatcagaagaattattcaacgatgctatatatcgtgaatatcgtatcatccagcggttctttgacatccaagcagctgaggaattcaaagaacgcttcaaagaaatccataataaaatttttacaactaacaccgctactgctgaagagctccttgaagtagcagaaatcattaaacgacataattgataggaataaaatgaaaattaaatgtgatgatgaagtaatcattggttcttctgacgctgatgattcaacgtttactattaaggcctcgggtaaagcttttgacatcttgtcaaacaaactctataagtataaagttcgtgctgttgttcgtgaactttctactaactgcgatgatgctcataaactgaatggcaatgaaaatcgtccattttacatcaaagcaccaactcgtcttgacccgcgctttgtaattcgtgattatggcccaggtcttaatcataatgacatgatgacgatgtataaaacgttctttgaatccacaaagaataacagtaatgatttcatcggtgctcttggtcttggttctaaatctccactgagctacacgagtacatttaatgtagtatcatatcataatggtaaagccaccggttatactgtcatgaaaaaccgaggtgaacctactattcgtccgatgtttgtcgatgatatgaaagaagacgaagaaactggtcttgaaattacagttccggttaaagtagaagatattgatacttggcattatgaaatcgcatatattttgcgtacctttggtgctgtacctccaaaggtagattctcttcgccgtgaaattgaatatttcccagtagataaaactgattggtttagcgttaatagttcgtatgaaagctatggtctgtatgcagtttatggaaaaatcgtatatccgattagcggtgtagatgttaaggcagattggctgcttaatcgttatggcaaggtttatgttcatttccctcttggcgaattagacattactccatctcgtgaagagctttctcttgacgaagaaacaattgctaatatccagaagcgtgtgaatgctcttgaagaagaggtaattaccgcagatattaaagcgtttgaagcgtatgaatctgaccgtgaattcttgcgtgagttcaataagctgagttctaaggaacgttctattcttcagagccgtggtattaccattgggaaccgcgatattaaacaagtagttgcgaagtataatcttgataaaattcgttcatattatgtagataacgaagtatcagtttatgtttcatgcgatgaacctgctcgtcgtaaagtgtcaagcagttcttggcatcgtcataaccaagtaaacatttctgatatttgcggggttgatagaactaaagcgtttgttcttattgacgataaagcgggtaaacgtattgctacggttcgagctctgtgtaaatctgggttagttccaatctgggcacacattactgtaatcaaagacaatgaagatgaattacatgtcattgatgagctgaagaaaatcatggatactgatgaagtcgtagtattccgtgtgtctgaacttgaagcccagagaaaagctcttcctgattatgacactggtccaaaagagaaacgtccaaaatctcctaatgtttctctgcattggattgataaagacgggtactgggaagaagaccgtcagactttagtatcatctgaaattgctgagcttgaaggttatgcaatcggtcgcaatcgtgatgaaatccacactttcccagataatgtttggtggtggaatatgagcatcacagatatgcggtctctggcagaagcgtgtggaattaagaaattctatgcaattcgtccgggtgctatgaaagccgctgcaaaagctgatggattgctttcatttgaccgatttattatcgaccaatacatcaagtgtattgataaggtagattatgaccagtacatgccatcaaatgctactggaaaccgtatctgtggaaatattgcgcattacgataaattgaatttcttgtcgagtaagtttactgcgtctggaatgaaaaatccgttcctgacaaaactaaacaaaatcgctaaggtttgccgtaccagtaaaatcaaagatgaaaacgatgatttagctttatgtaataaaatttataataaactgtctggtgatgctgagacaatcttctataaaaagattgaacagtttaaagatgattatcctgtcatcgcaagtgtcttggatacttggcggactgacagcaaactcgtcgatgatatcgtaaaaatcatggagctccttgatggagcttctactcaaaattctgaaaataaaggtgaataaatggctgttacctgtctgtctgaaatccaaaaagatgcaatcgttaaaaacttcaaaaacggtctgtacactaagaaagagctcgccgagaattatggtgtttcccgtgacactattcggcgtgtgtttaaagagcgtgaagctcgagctgccgcggcagctgttcctgctaaagtagaagctcctgttgagcgtgaatttaaatgggcagcaagttccaaattcatttcaattactgaaggccgtactacttataatgctgatagccaacatcctggatttaaatctgcactgcagaaacttgtagatggcgatatcgctggtgctattgaccacattaacctggaacaaggcatcaagaaattcgttcagggtaacgtccgaattgaagatggtacgctgttctataaagatattgaactgaaatctggtctgactgagcgtatagttcgagccatggaagatggcgaagactttaaacgttatctgcctttcctggaaaacctgatgctgaacccgtctcgtcgtgcagtttatcgtctgtttgatttcctgaatgcaaacgatatcgacatcactgatgatggtcacttcattggttggaaagtagttcgttccacttatatggactgtgcttcaaacacgtttgataactctcctggtaaaactgttacaatgccgcgtaaccaggtagatgaagacgatcagcgtacttgttccgcaggtctgcatgtctgctctaaatcttacatcggtcacttcggtagtggttctgaccgtattgtttcagttaaagttcatccgcgtgatgtagtatctatcccggttgattacaacgacgctaaaatgcgtacatgtggttatgtagtattagaagatgtaactgatcgttggggttcagaacttcgctaattataaggagccttcgggctcctcttttattatgggtgaaacatgattaatccatttaacgtatctcattctaaagttgttaatcttcgtggtactcatcatgctgctacagtgttttgtcatcatgtagttaaacatgaaggtgatgttcactatgcttggttgcactgtgatgaactcgtagaacttggtgatgattttgttgtggaaccagacacttgtaaccacgacgatcgtgtttattttggtgaattacatatcagaggaatttatggcattgatgaacaaagccctgcagagattgaaccagttgcggacatttaccctagatttgaataagctaaggggtgaagcaaaagtaaaaatcattgatactgcaagatatagtttagatatcgacccatctcaagacagaattgatgttcttaaaagatgtagaattgctataccggcagagtatgtggtagcggattttcttgatggatacgtaaacgatcaagttgttgaccataataacaacgatccgtatgaatgggcctgggacgtattagctcatccctactaccaaggtgttagagttgaagttaaaacacactttgttcatgaccgagcaaatcataagccatggattaatgttacaactggtaaagacggtccattcccagatggaagtggaataaatctagggcccatgtttaaacataaagttgcagactgtataattatattcgttgcagaagaagtgtcccagaatgtcatacggtacacaccgatgttcagtggcggtatcgaacacctcatggaagtagtaaaaccttcacgagttggtgctggcgggtatatcatgcacaaattttaaaaagttgtttacttccgggattggccatgatactatggccttacaaactgaacgggagtaaaacatgagttacttagaactaaaatcgcttcgagctaaacgcggaaatgcttctattaaagctgaacttttgaaagagtataggattctcgaatctatgaattggcattatactatcattgcttgtgataatggcgattcaacttacggcggattgtatcccaatggagccgctgcagctcgcgatgaacacatagataaagtcaaagctctggaagaaaaaattcgtaatttgtgcatttaacggtttactttcctgttcttcggtgatactataatcttgttagctaaactggagaacaaaaatgaaaaagttacttacgattttgaagaacatctttgtagtattctgccttatcgttactttcattggtgttttcgcatgggatttagttaacgtttggattaatgctttcatctgaggaaaatataatgattcatactggctttgatcgtcgctttaacttaatgagaactgttgttctgtcttttatcgttgcggtagcgttgggaattgttgctatattcgggttcggaatttattttgctattcaagcggttgatattattcagaccgatggccttaaatctttagtagaaaccgtatgggaaggtcaaaaatgaaacgacacatcgtgtatcgtctgcttgctttaggtcttcttgtgttttgggttggtggtgtaacggcagtagtatatttttggtagtagaaggggcttcggcccttatcggagaataaactttaatcaactgaggaaattaacatgcgtaatattatgacttttgctgatctcgataacgctggcgcagaactgatcggttctattcgtaacggtgattgggcagcaggtgctccatctcgtgaaattactgagcgcgaaggattttattttttgatgttcaatgatggcaaagcaggttatattggtgcatctgctcgtttctttgtagctaaacagcgttcaaaggcaggatttgaaagtgttctttctcatatccgttctggacgttctcagttgggtcgtactctgcgctcgaattgcatgacctacggtgtgttctggattcctgctaataaaatgaaaccactcaccactggttatggcaaaggtcagcttgcattggcgtttactcgtcagcattcaagtgacgcgcagacctactctgagctgaatcgtattctgaatgataacttcatctttactttgcagaaatactaatgagaaccttcttcgtgatgggttacttgtttctgatggccctaatgatttgctcaggaacattcatgtggtatggccttgtgcctaccactaaagtaatcggaagtattgcgttcaccgcagcatttattatgtttgagcgcatttgtaaaattgtaggagtttacaaatgattaagaaactcctaattgtggcagctattgctgccgcctttctattagttatgtactatggaatgatttatggaatgatttatattgtgcttttcatttccgatgttatagtacaaatcggctcactaatttggtaggtacaatggatatttttgacactctattaaagcaagcaggttctattgatgatttggctaaggcatcaaatcttcgtcatcgtgatttgaaatctatcattgataatgaagcaaaagaatacgcgatttatactgtagaaaatcgcgctattccaaacttgattgatgggtttaaacctgtacagcgttttgttattgctcgtgcccttgatttggctcgtggtaataaagaaaaattccataagcttgcgtctgtcgccggtggtgtagctgatttaggatatcatcatggtgaaacctctgctcaagatgctggtgcattgatggcaaacacatggaataacaactatcctctgttagatgggcaaggcaacttcggttcgcggctggttcaatctgctgcggcaagtcgttatattttctgccggatttctgacaacttccgtaaaatctacaaagacacagaaatcgctccggtgcataaagataaagagcatgttccacctgcttattatcttccggtaattccaactgttcttctgaatggtgttcgcggtattgcaacaggttattcaacttctattcttccgcatagttttgaatctgttttggaatgcactaaagcagcacttcgtggcgaaatgatggaacctgaagtacagtttcctaaatttaacggaaaaatcgttcaaacagaagacggttctgttgagctgcacggcgtgtataaagaaacttcacggaactcaatctatataagcgaaattccatacaagtttgagcgtgcttcttatgtagagaaagtactcgatcctctggaagatgcaggatacatcacttatgatgatgactgttctaagactggttttggctttaaggtgaaattccgtaaagactatgctttaagcgaagaccctgagcagcgtcatgctaaaatcatgaaggattttaaactcattgagaaaatgagtcaatacattgtggtcatcgatgagaatggtaagctgaacgataagttcaaaacttccggtgagttaattcgtcatttcgtagaagtccgtaagacattcactgccaaacgaatcgagcataaaatcgctgaaactaagcaggcgtttaatcttgcccaggcaaaagctcaatttatcaaagaggttatcgcaggtaacatcgttatccaaggtaaaactcgcaagcaactgactaaagaaattgaacagaatgaactattcaaagaccattctgaaaaactcgtttcaatgaacatctatcatatcactgatgatgaagcgaagaaacttgctcaggaagcaaaacgtctggcgcaagaagttaagtactgggaaaagacaactcctgaagccgagtatctgaaagacctggaagaattatgatagaattttatttaattataggttctgtaattgccgtattaggcctagttttattgctcctcagttaatctagggaacctggaggtcatctccaggtccttccatataaatctatatccctccaaaatccttccttagaatgccccaaattattttcacaaagttgtttacatgcttacatagctgtggtattatagccatatcaaaacaacacggagtaaaacaaaatgattacatcattaaaatctgatatcaaaaacattctttatatttctactcaagctgatggcactcgactgagccactatgtaaaaggtaacattgtggtgctcgatgagttcgaagttaatcgcgagtatcctatgcgtcaggtaattcaagcaagtaactatgaagacggtgaagagtaccaagtcgttctttgtgtatacgatgatttctgggtgcttaaacttgaaaatggtgataagttcttgatctttaacgtataacatttttactgctctttgaagaaaatttttcagagagcagaataaaatggtttacaagctggttagcagatgatattatagtctcataccaaacaaattgaataaaacatcatggagaatcacaatgtctaaagtaacttacatcatcaaagcttccgaagatgctctgaacgagaaaactgctgctatcctggttcaggtggctaaaaaagatttcatcacttctgctgagctgcgtgaaatccttgaagaaaccatgaacgcaggttctgttaactcaaacatcggtgttctgattaagaaaggtctcatcgagaaatctggtgacggtttaatcatcaccggtgaagcacaggacatcatctctaaagcggcagttatctatgcagaagagaacaagcctgaacttctgaagaaacgcaatactcgtaaagctcgtcctctgactgaagatatgaatgagcacaaagacctgatgatgaaacttctcggtgagatggaagatatcttacctctgaaagaacttactgtttaccgtagtaactatatcgcagttctggaaaaacgcacattcggtattcgtagtcttgaagttaacaacaaaggtactttccgtatcttcggttacaagatttctgaagagcatcagaaacacttcactaacctcggaatgtcttgccgtgtagctgcaacaggcaatacttacttagatatcgctcgtactgctgaaaacattgaaaccatcatccgctctattaaggaactgtaatgaacaagtttaaagtattgaatgaacttcagcgttgtgtagaaaaagttaacttgaatgctaatatcccaactgattgttgggatgtatggttccgtgggcactttatcggatacattgataagaaattcacaaaatgctatgctatctacaatgcagatggtaaacatatcatggatgtagataactaccaaaaggcccttgctaaatttgttccaatggcggaagctgttaactcaatggaatggttagagaaaatgcagggtgaacctgttattcgtcagattggtattcgtgaaaagaaaagtttatggcagaaaattaaaggattctttaaatgagcaagttttccgaacaaatgaataaatttgttgatgcttctcgtcacggtactctaattaatgagccagaagaagttagtattcctgaaatctgttttaaagtagctgattggtgggatggacgattacttcaacgtcgtatcgtttgtgcagcaaatcgttttgaattgaaaactggtggaacaattgtagttccaggcactcgccattattctgttgatatggcgaacgttctagatatgttccgtgacaaattagtttctgaccatgtccatggagacaatcaaggatttgttgaccagtggggtgagtacttcacacgcgaagaagcattaatcatcgctacacatgcaggccaagttaatacagttcgtcctaaatcaggacccgccaatgaattattctcagaggatttatactaatgattagtacattaaagaataacattacgcttttaaaaattcagcgtaaatcgcttcagcgttcgttagaaatgatggacgataattggggtacatataccaatgaagccgggtttaaaatggcagatagcaaattcatgaaaactctcatggataaagaatacatctgtccgtttagtcatccatttaatggcggcgctaaaccgtttcttgctgaaatgtacaaagtaatgacagaagaaatgattaaagatattgactattacatcaaggaaattgaaagtgcaaaatctagtagctaaacatgattttaataaaggcggagcacacaaagataaaaagcgttccgcaaaggaatctaagcgtaagcaaaagcataaaggcaaagaaaatgcgcattctgaataattccaaatgtactactttaaccattatttgtgatgacctagaagctctccataagaaattaggggaccattccggattagtagaagatatccattctgaactaatggaagacctacagaatgctggctatggagactggatggtacacgattggaataatggtacctttactgtagctattatcgctaatgttgaacctgaagaagttattgaacaatttcagaaatgcgttgatgcttatgatattggagattatctatgaatactgaaactttacgcagagaagatgaagccaaggcatatcataaacgcgttgaattgctttcagcaattaaagtagaatacaccttacaagttaggcttaaagttcttaactcttgggctaatgacttagaagtaaaacatttagagcaagcagtaatgtttacgtttactcaggaaacttctaaaccgtttagtctatcagcagatttccacacgtatggaattattactattaaagcaaaggatagaggtgacattataagtggagttgagtatatcgaaagcattttaggtaatcgcggagaggtggttttagcatgagtcataacctagaatctgtcgttgaatcacaaagatatcttgaagcgttaatgaataaaatcgcgcttggaagtctgattgacttgtcctttcaagaggcaattgacgtatgtcactggatgaatcgtagggttcgtccaattggaaaggaatggtatttaacggctagagtaaaagatggtcgctacgggctctggatgtcctctggtgctgagtatatcactaccaaggaagatttgaattctcgttgggaattggcataaactggtttacaacgcggtatcaagatgatactataatcacataatccattatgttgtaggaaaaataatgactaagtttgaaattgtccaagaaattgttactgttgcttctattctgaccaagttcaatgctgaacatatcatggagaagcgagatgaatttattgcgttcttgaatgaaattggaatcaagaatgagcaggggcgtcagttaaatcagagcaactttcgtaaaatggtttctgagttaactgacgaagagaagagaattctcgttgaagaatacaacgagggatttgagtctatctatcgaacaatggctatgcatagtaataagtaatcacttagctcttccaagagctctaaccgcctgaccacatatcgatgttagtctttcgttagataatgcaggtttggaattgtaccagtacatttcaacagttccagcataaacattgtctaaattgaaatacggacagctaaacatatacgatatttcaggcggttttctttttgttggtaagaaaacaaattccttatccgtccaaaaatatctacccgataaatgcgtgctatattcagcagttgttttgtcgattggatatcctcccaagtttttagaatctaccgtgctaggtaaagtcccctcataagcaattaagtctacgaagtagttcaagtttttaggtctgaacgtaaagaccgcagaaaagtctgcaccgcttgagatatgtgctatctggagttgttcgagtgctgtattatcaaatcgggaatctctatccttttgaaccagtttatcatacttgtcataagtactgtcgacgtaagctgtaataagactatcagacttatatccagcaaacgccaatagtgctaaaagtacgacaacgaaaacacgggaaaagagaactcttcccgtggctccatctttgaataatagctcgagcaacccaagaaacatatcaaaaaacggtattgattgtttgcttgccatattgctctccttacagagctatttattgctctagcatatgcttaatatgctgtaaacgacagttggaaagttcgtccatcattggcgtaaagccaattccaaaaagcatttgggtctgtacaattatagcatcgtcttcctctataatctctagagctgttaaaatggaactgacttccatcttcaatatcaacgcgccaatttacattaaaattcccactgccttctaaaacgatggcatcattataaccgtcccatttactaggctctgctagcccaaaaacaaccaaattaaagcctgtttcccatatacctgataaggacccacgagaatcaagtaatacgttccacgaagcactgttcttatcattccaagcgccacgaaccttaggtcctgtcgcagggttgttacctgaaatagttatactagcattccaaacgtttcttcctatcatgttggacatccaaaagggtgttcccagccttaattttgctccagctgcaatcattgaagattctcctgttacagccttagctgagcttcctacattaggacctgttactgccatgatatctcctcaaagatggggccgaagccccataacattatttagatttaagttcttcaatttctgctttaagctctttaacagattcgactaataacgcaattactgcattatagtttaaacgaagtaatgcatctttatcgttatcagttgtaactgcttcaggaagaacttcctgcacttcttgtgcgataaggccagccgatggtttagtatcaccatttggaagctgtaaatcataaacattaccagatagcttcgacactttatcaagagcgttatcaatcttagcaatatttgatttcacacgacggtcagaacgaatttcaacgtcccagaaattaccaacaccttcaacgcgtagattagcagcactaccccagatttttacaccagtatctgtaagtgctaaccactggtcaactccagcggcgttatagaaatgccatccagcgcgaacatattcacccgactgccatgcgttaaagctatcgaaaatcgtatcaccgcgctgtaaacgtattccatttacggtgtttgcattatctgtgtttcctggtgctaagtgggctaattgcagatatccatcatttctgaatacaagctctcggccactttggttacggataatcatgtcaccgttttgaccatttgaccaaataacacctctgacatttccagcagaatcacggaaccagtagttagagtttgtaccagctgaacctgcatcacagtaaacattaccgtttttagcaaaaagaccaccagcattggttgtgtcagcggcgactaagtttccgctagaaactttaagactgctactaacatctaacccgcctcttagagtacttttgccatcaacttctaactgccatgtttttaatctggagccatatacgtatagtgtatcagttacagcacaacgttcgactccattacgccccaacaaatttcgggatactagctcagttggttagagcaccggacttttaatccgggtgtccgaagttcaaatcttcggtgtcccaccaattcgggtcgttggctgagagggtaagcgacggactgttaatccgtgtcagaaatgactaggcaggttcgatacctgcacggcccgccaaatgaagaagtcagaagacgttctgataaatcgtcggcatagaattccctgtgtacgagttccctcaacgataactacgtgcttataatttcttacggcgttgaaagttcgctttcagggatacatcttagaacagagtgctaaacaagattcatctggtaccaaggtgatgagagttctgttcccctttgcttcggcatcgtgccagagtatctctgaaagcgaattatggacctatagtttagttggttaaaatactcccctgtcacgggagagagcacgggttcgatccccgttaggtccgccaaataagaacgtggcagttcttgaagatgagtttgagtcctgtaagataatgccgaggacgaagctgtttgttcccacggaataagctctatattcgtaagattatatctttagcgtgttctacatcaagctacttgttagtacttcaagaacccggataaatgcggggtaacttcagttggtagaatgttgggctcatatcccgacacgcgcaggttcgagtcctgcctccgcctct

SEQ ID NO: 26 - DNA, 168341 bp, unidentified
  source 1..168341: mol_type = genomic DNA
tagaactgatactgaattcaatgaaatgattgctcgtcgtaatgaaggcaagttcaatttgactgatgacgaagtattagcgtgtgctgctcacgaagcttggaagaaggtgattaaatgaaaaccactggcgcgctttggaaagaattttataacgatgaagccttctgggaaggctattatcatgatgacactttaatactctttgatgatgttgaagtagaagaatatgaagacccttcgcctgatgcggtagtaaaaattgaaagcggatatgtttacaaaaccgatgatttcttcacttcccatgatttgagtcttgccactttctttaaacgttggaaaaagaaacagaccgctcgcactattgtagtcaccgttgataaagataactttgacgaagtatttgaaactatctctaatattcctggagtgaaaaaggtaaaatgattgacattaaattagatacacatgcagtacgacagttatttccagaaggtacagaagctcgtgcccagcttcagcagtcggtaatcaataacatcgttaaagaaatggtgttaaaagattcccagaataaactaaaacaagcagtacaatctgaagttaatattgctgctgtgactattccagatgtccgagcagaagttaagaagcaggttcagcagatgttccatactcgcggttggaatgatatgtctgctaaagaagaaatgtcacagatgatgcgtaacgctgcccaatcatgcgctaaaaatgctattgatgatatggttcgtcaaactattgatgacgctgttaagcaagctgaaggccgtattaagatgtctattgaaagagctaatctccgaattcaagaaatcattgttaatgcaatgaataagaatttcgctgatcaaattaacgctgccattgctgctaaattggcagaacacttcccggtaactgctaatggataaaattgattttagcaaattaaatattcctcgcatgggaattcctgatgatattgccaagcaattagctagcgttcaaccaatgccagataattgcatcaaagatattctcgatgcgttagatggtaaaacattagttataactactaaggctgaaaatggctcgtaaacgatatatggaagaagccgaacgagtaatgctactcatgtattcggtttattataatgagactggtcaaatagttgatagttctaaactcaaaggagctatgactcgtggaagaaattttgcccaagctgcaattgatggcgaagtaatgaagcgtcttggtatgacaaattacgttaaagcagtatgccatccagattggaaccaagttcaagctcaagtatttaaggaaatagaagaagatgttcacggtttttggttacgacagcaacattcataagtgtgtgttttgcgataatgcaaagcgtctgctcgatgttaagaaacaagagtatgcattcatcaatgtaatgccagaaaaaggtgtatttgatgaagtagttatcagtgatttgcttcgtcgtctaggtcgcgaatcgcaggttggattaactatgcctcagatttttgctcctgatggcacacatatcggcggttttgatgaactccgtaaattcaaattcaatgcatgattatcgcggaaccctccttcgggagggtgatattgtagctctttattacggctatggcggattagaaaccggtgaaattaagcagattaagaatcaccgagcaaaggtagaggtaacttactctaatggagttaaggttatgtctaaatggaaatacggcgagtgtatggtgaaattatgaaatacccaattgagtttgtttttcctgaaggcgaccaagtagatttagaacgtaatcttcgtaaagcaatgattgaaagagctatatctgatccgcagtatgctttcatgcaccaatggggtgaattctttgtaaagcaaggaaatatcattcatggtgttcagtggagttatattggtcttgaagttgattacgatgctggtaatccattagggtcttggcgttgggaagatgaagagctcggaccagattttgaagttgattgttcttggcatgaggaagagttatgagttatgatattgatgatttaaaaactccacgaatggtaacagttccagctgaagagattgatcgtctccatgctattgaagaactgttatgggaaattgaatgctcacttccatctggtttagaaagctggattgacgatgaagacttacaaaaactgcgaggctaaaatgactaacgctgaattgcttaaagaaatcaaacatattgctggtgtcactggcgaatgggacgacaactatgatttcgaatatccaccgaacggtgatgatgaagaggaagaaatctttgttttagtagaagatggagattggacacaggaccataagtatcaaagccgttctcagatttggtattatccagcacgcggcgtccatttcatggtatcagagtctcgttcaggttcatatcataccgattggtattataatcctcctgaagtagatatcgtcactcgtcacgagaaagtagttactcgtactgaagttgaatggcgtattgaatacgattctgttaatgattccgctccggcaccatgcaaagcagcaaaggcataaaaccttggtatgcggctcggtgggaaactgtcgagccagaggaagatgctattcctgaagaagattataatacttctgaacctaccattaacgaactacttgattatgaggacaaagtgaatggaacttattggtaagcagtttgaagttatagaaaatgatgatgaattaactgaacaatttccccagtttgttcctggatttaaatttcaggttatcaatgcagttaatgaagatgaccttgaaacatgtggcattacagcagtaattgatttgctcacaaataaaatcatcacaattaatgacccaactccacacggcgaatcttggttctggtgtttctacagcgaagatacgatgcaccaaattaaagaaattggtcaaggtgaagatgttcctctgatttctgaaattaaacttaaccatttccaaggtgcaatcgttccaattaccagagctctttatgcctttgctggacaggaaaattgcgattcagaagagtatgctttaatgcaaaaagcagcagattatatcgtcgcacttgaacaacgtcttggagttcgccatgtctaaatcgtgcattactaaaactattacagtaaaaattctcgatttcgctgatattcatcgtgttacaagagaaattttacgcagtcattggtatgaagttggcgatgtagtagaatttagtggaggctattacgacgatgacatcaatggaatggcttggactaaaatgagtcttcttcatgaagaaactaattcatatattgagttcaatgcggatgattatgaaggcatctatgctttctgtacttctttctgcataaaagagtctaatcataacatctatagtagttactcgttaatttaactataaatactcttatctaatcgctgaggtaagagtatgttattaaccggtaagttatataaagaagaaaaagaaaaactatatcaggcacagaacggattatgtccttgctgcaaacgtcctttagatgaggatattcaaaagaatcacctcgaccatgaccatgcgttagaaggtgacaatgcaggaaaggtcagaggcttgctctgtaacctgtgtaatgcggcagaaggccaaatgaagcataagttcaaccgctctggtttaaaaggtcaagatattgactacctcgaatggttagagaatttgctggtctatctccgccagaatcgtaaagacagtaatattcacccgcaatatgttgccgatatggctaaacgcttttcacgtcttggtaagcctgagatgattgctgaaatggaattgcatgggtttacatacgaggaaagtgatggaaaatcacaacttgcttcaaaatacaagaagcagcttcgtaagagtttaaaatgaatatcgaattagaaatccagggacttattaataaaaccaacaaggaccttttaaacgagaatgctaacaaagattctcgtgtttttcctacccaacgtgacctgatggctggtatcgtatctaaacatatcgccaatcaggtcattcctgcctctgtaatggaagcacacaaagaaggtgttatccattttcatgatatggactatagtccagctttgcctttcaccaactgctgtttggtagatttgaaaggtatgttgcagaatggctttaaacttggtaacgctcaaattgaaactcctaagagtattggagtagctactgctatcatggcgcaaatcactgcacaagtagcatctcaccaatatggtggaactacgtttgctaacgtcgatttagtattggctccttatgtagagaagacattcgctaaacacgtacgtgatgctcgcaaatatcaagtagcattagtaaaagattatgctatttcaaaaacagaaaaagacgtgtttgatgctttccaggcgtatgaatatgaagtgaatactttgttcagttcaaatggccaaacaccgtttgtgactatcacatttggtatgggaacgtcatgggaagaaaaattaattcaacgagctattcttgataatcgtattcgtggattaggacgtgatggaattactccaatttttccaaagcttgtgatgtttgtagaagaaggcattaatctacgtaaagaagacccgaactatgatattaagcagcttgcattagaatgtgcagctaaacgcatgtatcctgatatcatcagtgctcgaaataatagagcaattaccggttcagaaactcctgtatctccaatgggctgtagaagtttccttggtgcttggagagactcttctggcaaacccgttcttgatggccgtaataatctaggggtagtaacactgaacctccctaggatagctctggatgcaaattataaaagttcggatgacagtaataaactgttcaaactattggatgaacgccttgatatttgtaaagaagcccttttaactagaattaaatcccttgaaggcgttactgcatcagttgctcctattctttaccaggaaggtgcttttggtgtgcgtatgaaacctgatgatgaaattcttgagctattcaaaaatggacgtagttcaatttcattaggatatattggcattcacgaatttgatatgcttacttttaaaggaagcggtaaactcgtcctgaagtacatcaacactaagctaaacaagtggacggaagaaaccggctatgcctttagtctgtactcaactccggctgaaagtctgtgctatcgtttctgtaagattgaccaagccaagtttggcgatgtaaagggcgtaactgataaaggctggtacactaatagcttccatgtgtcagtagaagaaaacctgtcaccttttgaaaagattgaccgtgaagcaccatatcattccattgctaaaggtggtcatatttcttatgttgaacttcctgacatgaagcgcaaccttgaaggtcttgaagcggtatgggactatgctatcgagaagttggattattttggtgttaacatgccagtagataaatgtctttcctgtggttctactcatgagatgacacctactgaaaacggattcacgtgttcaatttgtggtgaaactgatccaaagaaaatgaatacaatccgtaggacttgtggctatcttggtaatccttctgagcgtgggttcaatcttggtaagaacaaagaaattatgcatagggtaaaacatgttagagaaaccaatgaagcaagttgattggaaccaacttagcgaatggggattgatttggaaaatcaacaaagaggttctgcacccgcttggaattgctataacccgtgaccccgaaagtggattatcggctggggctattcaaactgatgagccctggaaatatgatgcagaagtagaagcacgtaatgaggtaaggttcaatgaatttcgacagaatctacccttctgactttgtgaatggccctggatgcagggtcgttctttttgtcaccgggtgtttgcataaatgcgaagggtgttataataaatctacttggaatgctagaaatggccagttattcactatgaatactgttaaagagcttgcatcccatttaagcaaatcgtatattcaaggtcttaccttaaccggtggagacccgctttatccacagaatcgggaagagatttcaaatttagtttcttgggttaaagcaagatttccggagaaagatatctggatgtggacaggatataagtttgaagatatcaaagatttagatttgctacaacacatcgatgttataattgatgggaaatatgagaaatcactgccaactactaaaaactggcgtggttctgacaaccaaagactctgggtaagaaatggttctacctggacacacgattgaggaaatagatatgctgacttacaaaattatgtttaccctgaaccacatggctactgaactgtttggaccggaatttctggctatgacagcgttcatctttactatttaaggaaaattatgaaattcattaatgctattcgtaaatttatttctaacgttatcgctttggttgcattaacggcaggtgctttcgtagcaattccgttcattgtccttattatcatcgcagattggattaatcctaccaagaaagatgaaaagttatctaatgaagaatttcagaaacgagttaacactctgactgctaaactccaacaggtcatgaaatgatagaaatctatggcatccctgaagaagtttggagatgccctggatgtaaagcagttcgtgacttgctcgataagctgcaacttccgtatgagttctataacgtaatcaacgaggttgacggtcaaccggtttatgaccgtccgttgattgagtcacttgctaaacgcatcgggtgctatccatcgcttgctattcggtatcctgtcatttttatggataacgttaagcagtatgacattccaacattcaaaaccaatcttattgctgctgggcatgacccagatatcatagaagattaaccagttcctttctaaggtcatcttgaccaccttctgtatatttctatacccttcatttagaggttcctatgggacctctcttttattttaaatccatttcacaaagttgtttacaagctagctgatgagtgatactatagccctatcaacggataacagcataccgtttaactcgagaggaaaatatgaactggttaaattggcaagaagctctagaagctatgagtaaaggctgtaaagtaaagcatgtgcattttactgatgatgaatacttcttgatgaagaacaaggtcatctgtgacgaaaacggatatgatatgactcgctggtacaagggtgagtcttggcaaaacgaacattggtacatcgcatgaaaacttttgctgtaggtgatatcgtccgtaccagaatttgggatgggcttcaatttgaagtagttgtctacgtcggttcagatggggttctgcttcaccgaattaacaatctgattaagtggcacctagaacgcttcgtgaaataccatgaattcaatagctaccactgcactgtagctccggttgctagtaaagaatactacgatatgctcgaagagctaaaatctctcaaagattgatttgctacaggagatttgatttaaaatctcctctgtcaaaacaatcgttactgaggaaattaatatgtcccaagcaatcaaaaacgtactgaactcttttgcttatgataaagtatctgcaatgctggaagaaggacgttgtgtaactccgtctttgcttgatcagtgggaagttgagcttcacggtacgatgaaagaagaaggtcaaaaaattggtaaagctcgcatccgtgaattagttgttgcttatcttctgtctgaatttggcatcaaagcctttggtgtagaaccaatcactccgggtatcggtgaaatttctgaaagcactattcgcaagatgaagaatcaacgtaagaaaggcttccgcgatgttaaagcggttaaggcggcgaaatgatttcatatatcgtgtgcgcatctattcctaccggtgtatggcatagaaggattaagtatatccgggctcattctgagcctgacattagtcaagctaaacggatactcgcaaatcaatgggatgaagatactagcgtaattatcagagtatttccaattgattcatccactctagacagccaacttccatctccgtcagagatgtggcaagaagggttaaacgagcaggaactgcgagagtatcttgatgcgtaaggttattctatacacagaaatttttactaaccgttgggtatttgatagtattttgcttgctgataccaagtttgccgatgatattggcagagctagaaaactggcgtatgaattggcagaaaaatccccaacatttgtacgtatttcatacattataacaacttctgattatgtgtataaagtatcaaaagaagcattatacagattttgtaatgttatgatttcttctggaaaggcattaaactataatcaattggtggaaattctaaatgactgaagaacaaattgtagaagttggtttgcttggatggttcatatctaaaacgcctgatggcagaaacaatattgaaactcctaacggagaattcattattgaagaagattttgatgcgttttggatttatgaacgttctggagagaatgaatacacatccgtggatgctttctctaaatttgaagacgctattgatacggtgaaagcatggctaaaataaaccaaattatgattgtggtagaaggcattggcggatttactatagattcttatatgggtgtttggtttgacaatgaagagggcatgtattgggaaacgcatgcctctatgttaaatgaaactcattatgaaagtttatactcttcattcatggaaatgatgcatgaagtagatgaatctgattggtttgaacttagtttggttgagttcaaacgtatcatggaacagctgttccaatgctatcgcattatgaagggtgaactatgaaaatccagctgactcttacccatgaaaatatcaatggtgtgttttgtcttgaaaatagccaaattacttttgcacaagatggaacgtactggtatgcagaatcagatgatatcgctggttatggaatggagcgggtgtttgaagattttgaagccgttattgatgttccgctaaatttcacatataacgatttttatcgtatcatgatgaaattaattgcatgcgctgaattgattaagtaatgctttaatcctctcgcttcccaaatttgatataatagatattattaattgaagcgaagaggcaatatgagtaattatgtaaataacaaggaactgtataaatcaatctgtgcatggaaagagaagtgccgggagtctgaagctgctggcggccctcgagtagtaaaacagaacgatacgatcggccttgctattatgctgatcgcggaaggtctgagtaagcgtttcaacttttcaggatacacccaatcctggaagcaagaaatgatttcagacgggattgaagccgcaattaaaggcttaatcaacttcgatgaaactaagtatgataacccgcatgcgtatataacccaagcttgtttcaatgcattcgttcagcgtatcaaaaaagaacgcaaagaaatggcaaagaaatacagctattttgtccataacgtgtatgattcacgggacgatgatatggttgcgttagcagatgaaacctttattcaggacatctacgataaaatgacgcagtatgaatccaccgcttataaggcgccagggtctgctaaaaagagcgaacctacaagcgatggacctaatctggaatttttatatgaggctgaagattaacctcgacgggtttttagaagatgtgcaagacctagacgctatcccttatttgctaaagatgtatttaagggaggtgcttgatcttgatattcacattgacccgaaaaatccacatgacgctgatttcaggtcagattctgctataattgaacatagttataattggactgatactgaattcacatttgaaataaattaccatccaaaggaataacatgaacaatattacccaggaagagcgcgacgagctgcaacagaaactaatggaagcggcagaagaacaagctattgctcgagccaacaaagttgttcgtaaaaaccgtcgtgaacttgagcgattacgagctcatgctggagacgcggtattagacaataatttccctgcttacaagtatgctattgaaaaactgcgtactattttaaaacaaccttttaatgatgagattattctgacttgttggaatacctctcgtaaatctgtttgggacattctaaatgctggtacaagtaaaatttaaacgtgttcgtaaagacgcaggatttactttaaacactgcgactggtacgatggcagtaaaggtagcagataatcaatatcgcgtgttaggctctaccgaaggatgtaagctaattgataagaactctcttgtctgggttgacaccttccaagttaaacggtggtatgaatggtaaatgaagagaactggggattcattgatttagatgaacaccctgattttattactagtgaagagaattgggatgtatgacgaatttgatgggttctaatcctggacatgattggccggaaggaaattacacgtgccggtgcagtaattgttcagaacgttatacaggaccaaagcgtagttacttctgttataaatgtgatactgctcggagagaagcacctgctcccgattatgaagcgattcataatgctaaggtagatatgcttagacgctttgaagaagctaagcgtatatgtgaagcagtgggttatgttgtatacaagaaaatttaaagggcttcggcccttttgctttattacgggaatggtaaaatatccaaaattaacaacaaaggtcaatatatgaagattaatattttaatggctcgcggacttgagggatgcggcgtaaccaagttcagtctcgagcaccgtgagtggttagtaaaacatggccatgaagtaaatatcatttacgctaaagataaagcgtttactcgtaatagagcacatagctataaagatgtaactattcctgtgtctcttgcagatgactatgataagactttatctctgcttaacgcatgtgacattcttatcattaactcagtacctgctatcaatgctccagaagcagcgattgataactataagaagctcatagagaacattaaacctgaagttagggtagtcgtatatcaacatgaccatagagcattgtcacttcgtagaaatgctggtcttgaagaaaccgttaagcgtgctgatgtactgtttagtcatagctcaaacggcgattttaataccgtgctaatggaagaatattttccaagcggcgggttgagtttctttgatgattctgactcagctcctccggtttataactttcaacctgctatgaacatcaaagcaattcgtgataagtattggaaagacttctctgctattgattttgatattcatcgttggattggtcgtactactacgtggaaaggctatttcttgatgtttgactttcatgaaagtcatctgcgccccgcaggcaaaacgactatcttggaagggttagaacgcagtcctgcatttattaacatcaaagaacgctatgaaattgattattgccgtcattatcatcaggttaaaactggaccaggtctgaatcctcaagttcttgaccgatatgttaactctgaaatgcttgagcgtatgtctcagtctggatttggttatcagctgtcacgtcttccagataaattccttgagcgttcgctggaatacacgcatttagaactaggcgcttgtggaactattcctgtgttccataaagctactggtgatgctttgaaattccgggttgatggaaagccgttgacttctcatgattctggcattctgtggttgaatgatgaaaataaaaatgaagtctttgaacgaatgaaacatctgtcatctgaccagaagctctatgataaagagcgaaataaagcatttgaattcctggtagaacaccaagattctgagcattgctttaaagaacaatttgagttaatgacaaaataagtaatgggccttcgggccctttttgctattcatggaataatataaaattaaactctactagagaggttatatgaaaattattcactcaggcgattggcatttaggtgtccgcgcagatgacccgtgggtacaggatgtacaacgacacggaattaagcagcatattgattatgccaaaaagcatggaattaaaactatcattcaatacggtgatatttttgacgttcgtaaagctatcactcataagacaatggaattcgctcgtgaaattgcggagtctcttgagaaagaaggaattaacttaattacgatcgtcggaaatcatgacatgcactacaagaatacgttgacgcctaatgcatcaaccgaagttcttggtaagtataagcatattactgttattgaaaagcccgtgactatggattttgatgggactttgattgacttgtgtccatggatgtgtgaagagaacacatcagaaatcatgaagcatatcaaagaatcgtctgctgaatactgtattggtcactgggagcttaatggcttttatttttataaaggaatgaagtctcatgggctggaaccagatttcctcaaaaagtacaaacaagtatggtctgggcacttccataccatatcaagcgcagcaaacgttaagtacatcggaacgccttggacgcttacagcgggtgacgagaacgacccacgtggcttctgggttcaagacactgaattatcaacctttgatttcgtccctaatgaaatcacttggcatagaaaactgatttatcctgttactggaaaaattgactttgaagagtttcgtaatctcgcagtacgcattattatcactgcggtcgatgaagaccttcctaagtttgaatcagaacttgaaaaggtagtacatgaattaagaactgtttctaaagttgacaactcggttgagtctgaagatggcgaagaagtagaagttaaaagcttattggatttaatggaagaatatatccaagcacttgaagacctatccgcagatgatatcaaagccttaaaggttatgtctaaacagttatacattgaggcacaaaatcagtgaagacttttaaactaaatcgtgtcaagtataagaatataatgtcagttggccaagcggccattgacattcaacttgataaatgccaaaagaccttaatcacaggtaagaatggtggtggcaaaagtactatgcttgaagctattacttttgccttatttggtaaaccattccgtgatattaagaaaggtcaattaattaactcattcaataagaaggactctgtagtagaactgtggatggagtatgatggtcatagtttctacattaaacgtggacaaaaaccgaatgtctttgagattttacgagatggcaataagcttgatgaagccgcaagttcaaaggattttcaatcctactttgaaagtctcatcggcatgtcatacacatcgtttaagcagattgtcgtattaggaacggcaggatatactccgttcatggggttatcaactgctaatagacgaaagctcgttgaagatttgcttgaagtgtctcttttggctgatatggacaaactgaacaagacacagataagagaaatcaatcagcaaatccaggttaatgatgttcagcgtgaagcattgactaatgaaattaaaactcatcatgagtatgcagaaaagcagaagaaactttctggtgataacgtagctcgcctgcaggcgatgtatgatgagcaggtgaaagaggcacgaggatataaagcagaattagaaactcttcaaagcgaactgcttgaactcgtgattggtgatgacccagcagagtcaattcaagaagttcaaggtaaaatctttaagattcgttctaaaattgaatcatactcaaaggttcttgggttgtatgataaaggcggtcattgcccaacgtgcttgcaggatttgcattctaatgacactctaatcactaagattaatcatcatgttgaagaatgtaataccattcttggcgagttaaagacgcgccagagtgaactggatgaactagctcgcgagtataatactattcgtacgcgtgcaagagacatcaaaaatcaaatgagtaatttgaaacagatgactttaactgcagttgataaagcacgtcgtattaaagcagcaattgataaagcatcacaggagttcattgataactctgacaagattgaactgctacaagaagaattagataaaattattctcgtcaaaactaatttggttatggaaaaatatcgtcgtggtattttaactgaaatgctgaaagactccggtattaaaggagctatcatcaagaagtacatcccgatgttcaataagcaaattaacagctacctaaaaattatggaagctgattattcgttcacgttgaacgaagagttctctgaaacgattaaatctcgcggacgagaagagtttagttatgcctcgtttagtcaaggtgaaaaagccagaattgatatagcattactattcacgtggcgtgatattgctgaaaaagtttctggtgttaaaataaactgtttgttccttgatgaagtctacgattcggctaccgacgcagaaggtgttaaggcaataactgctattcttaataagatggtagatgccaatgtgtttattatttctcaccgtgaccacgacccgcaggcatatggccaacaccttcaaatgaagaaggtcggacgattcacggtgatggaatgaatgagtttactacgggccaacatctgttggcctttcctgaagtaaagcgatatgtgttaactaatttgttttctgatgaaaaacacttagtaacagaagaaatgttacgagatgcttttacaggaaatgaatataatagagtcatgtccagcaggaatcccggttggatggttgaagattattacgattaaggtaaatataatgattaattttgttgatgtgaaagatatccaggttaaaaacgtacgtgcagattccaacccgaataaccaaaatcgtattcgtaagtcttgggttctggctctaactgaagaaactaaagcagctattaaagataagattaaagattctgaagctcgctttgctttctataaatctattgacgacgaagttgcagaaaaatggattgaattgatgcgtaagcattacaacgaatcaatcaaggctggtgctaaaattgttactgaccgtcatggtggcgaacgtctagaaaatgattactgcgtagatgctgatgagcaactcgttgcggcaggtcagattgttgcagaagaattaactgctacattcgcagcttgatataattatcctgaacttaattaaaaggtattgaaatgaaattctctaaagaaactctgaacattctgaaaaacttctccaccatcaactccggtatcatgctgaaacctggcaattttatcatgactcgtgctgttaatggtacgacttatgctgaagccacaatctctgatactatcgatactgatgtagcaatttatgacctgaacagtttcctgagcattctgtctctggttggtgatgatgcagatattatcatgcaggaagatggtaacctggcaattaaagatgctcgctcaactatcttctggccagcagctgacccgagcacaatcgtgttcccgactaaaccaatcccattcccggtggcaaacgtaattatcgattttaaaggtgaagacctgcaacagctgatgcgagtatctcgtggcatgcagattgacacaattgctatcaccaatgttgatggtaaaattgttctgcgcggttataacaaagtagaagatgctgcactgacccgtccgaagtattccctgaccctcggtgattatgatggcgaaggtaactttaactttatcatcaacatgagcaatatgaagatgactgttggtgattacaagctgatgctgtgggcaaaaatgaacggttccaagaaacagactgcagcaaaatttgaaggtgcatcagcctcttatgtggtagcaatggaagcagatagtacctttgactttgagtaataacttcggggcttcggccccatctttaatctgaatgaggaaatataaatgaaattgacagtaaacgaagcagactttatgtgggaacagaaatatcgtccaggtactatttctgagtgtgtattgcctgctgaagataaagaaattttttcggctttagtagctaaaggaaaaattcctcatttaattctccatagtacttctcctggcaccggtaagaccacagtagctaaagcattatgtaatgacattaatgctgaaatgatgttcgtgaatggttctgattgtaaaattgatttcgttcgtggaccgttaactgcattcgcaagttctgcatccattgcaggcaagcagaaaattatcgtgattgacgaatttgatcgtgcaggtcttgcagaatctcaacgacatctgcgttcattcatggaagcgtatagcacaaactgtactattatcattactgcaaacaaccttgatggtatcattaaacctcttcagtctcgttgccgtgtaattaattttggtaaaccatctccatctgatgttaagccaatgcaaatcgagatgctcaagcgttgtctcgcaatttgtgaaaatgaaggcgtggtggttgaagataagaaagttgtagctgctttggtcaaaaagaattttccagaattccgtaagaccattaacatgcttgatcattattcttctaagggtgtgattgatgcaggtatcttgtctatcgttctgaatgaccgtggttcaattgaagatgtcatcgaagctattaaaactaagaacatcaaagaactccgtgctcttgctccaaaatatgcagcagactatacttggtttgtagataaactttcttctgagctgtatacaatggttactggcccaagcattatcagaatgtatgaaatcatcggtgaaaataaccagtatcatggcatagcagcttcgattgaattacatttggtttatatgcttattcaacttgttgtagagatgcagtggaaatgatgagtttatttgaagatgatgatcagtataatgagcaccaaatagcttggttaggtaaagactggacgaaagtccaggaattatctgattcatataaagaaaaagcagaaaatcaattcttcacaattattgggtctattaacgaaaagcaagagcatttgaatatctcgacgatggattattcaaaattcatggttgaaaacgctctttctcagcacgctgactgtatgcctgcggtttatgttatgaaccttgttggtcaagggttatctgaccaagcacactataactatatgatggcctctgttcctagaggtcgtcggtatggtaaatgggctaagttaacagaaaacatccaggatgcattgattcttcaagttataatgacatattacaaggtcaatgcgattgatgctaggatgtatagagagaccctggaagctaaaaacaagcttaaacctgctctcaagaaaatgaaaggtcttgtgactgatgaattggtcaagacaatcacgaaaaacgtgaaagaacagaaaaatcttaagaaaacagcattggaatggtaaagatgattgaaattacactgaaacagcctgaagacttcctgaaagttaaagaaactctgacccgtatgggaattgctaataacaaagataaggtactatatcaaagctgccacattcttcagaaacagggtcgttactatatcgtccattttaaagagatgttaaagcttgatggtcgccctgttactattgacttagaagatgaaattcgtcgagactcaatcgcacaactgctctctgactggggtctactgagtattaatcgtggtcaaactcttgcacagatgcagaataacttccgagtaattacattcaaacagaaacatgaatggactttaaaatctaagtacacaatcggtgcgtaagaaaagggcttcggcccttttactttataaaaatcggagtataattatcccacctaaagactaataactcggtctataaacaaaggaaacccatgaaagaattttatatcagcgttgaaactctaggcaatgacattgtagaacgttatatcgattctactggtgaggaacgcatgcgtcgtgttccgtattctcctgttatgtttagtcattgcatggaagaaacaaagtacaaagacatctatggcaagtattgcaagaagaatacattcccaactatgaaagatgcacgcgattggatgcgtcgtatggaagatatgggaatggaagcaatgggtatggatgatttcaaacttgcttatatcagtgatacttacggttcagaaatcgtctataataaaaaattcatccgaattgcaaactgtgacattgaggttactgcatctcaattcccagacccgatgaaagcagaatatgaaattgatgctatcacccattacgattcggttgatgataagttctacgtatttgatttactgcattctctttatggttctgtttccgagtgggacaagaaactcgctgctcgtttagattccgaaggcggtgatgaagttccacaacatattcttgatcgtgtggtgtatatgccattcaattcagaaaaagaaatgatgcttgagtacatcaatctttgggaacagaaatgcccagcaatctttactggctggaacattgaaggatttgatattccgtacatcatgaatcgtgtgaaacagattcttggtgagcgtgcgatgaaacggttctctcctctgaataaagtttcatctaagattatcacaaacatgtatggtgataaagaaatttattctatcatgggtgtgactattcttgattacatggatttgtataagaagtttagtttcacgaaccaaccgacgtataagttggatttcattgcttattatgaaaccaagaaaggtaaattagcatatgacggtccaatcaataaattgcgtgaaactaaccaccaacggtatatttcgtataacatcatcgacgttgaatcagtacaagcgattgatgctgttcgcggatttattgacctggctatctcgatgtcttattatgcgaagatgccgtatcaaggtgtaatgagtccgattaaaacatgggacgcaatcatctttaacagtctgaaagaacaggacaaggttattccgcaaagtcgttctcatgttaaacagtcatatcctggtgcgtatgttaaggaaccagttcctgctgcatatcgttatatcatgtcgtttgacttgacatctctgtatccgtcaatcatccgacaagttaatatttcaccagaaaccatcgttggacagtttaaacttcatccattgggtgagtacattaacaagactgcaccacgtccgtctgacgaatattcatgttcacccaatggttggatgtatcgtaaagatgtagatggtgtcattccagttgaaatcgcgaaggtattttatcagcgtaaagagtggaaaaataaaatgatgggtgccaaacgaaatcaagaactgattaaaaaggttctgaatgataagaagtttggaactatcgataaattcgcagaagttaatgtctatgaagatttctctgatgatatgaaagcagaactgctgacatataccgaagagtgccttgacaaactgatgtttgaatgtaaacatgctgaaatcttgggtaatactaatcagttaaaccgtaagattctgatcaactcactttatggtgcattgggtaacatttacttccgttattatgatttgcgtaacgcatcagcaatcacgttgtttggtcaaatggcaattcaatggattgaacgtaaagttaatgaatatctcaacaaggtatgtggtactgaaggacattcgtttgtagtagctggtgatactgactcaatttacgtttgtgttgataaggttatcgagaaggtaggtcttgagcgtttcaaagaaactaacgatttggtcgaattcctgaaccaattcggcaagaagaaaatggaaccttggattgaccaatcatatcgtgagatgtgtgaatacatgaacaataaagaacatttaatgttcatggaccgtgaagctatttcttgtcctccgttggggtcaaacggcattggcggattctggaaagcgaagaaacgatatgctctgaatgtgtatgatatggaaggtactcgatatgcagaaccgcatctgaaaatcatgggtatggaaactcagcaaagttctacaccaactgctgttcagaatgcgttggaagaatctattcggcgtatgctgcaggaaggtgaagaatctttacagcaatattataagcagtttgagtctgagtatcgtgaacttgactataaagtaatagcagaagttaagaccgccaacaacatcggtaagtatgatgatggtgcaggatatccagataaaggtacgccatatcacgtcaaaggtgctttagcgtataaccgagctaccgcgggctttgaaggtataacaccaatcatggaaggcgagaaggtgatggtcatcccgctgcgtgaaggtaacccgtacggtgagaaatgcatggcatggccatcgggcactgagctgccacaagaaatccgacaggaagttctagtgtggcttgaccacagtgttctgttccaaaaatcgtttgttaaacctctgacgggtatgtctgaagcggcagggttagactatgaagagaaatcgtctcttcttgacatgttcgatttttaaaaaagttgtttactttgccacaaggatgtggtaccattgttctcgaaataacatactgaggagattacaatgaaatcgttacttgctgttatcgttgctctcacgctgactggttgtcaaatgccacaaggtgatatcgtcccggcttcttctgttggacaggtgcgagcaattggcggtactgtaggatactatcgtgctagcaaccaggtctctgctgaatcgctcgcggttgagcgtcggttggcgaaagaaaaagctaatcctaatcgtcagctatctgcgatggaactcgacatgattgagcagaataagcatgagctggaagaaattaagcgtctgcgtaaaactcaaaaagaacgtacatgcactgctcaagcggcagcagtgaatgaccagattcgtttaactgattttgctaacggcggattgagttataatgagcataaacaacgtatggagcagttaaaatctctccaaaatcacatctacaacaaatgcatgtctaactgaggagattaacatggaagcagtatttggtttaatcattcttttcttcatctattttttgccgacctttgtagcttgcagtcgtaagcataaatcacggggtggaatctttatcacaaatctagtattcggttggtccattatcggttggttaattgcgctgatttggtctgcttctaacgcacagcagaatacaattattatccagcaagttaaataagaggtctcatgattgtaactccaatgacagtacaagatatccgtcaagaattcgctgatgctttgctcaacaaagaatttgtgattgataagacgggtgtgaagactattgaaatcgtaggtgcatcatttattgcagatgagcccctgatttttggtgcagttaatgatgggtacattgcccgtgaacttgagtggtataaatctcaaagtttattcgttaaagatattccaggtgaaaccccagctatttggaaagcaattgcatccaaacatggtgagattaattctaactatggctgggcagtttggtcatcacaaaactattcgcagtttgctaactgcgcaaaggaacttatcagtaatcctgattctcgccgcggaattatgatttatacacgacctcaaatgcagtatgattttgagcgcgatggcatgagtgatttcatgtgtactaacaatgttcagtatctgattcgtgataataaagttcatgctgttgtaaacatgcgctctaatgatgtcgtctttggatatcgtaatgactatgcgtggcagctctatgttctggaacagttaaccaaacttctgaatgcatcaggtaaaaattattcagttggtgacattatttggaacgtcgggtctttgcacgtgtatgagcgtcatttctatcttgtagataactatgcttatactggtgaaactcatattgcaaagaaagactataaaggtgagtggaaatgattcagtttgtaattccaagttataagcgtgccggggcagttactgccctgactatgtttcctgaaggttatgttccgcatcttgtagtacgtgaatcagaaaaagaagcatacgaaacttggcacggtcatgctgctaaaatcgttactgtccccgatgatgttgatggaattgcaggaactcgccgtctgattactgaaatgtatgcaggacaacgaatttggatgcttgatgatgatacgaccattcatctgactgaaattcgtgaacgcgacgatcgccgtgttccacttggtgccggcgaggcaatgagtcaagaggtatttgatgatatggtcaaatacgtagagactgctatggattgtggttattatcacggtcatgctcgcttgccgattttcaaaatcacatcaagctggggtcattatcgcgagaatagttttgggttcaccaatactttctatgatttgactaaacttaccgcagaagatattggttacggagttattgaccttaacgaagatgcttatgcttttctaaaattaattaacatgggtcatcctcatctggctctgtttaagtatctcgttaaatccggcaaagtgcagtctcctggtggttgttctacacagcgtgatactgctcgtcagaatagagcccttgaacagctacatgctgctttcccaaatcaagcccgttggaaatctaaagacggcgaaagacgtgggttattcggtgataatgaacctctgaaatcaattcgtatgtgtattaacactcgagtgaaatctcaggccttccatgaatttggtaaggtagaaccatatctgtgagggcgaaagccctccaaggacctcttatgaacatctatgataaatctgacgtagctggtaatatattcaaggctgaagaattcagatgcttcgtatgtaaatctgatgagtttgttcatgaaggaactactggctcagatggaatgcattgctggtggcatggcatgtgcgttggatgtaaaatacactatgaaatagatatggaaacagtggtttataacaccaagaagaaatggaacttctgataatagcttcaagaacaaagtaatataattactctatcctttaacctgtgagaaaaatataatggagacttatggaatataatgaatgtctgacttaaaatctcgcctgattaaagcatccacttctaaaatgacagcagaactgactaaatcaaaattctttaacgagaaagatgtagttagaactaaaattccgatgcttaatatcgcaatcagtggagcgttggatggtggtatgcagtccgggttgactatcttcgcaggtccatctaaacacttcaaatctaacatgtctctgacaatggttagtgcttatcttaataagtatcctgatgcagtctgtttgttctatgattcagaatttggtatcactccagcttatctgaaatctatgggtgttgaccctgaccgcgtaattcatacaccggttcagtcggttgaacaattaaaaatcgatatggttaaccagcttgaagctattgagcgtggtgaaaaagtcatcgtgtttatcgactctattggtaacatggcgtctaaaaaggaaaccgaagatgctctgaacgagaaatctgttgcagatatgactcgtgcgaaaagtctgaagtctctcttccgtatcgtaactccttacttctctattaagaacattccttgtgtcgcggttaaccacacaatcgagactatcgagatgttcagtaagacggtaatgactggtggtacaggtcctatgtattctgcggatactgtgttcatcatcggtaaacgtcaaattaaagatggtactgagcttgaaggatatcagtttgtcctgaacgctgagaaatcgcgtactgtcaaagagaaaagtaagttcttcatcgatgttaaattcgatggcggtatcgatccatacagtggtctgcttgatatggctctggatatcggatttgtggttaaaccgaaaaacggatggtatgcacgagaattcctggatgttgaaaccggtgagatgattcgtgaagaaaaatcctggcgggcaaaagatacgagcagtacggaattttggggtcctctgtttaagcatgagccattccgtgacgctatcaaagcccgttatcagttgggtgctattgattcaaacgctgcggttgatgaagcggtagcagaaatgattaactcaaaagtttcaactaaggttgatggtgttaaacttcctgagagtggttcagtatcagctgctgaagttgaagatgaattagagaacttcatgaatgaagactgagtttgatttagaatctgaactcgagaaatttgaacaagaatctccctcggaagagggagacttcgagcgtcaagaacgagtgttcaagaaaagccatgaaataatccaagaagctatgaagactgttatccaagaaattgtgataaaattaaatggtcaatcacacttggtttatgttcataaattaaatatttctccttcgggggaagtaactattgagttcagtacaccatctgaagctcataaggatgaactttatcctcatgtggaagcttgtgttaaacaacaaatccagagtgcattaaagaccaagaaaaaatcattatggaaaatcttttaagaggttaaagtggtagaaacaatcttagctaatctgatttacaaccaggctttctttacgaaggtttggccatatatggacaaagagtacttcgagcaaggacctgctcagacggtgtttaacataattaagaaacacgttaatgaatacacagcaattccttcaaagactgcgttatgtgtagcactggataattcgtctataactgaaacggaacatgaaggcgcaaagaaacttattgataagttatctgatgctcctgaagatttgaattggttagttaaggaaactgaaaagtacgttcaagaaaaggctatgtataacgctacgtctcgaattattgaaattcaggctaatgcccagcttgagccaaataagcgagataagcgtcttcctgatatgggagctattcctgatatcatgcgcgaagcgttatcagtatcgtttgatagctatattggtcatgattggatggaagattatgaagctcgttggttatcataccagaataaagctcgtaaagttccgtttaaacttagcattctgaacaaaattactaaaggtggtgccgagactggtacgctgaacgtattgatggctggcgtcaacgttggtaaatcgttaggattgtgttcattggctgcagactatcttcagatggggcataatgtcctttatatttccatggaaatggccgaagaagtttgtgctaaacgcattgacgctaatttgcttgatgtatcacttgacgatattgatgatggctgtgtatcatacgccgaatataaaggcaaaatggaaaaatggcgtagttctagtactcttggtcgtttaatcattaaacagtatccgactggcggtgctaacgctaatacattccgagctcttctgaatgagttgaaactcaagaagaactttaaaccgactgttatcatcattgactatcttggtatttgtgcttcttgccgtattcgtcaatatactgaaaacagttacacgttagttaaagctattgcagaagaacttcgtgcattggctgtagaatctgaaactgttctttggaccgcagctcaggtaggtcgttcagcgtgggatgcttctgatatggacatgagtgatattgcagaatctgctggtctacctgctacagcagactttatgttggctgtgattgaaacccctgaacttgctcagatgaagcaacaattaattaagcagattaaatcacgttacggtgataagaacatcaacaataagttctctatgggtgtacataaggctaatcagcgttgggtagaaattgagcagcaaaacgacccaactaagcctaatccaagcaataccgtccgagaaggtgccggtgcacagaaccgtgtagccgaatctaatcgtcaagaacgagtatcacgttctaagcttgatgctctggcagaagagttaaaattctaaggaattctatgatttttgtgtttagcgcggtccgtgaccagtcaggtcactcttttgttgtaacagccacagataccattcatcgaggcattgaggcatataacaaagcagacctatctgtatgcgactatggagaggtcaaggtgtataacagcgatggcatctgggttaactctgctacatacctacctaccaagaatctgacctctgacattttgttgaaaaaattgttcaaaaggtagtttactttctccaaaggccatgatactatggccttactgaaacaaaacgagtagaggaaaacatcatgtggacaattgaaaaagcattagacgtagtctttaagagtaaagatgaatcagcggaaactgtaccgcattgcggtatggtagttggaagcaaagtagttaaatctccacatgctaatctgcgttgtgatggcgtagtacgaaaagcattagatgaaggcgatacagttttagtagttgttgagccattcaaaaacactgatggcaatgtgtcaatgttagtatacgcaaacggtgattatcgcctgatttctgctcttaacgtacaagctgcttgaggaaaccaaaatgaaaaagattgtacttgctttagtgttcgcagtatcaagttgctctgcagttcctgccatggccaactatgacaaagacttatgcgagtggtcaatgactgctgatgagtctgaagtagctcagcagattcgtgcagatgttggtcatattgtggaaaacgtagacccgagcaaacaaacagaagtgcaagcagaacttaaagacgacggcgcagcacttaagttgaattatgttctttactgtgatgcccagtttgataacttcaacatcgttaagtggattttaggatgattacatacgttttaataatggcgctatctacgggttcaggtggaatgtctactgaaaagatggcattcactggtaaagatgaagccgtgattaagcaaaagtgtgaagatacaggcaagcagtttatgcttatcaaagacaatccaaaatcaatgtctccgacgctgtatcctacatataaatgcttacgtattacgcatgaataaatagtaggaggctctatgaaaacatacaaagagtttgttactgagatggtcgcaggtgatgcgggcggcaatccacagaatattgcatcaggtacaacttccggggacatcgtcaataaaggacccgaaactcttccaaagaaacgaaaagcggataaagacgctgccaagaaaaagtgataaaatggccttattagtttaaggccagaggaaatattatgtcttgggttgataacgagtatgcaattcgcgcaatatctcacctacctaaatttagacacgttactacatcttcaacattcaagttaaactgccgttgcccaatttgtggtgactcacagaaagatatcaataaagcacgattctggatttttgatgcaggtcaaggattacgctgtcattgcttcaactgtgagtataataagtggctatcgcagtatcttaaagataatgaacccgacctctatcgagagtatcttcttgagaaaagaaaggagcaggtctttgataagccaaaggctgtagaaccgtctgagaaaattaatgcaaaactccccgtaatagaaaaacttaatttctgcgagcgattagatagacttcctaaggaacatccgatagttaaatacgtgactgccagatgtattccaagcacttcttggaaaaggttatggtttactaaccaatggccttctcttgttaactccgttaatccaggaacctataagaatgagacgaacgaaccacgtttggttattcctatcttcaacaagaaaggagagattgagtcgtttcaaggacgagcactacgaaagaatgctccacaaaaatacatcacaatcaaagcccacgaacacgcgaccaaaatttatggtctcgacactattgatgagtcaaaactcgtattcgtcatggaaggaccaatagattcgctgttcattgataatgctattgcaattaccggtgggtctttagatttagctcaagttccatgtcatgataaccgagcatggattatggaccatgaacctcgtcatcctgatacgattaagcgtatgaagcgtttagtagacgcgggtgaaaaggtagttttctgggataagtcgccttggaaaagcaaagatataaatgatatgattatgaaagagggggcaactgcttctgaaataacggattatattaatcaaaatatatcgcaaggtttaatggctaaattgcgccttgacaaatacgcgaagatataggggccaaagccccttaaattaaagcaatcctccggtcataataaacgacacaactttttctaacggcattggaggaagaactagaccgtgtgtgctagctaatggaactaccacataattccatgcagctaaagcagcagtggcgattccgacgtaaagatatcttccaaatcctcctttgtctttacattcttgtttcacttcagacatgaatcctcctgctatttatgttaagtgatataatatttatctaattgaaaggatatctgtgaattaccaaaaaatttactcagctttagttacaaaggctaaatgccggcatcttgatggatataaagaacgccatcatataattcctagatgtatgggaggagcagatgacaaaaacaatcttgttgagttaactgcgcgcgagcattttatagctcatagattattaactaaaatatatccaaatgtgaaaggattgcattatgctgtaaatttaatgcgatataataaaggtgttaaattaacaagtagattaatagaaacccttaaaatccaaaactctgttcttttctcgggtgaaaataatccaaggtttggaaagccatcatggataaaagggttaaaaacaccagaagaaactaaggctaaaatgcgagcttctcacaaaggcaaagttatttcggaagaagctaaagctaacatgagcaatgctcgtattggaaggtttagtggtaaaaattctcctagatacggtttaccgaatccaagacgtggtgagatatggaactcgtatgattcgctttacgagttgtgggtttataataatagacctaagcgcacaaaatttaataaaatagctgtcaaggcaggttatcctaatatctgctatagacgtatgatagaaaacttcataagaaaggaaaaataacatgccacatttcaacgaatgtagtcaactgatcgctggtgcagataaagctgaagcccgatacgcaggtatcgtacgcaaagttggtggtgaccctctgcaagtaatgcttgatatgcaaaaatctcttcaggttcgtcttgcaaatgacaagcctggtactaacatgcatcctgatgaattggctcaagctggtgatatcgtacagtggctgcgtaatcaaaaagattacattgatgacgaattccgcgaattgctgacgtctcttggcggtatgagtaacggtgaaaaggcagctagtgctgtgtggaaaccatggaaagctgaccacgtcaagatgcaggaaacttatatcaaagacctgtctgataaagaccagcttgaaatcaaatttgaaatgattgatatcctgcactttgttctgaatatgtttatggcgcttggtctggattctgaagaaatctttaagctgtattatctgaaaaacgccgagaactttgctcgtcaagacagtggttactgatggctaaaagaatatctaagcgtcgtttaaaaattatcagaaaacaaaaagaacgggccttagtattggcccttcgagaagaaatcactcgagaaattgataaagaaatattaaagacgcttacagcagctatataaatactcctgtaaactaaataggagattaaaatggcttacgtaaatatcaaaacttttgaccataccactgctgatggcgaggttaaaggtactgaagtatctgtagcttttaaggtatattctgactcacatcgcattgctaatgcacagtatcagattttcccatccgaaaaagccgcttattcaacagtagttgatgatgctgcaacttgggcaaccaccaacgcgaaaatgtttgaagctgttccatctgatgcagaagtataaaaattaaggactccttcgggagtccttttatgctatattgggaatagtatattattcctactaactgaggagaacaaaatgatatgttatactaagccctggtatcaatcaccattaaagaagtctcattttgattgttggtacagaggtgtaagagctgcagcgttattactaaaagctgcgcctgctttaattaaagcaaatgataagtggtttgaagacaacaacatgactgaaggagctatgtgtggccgacgcaaaaatctataaagtaagtttacagcgcaaactaaaagaaggttttgattctgataaagtattcactgtagcaatttacaattattcttatgacgagtttaaagaactggtcaataaatttgaagcacgcgggtggtgtcctaatagtaaatatggacttgtcaaaacagcccatacttttgatgtttcacacatgccaggaagtccaattaatattttaggtgctttacaccttaaaggatataccaatgcatatcatgagaccgatctgtttgaatatgcaaatgataaaatcgttaacggcaaaagtatcgtcattgacaatgaagacgcttttatagtatttactcagttagtatggtcatttatgcaagctgatttcgccagatttactccgagcgatttgcttcaaaaagctgctgatgcatataataatagtaacagtcaatatcgtcggatggagtggttcatgtgatggatttgtttgaaatgatggaagagcctcaggaagaggttcaggttcatccagtgatttctaaggacatcaaagacgaataccgtataattatacagaagtatggtattaaagccccagaagctcttctagatgaactagcttcaatctggtctgacccgccgccctggtctccgtgggcaaaataatttcacaaagtagtttactcttctaaaaagccatgatatgatacctctcgtaaccaaaaatggagaatatcatggctatttcattaaacccatctatttcagtaaaattatcaaaggttattcctatcgaagaacccattcgctccattgatgttcttaacttcgcgcgagaaagcaaaggattacctttatatgatttaagcgtatgggaagcattagccaatcgttttgactgcaaagaacagtcaattctgtggcagtgcatgaacaataagattggcgaagaatttcataagaaacttgactctatcgttagacgtcatcaaattgataacagtgacattctctatagaggtctatcatgccgcgaggctaaagccttttatgacgctcttattaaaggagagaaatttgacttcggaaaggtagcatcattcacaacagatgaaacgattgcccgagaatttgcaggcaaatggcattactcgacctttgtagtcattgaagtcaataattgtcagcaatcatttgattatcataccaacatgaaatcgcttttaattactgcaccagattctgaattcatgcgaccaaatgatgtgattgataacattgctcagcgcagaagcgctgacatcgagatgattgataaagaacaagaaaggatgctaccgatgggaactaagttcaaagtggtgggtcataacaaagttgaaaaatctggtttacttatggactactttagtgttactatagcttagtcaactagtgattatctagaactagggacctagacccattataccgtccgtaagacgaaagcatttttgaggaaaacatgatgaaatttactgctgaaaccgctaaagtttatactcgtttaattacaactttaggttctgctcaacgtcggcacaaggagttcaatctcaccccagaatatctgtttaacatcatgcagcagacacattgcgcatactcaggcgaaaagtttggaactgttaaaggaaatcatcctgatagcatgacgctcgagcgttggaataatgacttgggttatgtaatggggaatgttattcctgttaagcaaaagtattatacttttgcgcggaaataatacgattgaaggccttgaacgaaaagcgaatgaaatcgcagcacgcatagttcgttcttcagattctgttaagccaacaagtgataaagaagcttctcgtttggaaaagattcgtgagtatgaaaaaactataacatcaattaaaactaacttacgtaatcgcgaaaatcatctttctcaatttgtgcaaaaagaaaagaatggaactgcaacctcggcagatttagaacttattaatgcattgagaactcgtatcagtggtggtaagtctgaattagctaaagttgagcgtaagttatctgctattttagcgtcagttccgaatcgtccgtcagatgctgaaatccgtgtacaatcaatacggctaattgttagctcacttcgtcggttagaaaaatgctcaatgctagataagttaaaattgaaaaaaggtcttccattgactgcgtccttcttccaacttttgagaggtaaaatgtaatgcaacactatggatatgtagtagcgtataaggataaagacggatttgaccatccagtcacaactgatatgtacgatggagaacgatgtgtggtcttcactaatgaagaatcggctaataaagcacggattcgtacaatgtcggttttaacagacaaattagcaaaagggaattttactggaaaaagcaaaaccaaaggaatgctttggtggaaaacaactgagctagtgtatgaaccacttagcgatgttgagcgcgaaaaactcaaagcaaaaattaaaaatctacatgtagtgagggtaaaagtggcatgattacgtttgaccaattaaaagaaagtcaaaaagcgatttttaataaagtcattgaaatggtcaaacaaggagccaaaggtcaacacattacgattaatggacctgctggtacaggtaaaacaactttaaccaaatttatcattgacgctttgatttctcagggtatctctggcattgcgttggcagcacctacgcatggggccaaaaaggttttatctaagctcagcggaatgcaggccagtactattcatagtcttctgaaaatcaacccgacgacatatgaagaaaacgttctgtttgaacaaaagaaagttccggatatggcatctattcgagttcttatctgtgatgaagcttcaatgtatgaccgtaaactgtttaagattttgatggcaactattcctgcctggtgtattgtcattgccattggtgataaggctcagatacgtccggtagaacctggaagtaatgaacctgcactgagtccattcttcactcataaagatttcttacaacttcatttgaccgaggtgatgcggagtaatgccccaatcattgaagtcgctactgaaatcagaaatggtggatggattcgtgactgtgtagttgatggtcatggagtccgtggttttacaaaaggaactgcccttaaagattttatgctaaattattttaatttagttaaaacaccagaagatttatttgaaaaccgaatgcttgcgttcactaataaatctgtggataaattgaatgaaataatcagacgaagaatatacgaaactgaacgaccattcgtagtaggtgagattgttgttatgcaagaacctcttaccaaggaacttaaatttgaaggaaagaaattcagcgaaattcttttcaataatggtcagtttgttcgcatattagatgcaactgaaaccacgtcatttttaggtgccagaggtgttccaggtgaatatctggttcgtcattgggtattagatattgaaacctatggcgacgatgaagagtacgctagagagaaaatctgtgtcatctcatccgaagaagaaatgaataagtttcaatttttcttggcaaaaactgcagatacatataagaactggaataaaggcggtaaagcaccctggtctgagttctgggatgctaagcgtaagttccataaagtgaaagcattaccggcttcgactttccataaggcccagggcatctcaattgacagaagcttcatttatactccatgcattcacatggcagatgcttctctcgcacagcagttattatatgttggtactactcgtggtcgatatgatgtgttttatgtgtgaggtaatatgtttgaattgaaattagaagaccttcaaacaatgattgttggcttacaagaatctaagtttgaagcaccagacaatgttaagcgtgctattaacattaaaattgatacagttctgaatgagcttcgtgatatagcagataatgctaatgctattacttggttcacaggatatgacccaaaggtgtatctgagcgaatatattggttgccagttacgcgaaattaaatttatgctagaggctcaaaatggctaaagactttattattgattttgaaacattcggaaatgtgtcaagctcttctgtgattgaccttgctctaatcacctttgattctgaccccgaagttttggaaagcttcgatgaattggttaaacgtggtcatcgtattaagtttgaccttaaatcccagaaaggtcatcggttgtttggtaagtctactcttgagtggtggaagaaacaatcagctgaagctcgggctaacctggcctcaacgccagacgatttatcagtaattgctggaattaaagaagctcagcaatatctgattgataatggaattcacccatgggattcctttggctggtgtcgtggacagagctttgactttccgatttttgttgattgtcttcgcgatgttcaacgagcccaaggaatttccgaagaagaaattgatacatttaaagaagagccgtgtaagttctggaatcagcgtgatattcgtaccgcgattgaatcactgcttctgactcgtggtctgacaactacccctcttccaaagggtacgctcgacgggtttatcgcgcatgatagtatccatgactgcgctaaggatattctaatgcttaaatatgctcaacgctatgctctaggcctaagcgaagcaccaagtccagaagataccgatccactgagtttacctaaggggcgtggctaatggaagagtttgagttcgatgaaaacttcgaagagtggttcaaccgggaaatcctcccggaaatctctccaacgatggttctggtggccaaggctatgatggctaagggctgggaagctgggtatctgttcggcgtcgatgttgggtgtgaaatttctcaccgataactatttactttatgaaagagccgttatataatggctctacattaacaaactgagagaaacacgatgaaaggtttagttgtaggtgaaaacgttaaagtaattggtggtaagtgggttggtcacaatggtgtaatcgttaaagtagttaatcgtaatgacggtaaatctgggtataagatttaccgtgaagattttggtgattacatccactgcttgaaaaaattcgttgaatctagtgaaagctatctgcgcaagtgggtacacgtgaattcgctggacaatgttattacccaatcggtgagttctactaattcagccactaatctgtcgctgcataaaaatgttcttgtcactgatgagtgggaagaagacggtaaaactttagtaaatgtagtatttcaaggtaactatgcggttctgcctaaagccgatgtagagccgacggaatcacagcgtcaaggtttagtataaaaagttgtttactttgccacaaggatgtggtactattatcttatcaactactgaggagaataacatgaaaactgaaaacaccgtaaaaattactgccgaagcttttgaagacattctgttcaatcctgacttaattgtcgttcagaaagagaaaaccttcggtaaagaagagcattggacctggttgtatgtattcgcgaaccatggtgatatcgtcccagttcgtacctttgctcgtgtaatcacagttgatggcccagaatacatggagattgtgtaatgaattttaaagaaggcgtacagtacaaattcgtcaatgatgaagcggaagaagaattttcttcacgttatgagtttaatgaagactttgtgtatgaactccatgaaaatggcgggagttttactgttactaaagttgaccaccaaaataacagagtatccggaattacgtgggctaatggcacagaatgtgatgaagttggtggtgaagaccttgtaatttttgatagcgaattcaaatactttactgaagttggaacttccgcgaatgtaattccaaccgatttggttatgaatctttctattcataatcgtggtcaagcaatcgctgctattgcagcactgcagagtgcatatcaatgttaaatttagctcctatttttgaagcatcaaaattatcttatcctattcccaaccgtagcattgggaatgtcatgctgcaactttcttcagaaactggagaaatgtgtgattggattaatcgtccatggcggcagaaagaagaatttgaaggcgagtgcgcagatgttattaactgtgtagtggatgcactttggctgcatttcagaaatcgccataaaaatgatactcatgtatcagatgatgaaatctccatgatggttactcgtgcactgaatgagcaaatcatggtcaaaacacaaaaatggaaggatgctgttaatgccaacgtatgattacaagtgtgaagtctgtggaaaaaagatagaaattatgcgtaaaatttcccatcgtgactatactgttaactgctttaaccctaagtgtgaaggccaaatgaagcgggtggtttctgctccggcagttcactacgatggattaaagagtggtgattattgatgggaactaaagcacgcattaccatgaaacccggagaaatccgggttattaaagtaggtaatataacttatagggttaaattaaaatgaaaaagattttaattacagcgcttgccttcatgatgattggatgcactgacgctgataacgcaactcgcgtgttagataacgcgggatttactgatatcaaaatcactggatataagttcttttcttgctcagaggatgattttcagcacacaggctttacggctattgggccaacaggaaaacctgttaacggaacagtgtgctcagggctttttctcaagaacagcacaattcgttatgaataaatgaccttcgggtcatttagttgtttacatggacatcgtgttttggtattatagtcttgttggccagaggagaacattatgattattgggatgacaactgcacaaaggcgtgctaaacggcaattaaaaatggtagagcgagctattggaaaatacaggtttgcttggtggccaatcaatgacgtgaatggtcgtactatttggatgcagaaatattatgaagtctgtgaagagtggatttcacttaatgaaaacaacgagtaccggattgaacagtactacggaaattctcgatatgcatacgctaacgttagtgatgctcaatggactatgtttgaacgacagcggccacgatatcccgagtataaagcggttaaaggaggccatgaggttcttggtaaattgatgtatatcaaagaagaattacttgctataattaatagttgatataattccttcactaaccgaggaaatgtaatgattaagaacgaaattaaaattctgagtgaccgagaacatatcattaagcgtagcggaatgtacattggtagttctgcgtttgaagcgcatgaccgttttctttttggtaaattccaatcagtaaagtatgttcctggtattatcaaactgattgatgaaatcattgataactctgttgatgaagctattcgtactaatttcaaacacgcgaataagatttcagttgatgtcaaaggcaacaaaattattgtaacagataatggtcgtggtcttccgcaggctcctgtagtaacacctgaaggagaaactattccaggaccagtagctgcatggactcgtcctcgtgcgggtggtaactttggtgatgatgctgagcgtaaaaccggtggtatgaacggtgttggttctgcgttaacgaatattttttctgtgacatttgtgggtgcaacctgtgatggaaaaaatgaaatcgttgtccgctgttcaaatggcgcagagaatgtttcttgggaagaacatccagctaaagataaagaatttattaaagacaagactggtactgtcgtgtcatttatcccagatttcacccactttgaatctgatggcttaactgatgttgaccaatcaatcattcacgatcgtctgatgacgttagcagtagtttatcctgatattgaatttaaattcatgggtaaacgggttcaaggcaagtttaaagcttacgcccacatgtatgacgaaaatgctgtagtgcaggattctgatacttgtgctattgccattggtcgttcggatgacgggttccgtcaactttcatatgttaataacattcacaccaaaaacggtggtactcacgttgacctagttcttgatgaactgagcaatgaacttattccagcattaaagcgtaagtacaaactagaagttaataaagcgcgaattaaagaatgtctgactgtcatcatgtttattcgtgatatgtctaacatgcgatttgattctcagactaaagagcgtctgacttctccttggggagaaattcgtagccatattgatattgattataagaaacttgctaacgctattatgaaatccgaagatattcatatgccgattattgaggcgatgttagctcgtaaacttgctgcagagaaagctgcagaaactaaagctgccaagaaagcgcagaaagctaaagtagctaagcacatcaaagccaacaaatatggcaaagatgctgacaccactttattcttaaccgagggtgattctgcgattggttatctgctcacaactcgtgaccgtgaacttcatggcggatatcctctacgtggtaagttcatgaatacatggggaatgtctgctgcagatgctatgaagaacaaggaagtatttgacatttgtgcaatcactggtttgactatcggtgaacccgctgaaaatactaactatcgaaatattgccatcatgactgatgcagacgttgatggtgttggttcaattttcccaagtcttttagcgtttttcagtaattggcctgaactgtttgaacagggtagaatccgctttgtgaaaactccggttattattctcaccaaaggtaaagaacaacgttggttctattctcttggtgaatatgaagaccataaagatgatttcaaaggttggaaacttcgttatattaaaggtcttggttctcttgaagaagatgaatacgaacgtgttattcaagacccggtttatgatgtagtcactcttcctgaaaactggaaagaactgtttgaattaattatgggtaatgatgctgcaccacgtaagacatggatgagtgaataaagaataaatagtaagggtactattgcccttacttagaaggaattaacatgcaacgttattggattactttgatctcaggcgactatggatatctgttcgctgaaaagaaacctctgcccggaacttgggttactatctgggtggaaaacattgatggttctaaacatgaggtttatggtcgagttagtagggtgtggtaatctaagggacctccgggtccctttttctttataagaatggatttatatggctttaatcaagaagtgcttggagatgattctaggattcttgcttaaagttatagtgatataatttccctaaatcactgaggaaaatattatgaaacgcagttacatcccatcagaagaattattcaacgatgctatatatcgtgaatatcgtatcatccagcggttctttgacatccaagcagctgaggaattcaaagaacgcttcaaagaaatccataataaaatttttacaactaacaccgctactgctgaagagctccttgaagtagcagaaatcattaaacgacataattgataggaataaaatgaaaattaaatgtgatgatgaagtaatcattggttcttctgacgctgatgattcaacgtttactattaaggcctcgggtaaagcttttgacatcttgtcaaacaaactctataagtataaagttcgtgctgttgttcgtgaactttctactaactgcgatgatgctcataaactgaatggcaatgaaaatcgtccattttacatcaaagcaccaactcgtcttgacccgcgctttgtaattcgtgattatggcccaggtcttaatcataatgacatgatgacgatgtataaaacgttctttgaatccacaaagaataacagtaatgatttcatcggtgctcttggtcttggttctaaatctccactgagctacacgagtacatttaatgtagtatcatatcataatggtaaagccaccggttatactgtcatgaaaaaccgaggtgaacctactattcgtccgatgtttgtcgatgatatgaaagaagacgaagaaactggtcttgaaattacagttccggttaaagtagaagatattgatacttggcattatgaaatcgcatatattttgcgtacctttggtgctgtacctccaaaggtagattctcttcgccgtgaaattgaatatttcccagtagataaaactgattggtttagcgttaatagttcgtatgaaagctatggtctgtatgcagtttatggaaaaatcgtatatccgattagcggtgtagatgttaaggcagattggctgcttaatcgttatggcaaggtttatgttcatttccctcttggcgaattagacattactccatctcgtgaagagctttctcttgacgaagaaacaattgctaatatccagaagcgtgtgaatgctcttgaagaagaggtaattaccgcagatattaaagcgtttgaagcgtatgaatctgaccgtgaattcttgcgtgagttcaataagctgagttctaaggaacgttctattcttcagagccgtggtattaccattgggaaccgcgatattaaacaagtagttgcgaagtataatcttgataaaattcgttcatattatgtagataacgaagtatcagtttatgtttcatgcgatgaacctgctcgtcgtaaagtgtcaagcagttcttggcatcgtcataaccaagtaaacatttctgatatttgcggggttgatagaactaaagcgtttgttcttattgacgataaagcgggtaaacgtattgctacggttcgagctctgtgtaaatctgggttagttccaatctgggcacacattactgtaatcaaagacaatgaagatgaattacatgtcattgatgagctgaagaaaatcatggatactgatgaagtcgtagtattccgtgtgtctgaacttgaagcccagagaaaagctcttcctgattatgacactggtccaaaagagaaacgtccaaaatctcctaatgtttctctgcattggattgataaagacgggtactgggaagaagaccgtcagactttagtatcatctgaaattgctgagcttgaaggttatgcaatcggtcgcaatcgtgatgaaatccacactttcccagataatgtttggtggtggaatatgagcatcacagatatgcggtctctggcagaagcgtgtggaattaagaaattctatgcaattcgtccgggtgctatgaaagccgctgcaaaagctgatggattgctttcatttgaccgatttattatcgaccaatacatcaagtgtattgataaggtagattatgaccagtacatgccatcaaatgctactggaaaccgtatctgtggaaatattgcgcattacgataaattgaatttcttgtcgagtaagtttactgcgtctggaatgaaaaatccgttcctgacaaaactaaacaaaatcgctaaggtttgccgtaccagtaaaatcaaagatgaaaacgatgatttagctttatgtaataaaatttataataaactgtctggtgatgctgagacaatcttctataaaaagattgaacagtttaaagatgattatcctgtcatcgcaagtgtcttggatacttggcggactgacagcaaactcgtcgatgatatcgtaaaaatcatggagctccttgatggagcttctactcaaaattctgaaaataaaggtgaataaatggctgttacctgtctgtctgaaatccaaaaagatgcaatcgttaaaaacttcaaaaacggtctgtacactaagaaagagctcgccgagaattatggtgtttcccgtgacactattcggcgtgtgtttaaagagcgtgaagctcgagctgccgcggcagctgttcctgctaaagtagaagctcctgttgagcgtgaatttaaatgggcagcaagttccaaattcatttcaattactgaaggccgtactacttataatgctgatagccaacatcctggatttaaatctgcactgcagaaacttgtagatggcgatatcgctggtgctattgaccacattaacctggaacaaggcatcaagaaattcgttcagggtaacgtccgaattgaagatggtacgctgttctataaagatattgaactgaaatctggtctgactgagcgtatagttcgagccatggaagatggcgaagactttaaacgttatctgcctttcctggaaaacctgatgctgaacccgtctcgtcgtgcagtttatcgtctgtttgatttcctgaatgcaaacgatatcgacatcactgatgatggtcacttcattggttggaaagtagttcgttccacttatatggactgtgcttcaaacacgtttgataactctcctggtaaaactgttacaatgccgcgtaaccaggtagatgaagacgatcagcgtacttgttccgcaggtctgcatgtctgctctaaatcttacatcggtcacttcggtagtggttctgaccgtattgtttcagttaaagttcatccgcgtgatgtagtatctatcccggttgattacaacgacgctaaaatgcgtacatgtggttatgtagtattagaagatgtaactgatcgttggggttcagaacttcgctaattataaggagccttcgggctcctcttttattatgggtgaaacatgattaatccatttaacgtatctcattctaaagttgttaatcttcgtggtactcatcatgctgctacagtgttttgtcatcatgtagttaaacatgaaggtgatgttcactatgcttggttgcactgtgatgaactcgtagaacttggtgatgattttgttgtggaaccagacacttgtaaccacgacgatcgtgtttattttggtgaattacatatcagaggaatttatggcattgatgaacaaagccctgcagagattgaaccagttgcggacatttaccctagatttgaataagctaaggggtgaagcaaaagtaaaaatcattgatactgcaagatatagtttagatatcgacccatctcaagacagaattgatgttcttaaaagatgtagaattgctataccggcagagtatgtggtagcggattttcttgatggatacgtaaacgatcaagttgttgaccataataacaacgatccgtatgaatgggcctgggacgtattagctcatccctactaccaaggtgttagagttgaagttaaaacacactttgttcatgaccgagcaaatcataagccatggattaatgttacaactggtaaagacggtccattcccagatggaagtggaataaatctagggcccatgtttaaacataaagttgcagactgtataattatattcgttgcagaagaagtgtcccagaatgtcatacggtacacaccgatgttcagtggcggtatcgaacacctcatggaagtagtaaaaccttcacgagttggtgctggcgggtatatcatgcacaaattttaaaaagttgtttacttccgggattggccatgatactatggccttacaaactgaacgggagtaaaacatgagttacttagaactaaaatcgcttcgagctaaacgcggaaatgcttctattaaagctgaacttttgaaagagtataggattctcgaatctatgaattggcattatactatcattgcttgtgataatggcgattcaacttacggcggattgtatcccaatggagccgctgcagctcgcgatgaacacatagataaagtcaaagctctggaagaaaaaattcgtaatttgtgcatttaacggtttactttcctgttcttcggtgatactataatcttgttagctaaactggagaacaaaaatgaaaaagttacttacgattttgaagaacatctttgtagtattctgccttatcgttactttcattggtgttttcgcatgggatttagttaacgtttggattaatgctttcatctgaggaaaatataatgattcatactggctttgatcgtcgctttaacttaatgagaactgttgttctgtcttttatcgttgcggtagcgttgggaattgttgctatattcgggttcggaatttattttgctattcaagcggttgatattattcagaccgatggccttaaatctttagtagaaaccgtatgggaaggtcaaaaatgaaacgacacatcgtgtatcgtctgcttgctttaggtcttcttgtgttttgggttggtggtgtaacggcagtagtatatttttggtagtagaaggggcttcggcccttatcggagaataaactttaatcaactgaggaaattaacatgcgtaatattatgacttttgctgatctcgataacgctggcgcagaactgatcggttctattcgtaacggtgattgggcagcaggtgctccatctcgtgaaattactgagcgcgaaggattttattttttgatgttcaatgatggcaaagcaggttatattggtgcatctgctcgtttctttgtagctaaacagcgttcaaaggcaggatttgaaagtgttctttctcatatccgttctggacgttctcagttgggtcgtactctgcgctcgaattgcatgacctacggtgtgttctggattcctgctaataaaatgaaaccactcaccactggttatggcaaaggtcagcttgcattggcgtttactcgtcagcattcaagtgacgcgcagacctactctgagctgaatcgtattctgaatgataacttcatctttactttgcagaaatactaatgagaaccttcttcgtgatgggttacttgtttctgatggccctaatgatttgctcaggaacattcatgtggtatggccttgtgcctaccactaaagtaatcggaagtattgcgttcaccgcagcatttattatgtttgagcgcatttgtaaaattgtaggagtttacaaatgattaagaaactcctaattgtggcagctattgctgccgcctttctattagttatgtactatggaatgatttatggaatgatttatattgtgcttttcatttccgatgttatagtacaaatcggctcactaatttggtaggtacaatggatatttttgacactctattaaagcaagcaggttctattgatgatttggctaaggcatcaaatcttcgtcatcgtgatttgaaatctatcattgataatgaagcaaaagaatacgcgatttatactgtagaaaatcgcgctattccaaacttgattgatgggtttaaacctgtacagcgttttgttattgctcgtgcccttgatttggctcgtggtaataaagaaaaattccataagcttgcgtctgtcgccggtggtgtagctgatttaggatatcatcatggtgaaacctctgctcaagatgctggtgcattgatggcaaacacatggaataacaactatcctctgttagatgggcaaggcaacttcggttcgcggctggttcaatctgctgcggcaagtcgttatattttctgccggatttctgacaacttccgtaaaatctacaaagacacagaaatcgctccggtgcataaagataaagagcatgttccacctgcttattatcttccggtaattccaactgttcttctgaatggtgttcgcggtattgcaacaggttattcaacttctattcttccgcatagttttgaatctgttttggaatgcactaaagcagcacttcgtggcgaaatgatggaacctgaagtacagtttcctaaatttaacggaaaaatcgttcaaacagaagacggttctgttgagctgcacggcgtgtataaagaaacttcacggaactcaatctatataagcgaaattccatacaagtttgagcgtgcttcttatgtagagaaagtactcgatcctctggaagatgcaggatacatcacttatgatgatgactgttctaagactggttttggctttaaggtgaaattccgtaaagactatgctttaagcgaagaccctgagcagcgtcatgctaaaatcatgaaggattttaaactcattgagaaaatgagtcaatacattgtggtcatcgatgagaatggtaagctgaacgataagttcaaaacttccggtgagttaattcgtcatttcgtagaagtccgtaagacattcactgccaaacgaatcgagcataaaatcgctgaaactaagcaggcgtttaatcttgcccaggcaaaagctcaatttatcaaagaggttatcgcaggtaacatcgttatccaaggtaaaactcgcaagcaactgactaaagaaattgaacagaatgaactattcaaagaccattctgaaaaactcgtttcaatgaacatctatcatatcactgatgatgaagcgaagaaacttgctcaggaagcaaaacgtctggcgcaagaagttaagtactgggaaaagacaactcctgaagccgagtatctgaaagacctggaagaattatgatagaattttatttaattataggttctgtaattgccgtattaggcctagttttattgctcctcagttaatctagggaacctggaggtcatctccaggtccttccatataaatctatatccctccaaaatccttccttagaatgccccaaattattttcacaaagttgtttacatgcttacatagctgtggtattatagccatatcaaaacaacacggagtaaaacaaaatgattacatcattaaaatctgatatcaaaaacattctttatatttctactcaagctgatggcactcgactgagccactatgtaaaaggtaacattgtggtgctcgatgagttcgaagttaatcgcgagtatcctatgcgtcaggtaattcaagcaagtaactatgaagacggtgaagagtaccaagtcgttctttgtgtatacgatgatttctgggtgcttaaacttgaaaatggtgataagttcttgatctttaacgtataacatttttactgctctttgaagaaaatttttcagagagcagaataaaatggtttacaagctggttagcagatgatattatagtctcataccaaacaaattgaataaaacatcatggagaatcacaatgtctaaagtaacttacatcatcaaagcttccgaagatgctctgaacgagaaaactgctgctatcctggttcaggtggctaaaaaagatttcatcacttctgctgagctgcgtgaaatccttgaagaaaccatgaacgcaggttctgttaactcaaacatcggtgttctgattaagaaaggtctcatcgagaaatctggtgacggtttaatcatcaccggtgaagcacaggacatcatctctaaagcggcagttatctatgcagaagagaacaagcctgaacttctgaagaaacgcaatactcgtaaagctcgtcctctgactgaagatatgaatgagcacaaagacctgatgatgaaacttctcggtgagatggaagatatcttacctctgaaagaacttactgtttaccgtagtaactatatcgcagttctggaaaaacgcacattcggtattcgtagtcttgaagttaacaacaaaggtactttccgtatcttcggttacaagatttctgaagagcatcagaaacacttcactaacctcggaatgtcttgccgtgtagctgcaacaggcaatacttacttagatatcgctcgtactgctgaaaacattgaaaccatcatccgctctattaaggaactgtaatgaacaagtttaaagtattgaatgaacttcagcgttgtgtagaaaaagttaacttgaatgctaatatcccaactgattgttgggatgtatggttccgtgggcactttatcggatacattgataagaaattcacaaaatgctatgctatctacaatgcagatggtaaacatatcatggatgtagataactaccaaaaggcccttgctaaatttgttccaatggcggaagctgttaactcaatggaatggttagagaaaatgcagggtgaacctgttattcgtcagattggtattcgtgaaaagaaaagtttatggcagaaaattaaaggattctttaaatgagcaagttttccgaacaaatgaataaatttgttgatgcttctcgtcacggtactctaattaatgagccagaagaagttagtattcctgaaatctgttttaaagtagctgattggtgggatggacgattacttcaacgtcgtatcgtttgtgcagcaaatcgttttgaattgaaaactggtggaacaattgtagttccaggcactcgccattattctgttgatatggcgaacgttctagatatgttccgtgacaaattagtttctgaccatgtccatggagacaatcaaggatttgttgaccagtggggtgagtacttcacacgcgaagaagcattaatcatcgctacacatgcaggccaagttaatacagttcgtcctaaatcaggacccgccaatgaattattctcagaggatttatactaatgattagtacattaaagaataacattacgcttttaaaaattcagcgtaaatcgcttcagcgttcgttagaaatgatggacgataattggggtacatataccaatgaagccgggtttaaaatggcagatagcaaattcatgaaaactctcatggataaagaatacatctgtccgtttagtcatccatttaatggcggcgctaaaccgtttcttgctgaaatgtacaaagtaatgacagaagaaatgattaaagatattgactattacatcaaggaaattgaaagtgcaaaatctagtagctaaacatgattttaataaaggcggagcacacaaagataaaaagcgttccgcaaaggaatctaagcgtaagcaaaagcataaaggcaaagaaaatgcgcattctgaataattccaaatgtactactttaaccattatttgtgatgacctagaagctctccataagaaattaggggaccattccggattagtagaagatatccattctgaactaatggaagacctacagaatgctggctatggagactggatggtacacgattggaataatggtacctttactgtagctattatcgctaatgttgaacctgaagaagttattgaacaatttcagaaatgcgttgatgcttatgatattggagattatctatgaatactgaaactttacgcagagaagatgaagccaaggcatatcataaacgcgttgaattgctttcagcaattaaagtagaatacaccttacaagttaggcttaaagttcttaactcttgggctaatgacttagaagtaaaacatttagagcaagcagtaatgtttacgtttactcaggaaacttctaaaccgtttagtctatcagcagatttccacacgtatggaattattactattaaagcaaaggatagaggtgacattataagtggagttgagtatatcgaaagcattttaggtaatcgcggagaggtggttttagcatgagtcataacctagaatctgtcgttgaatcacaaagatatcttgaagcgttaatgaataaaatcgcgcttggaagtctgattgacttgtcctttcaagaggcaattgacgtatgtcactggatgaatcgtagggttcgtccaattggaaaggaatggtatttaacggctagagtaaaagatggtcgctacgggctctggatgtcctctggtgctgagtatatcactaccaaggaagatttgaattctcgttgggaattggcataaactggtttacaacgcggtatcaagatgatactataatcacataatccattatgttgtaggaaaaataatgactaagtttgaaattgtccaagaaattgttactgttgcttctattctgaccaagttcaatgctgaacatatcatggagaagcgagatgaatttattgcgttcttgaatgaaattggaatcaagaatgagcaggggcgtcagttaaatcagagcaactttcgtaaaatggtttctgagttaactgacgaagagaagagaattctcgttgaagaatacaacgagggatttgagtctatctatcgaacaatggctatgcatagtaataagtaatcacttagctcttccaagagctctaaccgcctgaccacatatcgatgttagtctttcgttagataatgcaggtttggaattgtaccagtacatttcaacagttccagcataaacattgtctaaattgaaatacggacagctaaacatatacgatatttcaggcggttttctttttgttggtaagaaaacaaattccttatccgtccaaaaatatctacccgataaatgcgtgctatattcagcagttgttttgtcgattggatatcctcccaagtttttagaatctaccgtgctaggtaaagtcccctcataagcaattaagtctacgaagtagttcaagtttttaggtctgaacgtaaagaccgcagaaaagtctgcaccgcttgagatatgtgctatctggagttgttcgagtgctgtattatcaaatcgggaatctctatccttttgaaccagtttatcatacttgtcataagtactgtcgacgtaagctgtaataagactatcagacttatatccagcaaacgccaatagtgctaaaagtacgacaacgaaaacacgggaaaagagaactcttcccgtggctccatctttgaataatagctcgagcaacccaagaaacatatcaaaaaacggtattgattgtttgcttgccatattgctctccttacagagctatttattgctctagcatatgcttaatatgctgtaaacgacagttggaaagttcgtccatcattggcgtaaagccaattccaaaaagcatttgggtctgtacaattatagcatcgtcttcctctataatctctagagctgttaaaatggaactgacttccatcttcaatatcaacgcgccaatttacattaaaattcccactgccttctaaaacgatggcatcattataaccgtcccatttactaggctctgctagcccaaaaacaaccaaattaaagcctgtttcccatatacctgataaggacccacgagaatcaagtaatacgttccacgaagcactgttcttatcattccaagcgccacgaaccttaggtcctgtcgcagggttgttacctgaaatagttatactagcattccaaacgtttcttcctatcatgttggacatccaaaagggtgttcccagccttaattttgctccagctgcaatcattgaagattctcctgttacagccttagctgagcttcctacattaggacctgttactgccatgatatctcctcaaagatggggccgaagccccataacattatttagatttaagttcttcaatttctgctttaagctctttaacagattcgactaataacgcaattactgcattatagtttaaacgaagtaatgcatctttatcgttatcagttgtaactgcttcaggaagaacttcctgcacttcttgtgcgataaggccagccgatggtttagtatcaccatttggaagctgtaaatcataaacattaccagatagcttcgacactttatcaagagcgttatcaatcttagcaatatttgatttcacacgacggtcagaacgaatttcaacgtcccagaaattaccaacaccttcaacgcgtagattagcagcactaccccagatttttacaccagtatctgtaagtgctaaccactggtcaactccagcggcgttatagaaatgccatccagcgcgaacatattcacccgactgccatgcgttaaagctatcgaaaatcgtatcaccgcgctgtaaacgtattccatttacggtgtttgcattatctgtgtttcctggtgctaagtgggctaattgcagatatccatcatttctgaatacaagctctcggccactttggttacggataatcatgtcaccgttttgaccatttgaccaaataacacctctgacatttccagcagaatcacggaaccagtagttagagtttgtaccagctgaacctgcatcacagtaaacattaccgtttttagcaaaaagaccaccagcattggttgtgtcagcggcgactaagtttccgctagaaactttaagactgctactaacatctaacccgcctcttagagtacttttgccatcaacttctaactgccatgtttttaatctggtgccagttacgtcaaggttaccagttacagtaccaccggctaatggaagataagtatcgccagcgttactaatagcagaagcaaccttatcatcaacatatttcttgttggcagcttggttattctgtgtaggagcatcggcaatttgcacatacttggtagtaggaacaataataccgccgttggcattaataaccccattaatagttgctgtacttgatacagtcaaagctctagaaactgctgagtttccataaactgtttggtttccatctgcgtcaactttaaacacatcagtgtaagtttccgaagctggattagctatggcagttgctgatgatttagcaacaacaaatgattttcctgaagcaaataccagcttagcgcctgagttagattttttaacgaaacctaaatcagaatctttccccatcagaataaaactgttatcgttagtattctttatgttttgagaaacgatcaagcttctgctcatcgcagcttcgccatttacttgtaagcttcctgaagacgtcagaactccgccaactaaaacgtttccatttggctcaaagcgggtttcaccagaagaagtatctgggcttcctgctctgatgtggatgttttgaccactagaagaacctaaaacaactgcgccagattcattagcccgtaatacaccggttgcggaagtagaaccaaggttcagtcttccgactaatctagcgtttccgtttgcggttaaatcggttgtaactaaattaccgaattttacagtttgtccttcaccaacaccgaggttgttacgagcagaagctgcagaagttgctccagtaccacctaaattaattggctgaacaccagaaacaacttctttccatgcagaccatgaaccattttgtccgtagcggatatatgtgccttcaacaccgccgttctttgtagtaaaggtctgcttacatgaccaatcggtatcagaaaccttgcgtaaagacagaacttcaagaacaaagttaccatcagatgtaggtttgtttgttatcttagaaccaccgccagaagatacgcatttatataactgacgagtacctaaatctgatcgtctaataatcagactattaaggtcgatagtcttatcggaaatatcaactgcctcttcagcgccgctatatgtctgattaaaaactaaatccccttctacctcaagaccgctggatttaactagaatatatttactaggagctggagtagaaactgcagtttgataaccaaattgcacgtgtccttcaggagtaactttaagcattgctacggcagcaccgctaccaactttgcgagcaagagttattctgctatacttatccgaattctctgaaccaaaatcagccattgttccattagggttttcgacttttaagttagcgttaatagtcaagttaccggtcattgtgtcgccagttttacttacttgcttattatcgccagcagtgatgtcgtttttaatggaagtcaaatagttgttaaggttaccaccaaacatcgaaccagaggtaatattcccgtctttagtcagcattgctgctccaccgactttaactgctacaggaacatcaaatcgaccgtcagaacggaagctaaaatcaccagcagaaacacctccagtagtttttgcgcgaatattaatttgtcctaaatccgctgtatttggagttgcccaaattacaccgcgttcattggcgtttgttctaaaccatacatgagcatttccgcttcctgcattaacatacactgatgcagtaccggtgccggaagcatgtaaattaggtgcagctaaatcaccggtcatggtgtcgccagctttcttaacttgggtatcgtttgtcagattaccaagtccgacatcagccttagatggcttatttgctgtaccataaagttcgttgtatctaacatttccctcagcaagacttctgtcgttagctgcgtatacgcgaactttagcgctggcgtagtcgatattaatagctgacatggtatcgccagcattcataaaaataccggagccatggctataaagaccattttgaacactaacaccagatttagtaacaccacgccagaaagtaccaccatatgcttttaaacgggtcaacatatcagcattagaggtaatgttttcgattgatttaccgccattaccgcctaagccataagcaccaacttccatcacgtttccgttagattcaccaacgtcgcgaacagcagcagtaccaagacctaagttattacgagctgctcctgcgctagtagcacctgtaccaccacggttaactggaagagtacccgtagtatcgccgaaatctggttttgcgtaactgtcaaaaatctgtttcattgaaacaagaatacttccagctggtccatatccaccagtgtcttggttggtttcatagataattactttaccgctatcttggccgttgtatccagcagtgtttagcactgtaacataaagcccattgccgtatcgaggaactttagcgtaaaaatcaaatgaagcctctgaatctgtagcagcatcatttttaacaacgtaatactctggaatctttcctttatcaggagaaccaactcgacgccattcaacccagttatctaaattgttagtgctccaagatgttaaatttcgtcctgataacgtgataaaatcaacgtaatgtctaccgtgcccagaatcaataccaccgctaatcattaaatccagttgcgaagaagccattcctggatgctttattgtagctacttttacccagcgagcagttgacgcagttgcagcagaaatagtatattgccaggcttgacgattgttttctacattcgtcagaagagtaccggatttaccaggacctcttccgctcatagcgtaatacacctgtgaatttctgaacgttaaattactgtcattagttaattgaagaacacccgtgcctctttggtttttaatatagacgtcgttagagcctacacccatttcaagaacaagagtgcttccactgttaattttaacagtcttattggtagataatcttaaatcgccaggaagagtcgtattaccagagccgtcaagcaagaccaattttcgggcttcaacgttgcctgcaccgcgttgtacgaattgaatagtttcagcgccatcatcaatagtaccgatttcaagaataccactgttgcttgtaccgccggcaccaatgtaccagccatcattagtagcacatttgccaacgatatgacgagttatttcaccgctcaaatcagtagtttcaaaactaattgctttattcggagaaatggttacattgtcttttaacgtagtagttccatcaacgctaagagttccggaggtatctaagaaaggaacccctttaccggcgagctgtactacggcatcattttcatctttagtataaatggcaagagtacgcccatgtgtattcaaagcgatttcgccacgggctacgatatctgcacctggtgctttattctctgtgctagttcttttaaattgtatttgttttaagttttgatcggccatggctacctcttagtatgtgccaaaatctattgttaccccgcgtgaaataacctgatctaatctaggagcatattcaccggatgttgctttatttactataactacgccagcgttagccctaagtacaccggtcatggtatcaccagctttcttgactgctgcgttagctacgttgctaacagtatttattcgtccatcaacataatctttacgagttaaatcgtctacgccagatggctgttgtttagaagtaaatacgttagcggtaattctaccagtctgtgcagttaagttaccatttttagcaatttcaactatgccgctggaatcttccgttccgccgccgcgcaattgaattgttgaattccctccgatgataagaacttcaccattactaccaccgactctaataccaacatttgccaacggacccatgcttaacttgccagagccgccatatgctatttttacttcgcctgtatacgtaccaccacgggatttggacacgaagtcgttatcatttgcttgaggtttatctatctcagtataaaccttcttacctctataagttagggagtttcctgccggcacaagaggaaaagtacccgcgtgccaaataggatttccgccaactgttgaacctgcttttaaatcggccatagtttatcctcttatatattttctatttatacgaaaaaaggaagcccgaaggcttccttagtctgatgtttctctgaacgattgaactggaataacaccgctcggatcgacttttgaatttggaagttccataatcatagtggttcctccttcaacgcctttattcattcttataccattcacaccaaattcttgaacaacactattcagtttttcgctatgagaggtttgaacaaatacaaggtttttgattttagagtcaccaactacagacgtttttggatatcttgataccacaatagtaaatccatcagcgtctgtaggaacagcggtaaatctttcaaatcttaaccatctatcagctccattttttggaacttctaatgatacgtttgaagataataaagatgagcctttgaaccatcgcaggctagctctagtagtagaaccagcatcaagaagacttttagatgcatacatatcacatactaaaaatacagaatccccaggagatagtccataatcagctattttgcttatagattcattttgaactggatatcgcttatattcatatccagtagaatccgagtactcattagtgtcttcaatggaacgataagggcagcctgtatatcctacatcgccaacgttatcatatacagtatcgactttagctctggaatcttctttaacctttccatcatttccgtaaaatgactcaattaatatgcgtccttttgctgctccgagcactcctacataagcagagtttggaaatgatttggaaaaatcagaacctggccaagaagcagaccacttatttttaaaccacctgtctattagcgggctggattgaaatcgttcatgtgtcattataatatacaatcccgaagttaatccatttgcatattctacaaacgctttgttattagcgttgttatcatcagtggtaacgtcaaatgttttaaagttaataaacctgtcaccattaacttgaacaacattaatccccctccgtaaggaggaggtcatatcaaaggcaccgttaatattcaattctggcttattcggaacagcattagaatgcgtagcataagcttttagccaatacttcacagagtttgcctcagagaggattcgtgtttccacgaaatcctcgccgaaggctgccattaaaattggttcagccattaatcacctacccattcaaatttgagagtttgatttggacggtctggccagattttaactggaccaagcttaatccattccaaaacttcaagggttttaacctgagttgatactgagctcggagctccgatatcagctgcagttggaggagtagcagatgtaaatactcgcatccaatcatcaaacttattaaggtttggattataaatcctcatccacacagtatgcgcgaaacgcttatcagcagtttcggttgtcggaggataaggcgtccaaagctgataagtattgtttgtagttacaccaacctgagttaaaacaccaccagctgcagttttttcttcatacccagtcactactaaagtgcttgggttaccagggtcaatcggtgttctgattggaaccatataaccacgaagacctttcaatttagtagcgtctttgatttcagcagtccaagaaccttgtcttattacagtttcattcgttggcacataccaggattcagaacccgtaatgacgatagcagaactatttatgttaagattgccggtcatggtatcaccagctttcttgacataacggccatcagctaatcttgcgtagtttttggtagttaaaattggatacgatccagttgaatcctgtgcaaaaatttgtgtatcagcgtcacgggaacgaataaatgcggactgtgattgggcaccgaatattgaattcaatccctcgacagcaagcatctgaacgtccttaaccataacagttccgccaactattgcatttccagaagacctcagagttttagttgacacttcgttaggaacttctaacgtaccgttaccgccaaatgtgtaggtctggcttgcagcagtagttcctgttccgttttttacgcgaacttttaagtttccggctgaagctgtttgaggctcagcataaattataccacgctcgcttccgtctctattttgaaaacgaacatgcacaattccagtgtcagcagttggagaaattttaacttcaccaccattagcatatataacattcttgacagaaatattattgctaaatgaagtgtcctgactaaatgtccaagctccagaaatagtctgcgctatatcgcgacgagcatatttgtctggtgtttgaccacctaacattcctgtgtcataggctttaccgagacgaggcaagtaatgtttcagtgtaaggttcaattcatacggagacactgcgacgcccttagaggcatacccgttatccggaagagttgagccattggtatcattacctttccacgttccatcgcctgtagatagcctcacggtccctctaacgctgtctgtagcttgccatgactctgttacctgaatagtctgtttcaagtaagcaggaggaacaattctatcacttaatgtgcctgcatcaacttgtgcctgtgtagcatactgagcaagaccgatagctccttcggttgctgttttagcatgtaacgcggcagcagtaactattttcttagcgtcggttccagttctaacctcagcagcagtagcaagagtggttgtacctctttgagaagtacttgcttcctgtatgttgatggtataatggtcccagaggttcccagtaatagttaagccagaactagtattaacttggatacgatcggtattagcaaatttatcgaacagtaatttagggtttaccattactgtacttgaagtaccagcttcaaattcaccctgggcaccaggtgtcgcgaagcgagcaataccagtacgattgttagttgctgtacggtcatttaatgttttaggtgtaactgctttattagtcacgccgccagcattaacttcagtttgtgtagctatttggattaaaccaattgctccatcagtagcaacttttttatgcaaagattctggtgtaacaaccgtaggaatatttgaagaagcaggagttccgtttctaacttcgctatcagttgctaaccagactattcctgattggtttacagtagctttatactcacgaagagtttttggagtaactgcatttttgtaatcagaatgatcgaatataccggtgccagcagaagaacgatcagcagttgtgttaggagcaccaccagtttttactaattgaataacacctaaccgtgaatccgacgtagtacgataaagcagcttcttaggagtaacaattgtaaaatcgtctgttcctgcatccattttagcattagtcgcaatctctgctaaacctctacgagtttcagtagcagctctttcgttaagctttttaggagtaacgattacattatccaagtaagaagcagttgttgactgattaacttcgctggaagttgcaattcttgctataccagtttgggtttcagtagaacgacgtccatttaaggtttctggcgtaattgctaattctttttctgggtttgactccgcattagcttgagcctgcgtagcaagagcaataacacctaatcgggctctagttgtattgtctttagcatcaactcgttctacggtagggtcagattcagttacaatccaatagctttttccggatgctttatcttcaatatatgcaagcccaagaacaggaacatacgatgtagttccgttaaaggtaattgagcttgattgcacccatgctgcatcaggtggatactctgaacgttttggaaattgcagtaaattcaaattgctagcgatagtatcaccaccagaagctttaattactacagtctgtcctttgcgcatataattcattgcgattgtgacagtatccccaacagctacgtctgtaggcaaagtaacgttaattgttttaacggtattgttatctgtgccaaatacagaaatatgctcattaggcattaaagtaacatcagaagtaattattcttactctggtgcgtaaatcattttcaaaaatacgccagattttgtcaatcgagtcatataccaaaaatccggtgcctgaagtacgtacttgaacctctgtttgcccaggagtcccaattgagatagttgggtcaaacgtacgcacagtcatatggttaattggcgatgtaccgtcaaggtcagtaaaattgatgatatcgtttgaattagcgaacaacggcagagtaataaaaatctctgagttggaagtataacgacgaactacgttatcacctgcctgaacttgcgtcggaacaatcccgttcggaactaccatcttggcagtatcgccaaaatctgttaaactcgcacgccatgcaccattactaaacgtaagcataatttgtgaatacggacgtgtaagtcttacctcacgcagacgcgattcaccaaatacgatagacgcaccagtatcttgtgctttaattaagattccgttatagccaggacgcccgccaatatcacgaactacaatggtatcgccttcatctggtgctaacggaagcagtaatgtagcattacctgcagcgttagagtcaacgttgatgaactgaccagattgaatttcaaactctcctttacggacggtataaatccagttcgggtcaacacgtaaagaagtccaattcgcctggttaaaatctccagcaggctttggaatatctttatttgcaatccagatacgacgtccataagtcacagcaaaatcagtgagatacccacgtgtcgggtcatatttttggatagtgttttcttgaataacgtactcgacggagacgccgtcggttttaacgttgcggtcagcaagtgccacatttataactttatttccgcctgcgtccaagccgttcgttgcacggaaatgttgtttcagtaaatcgctcatagagtctcctatggggttatgcttcattatagaagtatttataatggctgtactaactaattgaacgaggttcaaatgtctgatttaaattgcttattcgccgaagaagaccaagtaaaagaaggcgtcattttaattgacttgtcacaaattgcaatggcgacaattcttcatacgtataaagaaggtgacaaactaacaactcctatggttcgtcatcttattctttctactttaaaatttaatgcttttaagtggaagaaagatggatacactaaaattgtcatctgcgttgataacgcagttaatgggtattggcgtcgggacgtagcatattactataaaaagaaccgtgctaaagcccgtgaagaatccaattgggactgggatggatactttgaaggtcttcgtactgtaattgatgaatttaagcagtatatgccttattatgtcattgatattgataaagctgaagctgatgacagcattgcggtattaaccaaaaagttcagtctcgaaggccatccagtcatgattgtttcttcggatggtgactttactcaattgcataagtatcctaatgttaagcaatggtcaccaatgcagaagaaactggtaaaatctaaaaccggttctcctgctttagattgtatggttaaaattattaaaggtgacaagaaagataacgtagcttctattaaagttcgttcagatttttggtacacccatgttgatggtgagcgtactccttcaacgaaaatgacatttgttgaagaatgtcttgatgctggcgaaaacattaaagatttgcttactgaagaacagtataagcgtttcttggaaaaccgcgtgttaatcgattttgattacatccgcgaagacattgttgctaacattttagattgttataataactatcaattaccgggtcgtggtaaaatttatagctactttgttaaatccggtctgtctaaattaatgaaagaaattaacaacttttaaggtgaatataatggctaagaaagaaaaagagcaagtagtatttgatgaagcggtacatggacaggctctgcgagatatgattaaagaagcctcaggtaataagttgaaagcagaaagctatcttgaacttaacaaagacattaaagaccgcgccaagaaagagcttggtgtagaaggcaaattatttaatcagctgcttgccctgttccataaaggtacacgcgatcgttttgaaactgaaaaagatgaagtggtagaagcttatgactctattttcgcttaaagacgagggggaggtatccccctctgaatccattaatcagctgttagataagcaagctaacggatttactattgagtctatggtaacagaacttggaatggggtatcttgaagcaacaactcagtggttagaagaaaattctattcctgagggaaacttcaatagatatattccacctgcaatcatagaaaaaattatgtcagaagcattagaagaaaatatgcttcgaccatcatttagtcaaacacataaaacgaatagtctggattttttattatgattcgtctccgcatgcctggaaataataacagatacgttaacggtaagagcgtttatcttttatatttaatgctcaaacaacactttgccggtcgatatgacgttgttaagtataactgggttatgcgggtctctgataaagcttatcaaaagcgtagagacaaatatttctttgagaaactcgctgagaaatatacattaaaagagttaacactgatattcatgagtaacctcgtagctaaccaagatgcttggattggcgatatcagtgatgctgatgccctcgtgttttatcgtgaatatataggtaaattgaagcagattaaaacaacgttctcggaagatgtaaagaacatttactattttgccaagaaagttaatgtagataagcttcatgatatttttgaatataatgagaaagtcggaacatcttatgtgttcaaacttcttcagtcaaacgttatatctttcgagacattcatcatgcttgactcgtttttagatataataaatactcatgatactgcaacggataatttagtttggagtaattactccactaaattaaaagcttataaaaaacttttaaacgttgacggtgctgaagctaagaaactctttattagcataatcaaatcttgtaaagaaattagtatataattaatctatcgtccagttgcaaggacccatgttgcaacaacaactgttaaatttaaaaaggtaatcatatgtttaagcgtaaaaatcctgctcaacttcaacaacaactggctggtctgaaaggtggttcttctttctctaacgaagacaaaaacgaatggaaactgaagaccgataatgctggtaatggtcaagcagtaattcgcttcctgcctggtaaagatgaaaactctctaccgtttgtaaaactgatcaatcacggtttcaaacacggcggtaaatggtacatcgaaaattgtacttctacccacggtgattttgattcttgcccggtttgtgctcatctgagtaaaaacgattcttataacagcaacccagctgaatataagcttctgaaacgtaaaacctctttctggtctaacatcctggttattaaagacccggctaacccagaaaacgaaggcaaagtattcaaattccgtttcggtcagaaaattatggacaaaatcaacgcgatggttgaagttgatgttgatatgggtgaaactccggttgatgtaacttgcgtgtatgaaggtgcaaacttcgtcatgaaagttaagaaagtcggtggtttccagaactatgatgaatgtaaattccttggtcagtccgagattgcaaacatcaatgatgaagaaactcagaaattcctgaccgaaaatatggctgacctcagcgaaattgttgctccatctcagtttaaatcgtttgaagttaacgaagccaaatttaaacagattatgggtacagcagctcttggtggtgccgcggcaaaagcagcagctcaagccgataaaattggcgatgacctggattcctttgacaaagacctgtctgattttgaatccaaaccgacctcttctcgttccgcagacgatatcatgggcgatgctggtgacagtgttggcgatgacgatctgaatgatattttgaacgacctctaatataaagggaccttcgggtccctttttctttattcctccaaaaaatatttcacaaaattgtttacaagccagttgatgagtgatactatatctacatcgaaacaaaacgagtagaggaaaacatcatgggtaaattaaacattgatatcgtagcaactcctattatcaacaaagacggtatttgtgtagatttggagtatgcagatggtacacgtttttatgacactgaccatggtattgattttgacttgattatgcgtcatggacctggtggtggttggccaaatattgacctccgcggttctagagaaaaggttattgcatatcttgaatctctggaatgggacgacattgattactttatggaagattttgaagaataattgtttacaaggagctatgcttgtgatagtatagctccataatctactggagaataaaaatgaaacttcaacgtcaaagcatcaaacttggttctgaatatcgtggtaaatggaatttctgcatttgcgacaaaaacccagaagaattagagcgtgttgaagaagtactgtgccagatggaagctccattcactatgggtggtgaaactgtctattggaatgattactgtgataactgcccatgctatgaagatgggtatggctcaggcttctggattcctgttgaagatgttgaagaattcaaaaaagcatttaaacttgctaaggccaagaaatgattgaggctgaattagtagttttgttaatttctgttactgccgcttttattagcggcattatattaggattatttttatatgtctaaattttgctgaggtttaaatgattcaaatagtttatgcatttgctcctacaaaaactgtagacggcaaaaacgaaaatgctttcggtttaggcgatggtcttccatggaaacatatttcccaggacatgaaaaactttgctaatcgtactcgagatactatcttgatttgcggagcaaagacttttatgagttttcctaaacctcttcctggtcgtaagacaatcgttgtccaagacatgagtcgtgcgttggcaactgctaaaaatggcttctttgcagatgcttatgtaagtgaattagaatttatcggtttcttgggtggtgacattatggccgctcatacttcttacaacagtactatcacttttaatagagaccttaattattctatcataggtggtgccggaatcatccagaaggcatatccatatgcagatagggttatccaaacaaccatcagaaaaagtcatagagtgaattctgatgtcactctacctgctgaatttgtagcagctcctacttggccagaatcaggattcattactaaagaaaatcactggtatcatattgatgaagtgactaacatttcagaggtggtctatgagcgcaaactatgatatcactcagctatcagaagacaaagtccaaaagaagtggaaaagatttccatttaagcatggtattcatcttctagttttcagttataatggtcttagcacttataacggttcaactacagtatataaccgaaatggaaatatacctattgaaattgagcgtgattataagaagatgttcatcggaatgtcacacggtaatgtgacggttaacgatgatgtagtgtctattattggacgatttgaaaagcgtggagaccagcttttctttactcctcttcaggaaaaatttaatgcgtgaataccaagaattaattaaagatatttttgaaaatggatacgagactgatgaccgtactggtaccggtactattgcaaagtttggtactcaacaccggtttgatttacaagaaggatttccggcagtaactaccaagcgtcttgcgtggaaagcgtgtattgcagaactgatttggttcatgcgtgggtctactaatgtgcatgaattacgtcttattcagcatgactcattactagaaggtaaaactgtctgggacgacaactatgaaaaccaggcaaaagacatggggtattccggaggtgaactgggacctgtgtatggtaagcaatggcgagatttcatgggtgttgaccaactgaaattgatcattgatcgtatcaagcaacttccatatgaccgtcgtcagattgtgactgcatggaacccggttgatttggataagatggcattgccaccatgtcatttgctgtatcaatttaacgttcgtcaggggcatcttgacctccaatggtatcagcgttctgtagatgtattccttggcctccccttcaacattgcgtcatatgcagcactagttcatatcattgctaaaatgacaaatcttaaacctgggcatttggtattcactggtggtaatactcatatttacctgaatcatattgagcaatgtaaagaaattcttcgtcgagaaccgaaagaactttgtgagcttgaaattgcattcccagatacgtatgaaacttggcagactagttctcaggttcgttggttagaacaatttgcacgtcctcatcattttgaactagttgggtataaatctcacccaacaattacaggaaagatggcgatatgaatattcgatttgttcgtaaaggacaccagtctaaaacagtattaggcgagatgtgtgatgcattctctagcgatttgcctgaagttaatgacaagatagtttttgatgggaccgaacaaagggttctgtctattgttaaatcatatgaatggtctataggcaaaacacaattaatctgttggtttgaagttgatataacatgaagatatgtcgggtggttaataaataccattccgacttcgatgtaaatatccaacgtggaacaatgtggggaaattacgtcggtaaagattgcgataatcgtcctgatgctattgcagcgtttaaggacgattttattgctaagattcggaacggagaaataaagcgagagcacttagaaactttaagaggaatgagattaggatgcacctgcaaaccgcttccttgccatggtgatataatagctcttgtagtgaataaactttttaaagatacatttgaattagaggacttatgcaagtaattaagagctcaggtgttagtcaagaatttgacatgcagaaaatcattaaagtcctcgaatgggcgtgcgaaggaactaaagtagacccatacgagctgtatgaaattattaaatcccatctgcgtgatggcatgagcactgcagatatccagaagactatcgttaaggtagcagcgaatagcatttctattgatgagccagattatcaatatgtagcatccaatgcagcaatgtttgaaatccgtaaacgtgtttatggacagtttgaaccgcctgcatttattgaccacatttcacgttgtgttaacgcaaataagtacgataaagaaattctaagtaagtggtctgcagaagaaattactttgcttgattcttatattaagcatgagcgtgatttcactatgacttatgctggaacaatgcagcttatcgagaagtatctcgtaaaagaccgtcacactggtgaattgtatgaaactccacagtttgcctttatgttgatcggtatgtgcttgcaccaagatgatggcgaaaaccgtttagcaaacgttattcgtttctatgatgcagtttctactaaaaagatttcattgccaacaccaattatgtctggtgttcgtactccgacacgccagttcagttcatgcgtggttattgaaggtggtgatagtcttaattcaattaacgaagctgctgcgtcaattacgaaatacatcagtaagcgtgcaggtattggtattaatgctggaatgattcgcgcagagggttcaaaaattggattcggtgaagtcaaacatactggagttattcctttctggaaacacttccagacagcagttaaatcctgctcccaaggtggagtccgtggtggcgcggcgacattgtactatcaaatctggcacttggaagttgaaaacctcctcgtacttaagaacaacaaaggtgtagatgaaaaccgtattcgtcatctggattatggtgttcagattaataacctgatgattgaacgtttgattaagaatgattacatcactctgtttagtcccgatgtgtgtcttggtactttgtatacagaatacttccgtgatgcacaagcattccgtactttatacgaagagctggaaaagaacccagacgtaagaaagaaacgtattaaagcccgtgaactgtttgagttgttccttactgaacgtgctggtactgctcgaatttacccgtacatggtagataacgttggtgaatatggtccttttattcgtgatgtggctacggttaagcaatcaaacctctgcctcgaaattgcgttaccaacttcggatgttggccaagaagatggcgaaatcgcgctgtgtacactcgcagcattcgtgctcgacaacttcaactggcaagaccaagaagaagttaacgaaatcgcagaagtaatggtaagggctttggataaccttttggattaccaagactatcctgtagacaaagcgttaaaagctaaagaccgtcgagcactaggtgttggcattactaactatgcagcttggttagcaagcaactttgcttcatacgcagatgctaatgatattactcacgaaatgatggaacgtattcaatatgcactcatcaaagcctctgttaaacttgctagcgaaaaaggtccatgcacgctttacaaagaaacacgatacggacgtggtgaactgcctattgactggtacaacgaaagaattgaccaactcgcagctccaaactatgtctgtgactgggaactcctgcgagaagacctcaagcgatacggtatccgaaattcaacgttatctgcgcttatgccatgcgaatcgtctagccaggtatcaaactctaccaacggtattgaaccaccacgtggaccagtgtcagttaaagaatcaaaagaaggaagcttcaaccaagtcgttccaaatgttgaacacaatgcttccctttatgattatgcctggcagctcgcgaaacagggtaataagccttatctgaaccaggttctgattatgcagaaatttgtagaccaaagcatctctgctaatacttattacgacccggcgaatttccctaaaggcaaagttgaaatgtcggtaatgatggacgacttgctttatttctggtactttggtggtaagactctttactatcataacacccgtgatggttccggtaacgatgatatgattcaagattctgctgactgcgcggcctgtaagctttaataaaagggaattataattagaccacggatggttaacaccacagaataggaaatagaatgagtacagtttttaataccaagcaagtagatatcatgaccgaaccaatgttctttggttctggtctaggaattgcacgctatgatattcagcgtcataaagtattcgaggaactcattgagaagcaattgagcttcttttggcgtcctgaagaagttaacgttatgatggaccgtggtcagtttgaaaaactcccagaacaccaacgtaatatcttcactgataacttgaagtaccaatctcttcttgattcaattcaaggacgggctccagcagcagttttatctgcgcttatttctgacccaagcctagatacttggaaccagacttggacgttcagtgaaactattcacagccgttcatacacgcatatcatgcgtaacctatatgtagacccagctaaaatctttgatgaaatcgttcttgacgaagcaatcatgaaacgcgctgagtcaattggtgtttactatgatgatgttatagcgaagactcgcgcatgggaaaatgccaaaaatcgctgctttaatcaagataatatcgaaattaaagaagctaaacgtgatttaatgaaatctctttatctttgcttacatgttattaacgcattagaagctattcgtttctatgttagttttgcgtgtaccttcaacttccataaaaatatggaaatcatggaaggtaatgctaaaatcatgaagttcattgctcgtgatgaacaacttcatttgaagggcacgcagtacattctgcgtcaacttcaaactggcactgatggcgaagaatgggttgagattgctaaagagtgtgaacaagaagcaattaaaatcttcatggaagttaaccgccaagaaaaagattgggctatccatcttttccgcaacggtggtcttccgggtctgaacgttaaaattcttcatgacttcattgactatctgactgtatctcgcatgcgtagctgtggtctgccgtgcccaatcacggatgcaccaactcgtcatcctattccttggattcgcgaatatcttaactctgatgcagtccaatctgctccgcaggaagttgagataagttcttatctggtagctcagattgacaatgatgtcactgatgatgttctaattggatttaaaaagtacttataaggaaaggggcttcggcccctctttattatgaatgatattgctaacgagttttcttttataaaatatgttcaacttgagttagaaccagattttaccatcaaaccaattctgatagcaaacaagttaaacgtagtttatgccatcgcagttgatgatgaactagtttacattggtaagactaaaaatcttcgtaaacgtataaattattatagaactgctattaatcggaaagaccaaacctctgattcggctaaatctgccaagatttttgaagcactaatggctggcaaaaaagtagagttctatgctcgtcagtgttttaatcttttgattaataatgaacttggcgagatgtcaatatccactatggacttggaagaacctcttctaattaaaaagttcaatcctccatggaacacccaacatactaacaaagctaaatgaactatgttaaagtatatgataacctaatagcaaagggtaaattacgaggcaatgataaaggaaaattaaactattatactgaagctcatcatatcattccaaaatcattaggaggaaatgacgatgtttctaatttagttttattgactggacgtgaacatttcattgcccatttgctattatcaaagatacataataattctaaaatgaattatgctctttggatgatgtgtaattcttctggaaagaattttaaagttcattccagattttatgaaagctctagaataaagcattctaattatacatctaacttattctccggaaagaaacgaacggaagaacatagaaagaatttatctaaagcactgaaaggcagagtaagtcccactcaaggaaagactcatgccaaagaaacacgcgaaaagatatcaaaatctttaaccggtaaaacacaatctgaagaaactaaactcaagcggtcagaaagccaaaaaggaaagaaaaagcctttgtacagcccatgcccgcattgtggtataataacttcaaaggccattgctatcagatggcactacgataattgcaaacataaggtaaagaaatgttagagctatataaaaatttaatgaatctgtgtgaaagctcagaagttgcaaaattcttttataaagattttaccggtcctatggatggtaagttcagagtgttttcataccactacgcaagttacagtgagtggttaaaacccgatgctcttgagtgccgcggtatcatgtttgagatggatggcgataccccaattcgaattgcttcgcgtccgatggaaaaattcttcaatttgaatgaaaacccactaacgatgggaattgatattagcgatgtagaatacattatggataaggctgatggctctctagtatcatcttatgttgatgatgggtatctataccttaaatcaaaaacctctctttacagtgaccaggcaagacaagcttcagctttgcttaacagtgaagaatattcttcgcttcatcaggttattcttgagctagcgctagatggttatacggtaaacatggaatttgtttcacctaataatcgtgttgttttagcatatcaggagccacagctgtttgtgttaaacgtccgtaataacgcaactggcgagtatattaaatatgatgatttgtacgctaatgctaagattcgtccttatttaattaatgcttacggaatttctgaccccaaaacttgggttgaaggtgttcgtgaacttgaaggcgtagaagggtacattgcagttctaaacactgggcagagatttaaggttaaaaccgaatggtattctgctcttcatcacactaaagactcaataacgtcaaatgaaagactgtttgcgtctgtcgtatctgcaaattccgacgatttgcgttctctttttgctggagatgaatacgcaattaagaaaatttctgcgtttgagcaagcttatctagattacctaggaaagtcacttgagctatgtcagtcgttctacgatgaatacagaggtcgtgctcgtaaagattatgctattgctgctcagaaagcaacggttaatcagcgccatctttttggtgttatcatgaacatgtacgaaggaactgtagatgtggataaactgcttaaagacctcgaaagggtgttcttgaagtactgggcaggatatgttccaaaagagtacgaaaaagaaattgaaatttctgaagaatagttgtttacatcctcatcagagtgtgatactatagacttacacaaactgatgaggatattgaaatggatatgcaagcgattactttagatatggttgttaacaaatatggtactcattctgatgggatttttgtgtggaatggtaccaagaaggtgggcttcgtcactgacctacggacgcacatggcgcgcaaggaagctgctcgtaagaagcaaaaagagtacactaatcgtgtgaacgagcagcgtgccgaagcccttcctgaagctgtagatgaaatgattgatttcctagataatcatctcgcgaagtatggtgcagaggtgttcaagaacatcacccagccaaacgttcatgctaacggatgcaaatgctatgtaatcgttgacccgatttatggcaagcatcgtcttggcattatgcatcgcgagctgaattattctgagatggcagaatatgtagaagcttgcttcaagtgttctccttcggaaagttctgatcgtcacatcctcatttcgggattatcccgtgatgatatcgtagaggttatccttaaactatgctcaaaataaacacaacttggttgatgattggtgtgttagcgttatccgccggtggattgaaatatctttcgtggcgggtagaaaatcttaaagctgacctcaaagtcgtccaagatgaatctgatcgacaagcaaaagaaatagaaaacattggtgtttctataaaaaatctgcagacaacatataaaggctatcaggaaaaccgagcagctcgtgatacttctaacgctaagatgaataaagattctaagcgtggaaacgtagttgcagccaaacctggattagttgaaaaacagattaatgcaagcttcaataagtttgcagaagatatccaggaggctaccagatgaaacgaagtctattagccatgggtattatcagcttacttgctggatgctcttctagtgcaccagatgtcccggttttacatcctgagtggccagacccaattcaaaaatgggaaggacattgggaagtaaaagtaattgacggtaaagcctgggttggtatgccgtttgaagagtcgcaagaatatcgtatctggatgaatgacattttacgatatactaaagatgctaatggaatgatatgttattatcgttctgaccttaaagaacctcgttgcgttaagtgatggtattataatgaaccgagagcagtatgaaacacttaaaggattaattgctgaaaatgaattggcgtgcatcgtgtttggacgcgcagctgaaaattatgacaaaaatgatatactgtcaatgaataagccattgcgagcaattaaagaaaaatatcgtgctaattggggtgaaaagtctaaggctcttcatgattttattgacactcttaaggatgtataatgaaaaaattggttttgacacaaggggctccaggctctggtaaaacaacctgggctaacgaatacgtagcagctaatccaggttggtatgttttgtctcgtgatgatttgcgtgaaggcatctttggccttgataaacgtaatgattacaaatattctaagcttcgtgagaagtcagtatctgtatgtcagttttctatggcgaagactctactcgagatggaaaccactaaaggtgtcatcattgctgatactaaccttaatccaacgactatcaagaagtggcaagagttggcatacgaaattgatggtgtcaagtgggaaattaaacgctttgacgttccttggactgaattgcttaatcgtaacctctatcgtggcgcgaatgcagttcctattgaagtgcttcgtagcttctattctaagatgcatccatatgatttgtacattccagacgaatcattgccaaaagcagttatctttgatcttgacggcacgttagcagataacaatcatcgttctccttatgacttggccaaatgtggtaaagaccatccaaaggaaatggtaattgaatttcttaaaatgcttcgtaacaaaggatataaaattcttactgtttccggcagagagtctggtactaaagaagaccctactgtttatcaacgcattacgaagaaatggttgttggaccatgttggcgaaacaggcgaacacttccaacgtaagcaaggcgattcacgcaaagacgatgtggtaaaagaagaaatcttctgggaccgaattgctgatcgttataatgtaaaacttgcagtagatgacagggcgcaggtggttgaaatgtggcgtcgtatcggtgttgaatgctggcaagtagcccacggtgatttttagaggaaagtataatgtttccaaagtattccgaagtagtaaaagtatcatttacgcaagttgttgctaatcatttaacagatgagtttactccatctgaagtagccaaaatgcatgcagagtttttatctgccatgaatgcacttattccaaacggcgaagttattaaattttctattgaccgctcaggcggttcatctgaagttaaaatttcttgtggcgaaggtgaacacgattggtttatcgttggaattattgctaattttgaaacccaacaggttatgacttatgttgtctgacgctaaattttcacatgatgaatttatttcgaaggttaaaatcttcgcacaggaagtagcaaaccgggttcctggaagtaaagtgactctccgacgagagtcatcctttaactatgttgatgcttatatcattacagttaataatggaaagagcaatcaacacactcaattggctttaaccggaacaggccaagttgaaatgactaacattttaggacatatctaatgactttacgtgaggctgtagaagctcttttaattgaacatgctcgtggaattagggcagaaattagccaaaatggtattcgtctaattaatgctgttattggttctgaccaaggcgtttggtcaattccgcgcgaagaatatgatgctattttgtacagtaacgttgatgttaaggaaggccaacctctttatggttatgtcttttccgatgttcttgaacgaggaaatcatccgtttccagatggtacaggcattcgtacttctcgagtagagagttttgcttctcctaccgacgagttaaaattggttaaaacaaataacacaacttatctggtgatttaaatgaaagcgtcgacggtactacaaattgcgtatctcgtatctcaagagtcaaaatgctgctcgtggaaagtcggcgcagtaattgaaaagaacggacgaattatttctactggctataacggttcaccttctggcggcgtgaactgttgtgaccatgcagcagaacaaggttggattggtgaaattccttacaaatctacgggattgcgtcaagacggatttcaagtcaaaaaagtcggattgctcaaagaacatcgagcagcccactctgcatggtctaaagtcaatgaaatccatgctgagcttaatgctattctttttgctgcccggaacggcagtagtattgatggagcaacaatgtatgtcacactgtctccatgtccagattgtgcaaaagccatcgctcagtctggtattaaaaaattagtatactgcgaaacatacgacaagaacgaacccggctgggacgatattcttcgttctgctggaatcgaggtgttcaatgttccaaaacgtaatttggataagttgaattggtataacattaaagaattctgtggaattgaataatgaaacttagaattgttgaaattaataaacttaacctaagtggtgatgttgttatatcatactcagtagaacgccggtattggtttaaatggaaaccactagcaacatttaaatttgaagatcaagcagttcgattattaaaagaattatccaagcgcaaatctgtaattatcaaaactattaaagagacatcaaaatgaaactgactactgaacaaaacatccatattcgtgaaactctgaaggctgtgctgagcatgggcgaatcccagattgtgtttgaaaaagctgatggcactattcgtactctgcgctgtactcgtgataaagacattattccatctgatttggtagaaagcactactaaatctgctcgagcagaaagcactacttcacttccagtatatgataccgagaaagaaggttggcgctcatttgcctttgataaacttatctcggtaaatggtatgaaagttgagcatctgctgcagatgatcggtaagtaatttgctttaaactgaccatgttaatataactacatggtcaaacaataaaggtaacacatggaacttccaattaaagctctaggcgagtatgtaattctcgtatctgaacctgcacagcaaggtgatgaaattgtttctccttccggtattattcttggaaaagaagaacaaggacaactgccggatatgtgtgaaatctattctatcggtgatgatgtaccgaaaggatttgttgaagtcggtgatttgactccactgcctgttggtaatatcagaaatgtacctcatccgttagtagcagcaggtgtgaagaaacctaaagaaattcggcagaagtttgtgacttgtcattataagtcccttgcatgcgtatataaataataatatgaattgggcgtcggacaattagttacccgagcaattctacgcggtggatgcccgagctaaacctcggttaccgtccaccaaattttaacctcatttgaggaacgattcaatgaacaaacaacttactaaagctctggaactccaacgtaatgcatggaattccggtcacgaaaactacggtgcttcaatcgatatctatgcagaagcactggaagttctgaaaggttttaaacatctgaacccagctcaagctgaatttcgtgatactttagaagcgatggatgaactgaagtatgctaagcatcttggttctgctgctcgcaaagctgttcgccactttgtggtaacgctgaagtaatttgtacgcccaccatgtgtacgcatgggtaacgtatgatgtggacgttgttggttatccccacgtaaaacatccgaaaccatcggtgatttgctaccaaagtgcagctagaaaataaacggcaagtgcatgctaccccgaggcgatggccaatcgggagtacgcctcaaggcctatacatccatcggtgtatatcttatccccgagaaatcggacccggaacctttaagctaacggtgtgcaacagataagagtttaaacgtaccctttgagggcttgcgggagctacaaccgaaagaactgtcgaaagaagttgaacctcggaagaacgtgctcccatgtatttctccaaaatggaagatgataaaatggctaaacaagctaaagcaaaaactgcagtaaaagaagttgttggtacctctaaacgcgctggctacaagcgtgggtcgaacaagcgtatcaatcagacggttgagaaaatcatgcgtcgggctcgtgcggttcttcgcgatgatgcttctcgttttggtaagccgaaagcataagttcagggactccttcgggagtcccttttttattttccgcagaatgaaaaaagttgtttacttctaggctcaacaaggttactatagacctgtaccacccaaacagatacaacggagaataaaatgaataccatcaacctgaatgcaactatcaagactaaagaccatgacggttataaagctcagactgtccacgagaaaatgtggattttgtctaaagttcaaggtgatatcgttccatgcatgacaccggacggtccatcagatgatttctgctggcatatcacgctaaccaattggttcacaggttctgtatatgttctgaacactccagttgttggtcgtattcgttctgaaacttacacagatgaagaagacggttactcagaagatgtaacttggtatgaaaacggtcgtcaagtggctgacgacctaattgaaaaaatgaaagctaaaggtgttgttgatttaactcactggacttttatctgttaattgaacggggcttcggccccatctttgaggatatcaaaatgaattacagcgaaaaccgagtatattgcatttccccagaaacttaccgtagatggaaagacgctaagaacacaattaactatctcattgccactgttgttggagttcaaggctggacgccgttagaacttgattcgctgggccgggttgttaagattaaaaccgaaactggtaaaatcatttcggcaaaaaccataggagatgaatatgaccggtctctgtcatgcttattttcttctcacgagttagaagaaggacgggttgtgcaaataggagcgtttgaaaatcaaagctctgatgaccgctatgcagtttttgaaatcccatcaacgttcgttaaacctactccagtggttaaagacgggcgtagcgtcttcgctttaaaggaagcaaaagaaatcatccttgagctaaccgatatcgttccagaaactaccaagtatgaactgtttaaaagcatcggatttgcagaagtaaaaactgttaaaactgtagaggttaaaaatgtctgaagtttttgaataaaagttgtttacttcttgggtggtctgggttactatagacctgtaccacccaaacagataaacaaactacggagaataaaaatgaacttcactaacttcaaccgcaaatacgtacagaacaatgcttgggacgtttctactactttgctgtgggaacacaacaatggcacagtagctcaaatcgatatgtactgggaagataactacgtattcttcagctttgaaaatggtcctactttggatattcagttcaacggttctgaaatcaaagttggattccatgatgaagttcgtaaacgtgatttatcttcacatccgtcttggaacacaaatcgtcagctgcttgttaaaatttatctgcgccacatcctcggtcgtaaaacaaccgaagaacaacgtgaagcaatctgggatatcgtttcaaacgaaatcaagttttaactaactcggggcttcggccccactattgaggaaatgataatggaaaaaggtaaattctataagcttaaaaagactccaatcttgtctccaggcgctcttatcaagggtgtttttgagcaaatcggtaataacccgattaaaattaccagaacctttaaatatgcggaaaataccggattagttgaatttgaaatcattaagccagatggggaatataaacgcgttagtgtagatgaagttcgcttttctcacatgtggtgtattcttactaatcaagagtttcagcattattttgaagaaaccatctacaaagaacatgaaccgaagaccgacgatgatggaagcaatgattggggtgtttggacctcaaataaaggaaatgatacctacaatggcggattaacaaaggaagaagctgttaatcttgcaaaagtacaacgcctgaatgcaactaaagacacaaaagttgtaatcatgcagccttttgctatccctgtagttcacgttaatattcgtccgttttaagaggaaattgaaatgattgtatcagctttctatgattcacgaaagaaaaaagttgaaaccattatcagcgatactcgcgatggtacacctgctaataaaaatggtgtgaaagcatacattgataggtattgccctcctgaatttcgtatggttgatggcgtagattctctgagcattaatgttataaatgctaaaattgaattcattaatgcaactatgccaattgggtattctgacagtgatggctcaaatgccaaaatgccgaaagaaaaattcataactaaattttgaggaaatcaacatgattgtatccgtgcctaaacctaaagctggtattttttcttgcagtttgaaaaaccacccaatggttgatatcatgtcagctgatgttaaacaacacaccgttgagtatgaaattgatgctccggatttctttgaattgcccgaatgggcagtgagacttgatgcatgaaatatcatatcttcagtacagtaagattagcaaatggaattcctggagttgtatgtgatacggctccagccattaaagcctactcggttgaaccttggtatgaagttaattgggttgatggtaatcgttcaatccatgcagaatctgagctttatccaattactcaattaagggctgctaacgacgatgtctattaatcctcacttcggtcatatggttgcccgacgtatcaccagggaaatgctaaagactgctgagtattataatatagaattaattgatatagaaccctcggacgctccagggttaatctggttcaatttcaccggtgccgcaaatagcgttgccaaatttaaacaagcattgaggaatttccccgaatgtcaaagccagtaatcgcaaccgatgttgatggaatcatcgttaagtggcaaagtggtctgccttactttgcccaaaaatataaccttcctgtagagcatatccttgatatgatgactactgaaaaattcattaaacccgctgagctgtttgattgtgaagaagaactagctgttaagctgcttctgaagtacaacaacagtgattttattcgttatcttgctccgtatgctgatgctttagctacagttaataagctcaaagaaaaatacgattttgtcgctatcacggctcttggcaactcagtagatgctaaccttaatcgtcgtttcaatctgaatgctttgttccctgatgcatttacagaaatcatggtctgcgattatgatgaatctaaagatgctttactggaaaaggctaaagtaaaatacggcgatcgcatcgtttgctatgtagatgatttgcctaaacacattgctgcagctagcaaagtctttgaagacactgaaacccgtgtgttttatatgcctcgtggtgagcgagaaggttcagtgactgctcctggaattatggttgaagattggcatcaaattgtaacttgcctggaatctctgaaattcgttaagaaaccgcagaagtctctttctggattgtgggaagaagctatcaaagaccaaattcgtaaagagcaacatccttttaattggcctccacgacaagttccaggagattggtggaaacaacctatcattccgtttagtcctggtccgcatgttcctcctggaaacgactggtggaataatggtcgtattacatgtgataatcaccaaattaattgctaacactctgggtatggtataattgccataccctaggaggaaatatgtttgtagttcatactaaggttggtaaacgctggttatcatgtgattacggtcatgttaatcagttttatcgttggaatccaatttggcgtgaagcaaagtcgtgcccgatttggaatgaatgcatcaataacgggtttgtttatatcgatggattaacttatcatcgtagcgtaagcgaactttcaaaagaattaggtgaataatgatttttgatatcatcaaagcaattgaagatgctaagggttctaaagccaaaacccaaattctcattgacaataaagataacgttgatttaaagcgagcttatctgctggcgtattccgggcgatttaaattctttattaagaaagttccagaatatactcccgttaaatatccaaatgttccttcaaagacgttttcagatggtctagattacctccaagacattctggcagcacgagtacttactggtaatatggcaatccaggggctagtagatttgctctctaagatgaatgagggtgatgctagtgtactggtacgggttcttcttaaagatatgcgttgcggcgcttcaggttctattgctaataaggtatggaagaaattaattcctgagatgccacagatgttagcatcagcctactctgagaaagcgctgtcatatattaagttccctgcattcgcacaacttaaagctgatggagcccgatgcttcgctgaaatccgcggagatgatttagatgatgtgactcttcttactcgttccggtaatgaatacctgggtctagataaacttaagcgtcaacttatcgagatgaccaaagaagcccgagaacgccatcctaacggtgtgatgattgacggcgagttggtatatcatgtcgaagtgaaagaagaagaaaacgacctgtttgatatgtttaaagagcctgagcttcctgagttaagtaaagctaaggaattccaacagacggctcgcacggaatcaaacggattggctaataaggctattaaaggaacaatatctgccgaagaagcggaaggtatgagattccaagtttgggattatgttccgcttgatgtagtatattccgaaggtaaagttcctggatttgcttatgatgtacgcttccgtgcattggaaatgatgagcaaaggctatgacaaggttattctaattgaaaaccatgtcgtacataacatccatgaagctcgggctatctataagacatacgtagaccaaggtctcgaaggtattatccttaagaatatcggtgcttattgggaagataagcgttctaagaacctcgttaaatttaaagaggttatcactgtagatttgaaatgtgtcggttcgtacgagcatagaaaacaacctggtaaaatgggcggcttaatgttcgtatcagaatgtggtcgtattcgtgttaacgctgggtcaggtcttaaagataagcccgaagaattacatgaacttgatcgtactcatctatggaaaaacagagattctcttccaggaactatctgggaacttgaatgtaatggttgggtaactgctgaaggtcgtgatgatggtacagtaggattattcttacctatcattaaacagcgtagatatgataaagaagtggctaatacattcgaagccgcgtttggtgttaactttactgaggcaacaggaataaaatgaaagctttatacgaagtgattgctaaatctcttgacggacgtggtggtatttctgttcacacagaagttattgagtttaataacattaacacattaagaaacttcaaagaaaacattgaagagtatgagtctgtaaatggactacaagtttggcgtacagtaacaataattaattaaggccttcgggccttttttcgtataaatagaataaacaaacgaggatatgtcatggaacttttaaatgaagttttcgatgaagagaatagtaaaatctatcccgtcgagaacgttaagccaaaacttaaggtaccacaggtctttttgattaaggtgccgggtaataacaatttaatgattcggttagtacaagggtcaggtcaaggtgatgcagttaagaacatcaagatgggtgataaattcatccaggtctatgttttctctgtgtcggaaaaaggtaacatcggggcgcttaaaggtggtttaggccaagacccgattggtgctatcaataccatttttgagaccgtcaacaaagtagttaagcaaattaaagctgatgcggtaatgttccgctttaatccgaagaaaatgcaaggacaggataaagccattcaacgcattcttgctcggttgattactactcgcaccggcggtcgtttcaatctaatgaaagatatggcttactacaaaggtaagtatgcttattctattatggttcgtaaaggtaagaaacttgaagagattgaaggaattcctgaaatttcagaagaactttacaccaaagtagattccaaagtaggcgaagtttatgtgtctaaagaaaccggcgaaaacgttaccaaagccgaagcattggctaattccattggcgaaaaagaagacaagaaatctgaactcgctgtaatgagtaaaatgaaagtgtctcgaaaagatttaatccgagcacagtacggcaaatttgtttcatatgttgatgaagattggccagaaaataaacgcgaacgttggtacgaattaactactaacacaccggttcttagcgcagaaggcgatacggtagacctccaaaaagatatcaaagccggattagaaaaatcaattcctttttatgttgatgatatcaagcactatcgtgttcgtggcggatatggaagtaattttggcgatgcagttgagagattatttgtaggccaaatgtcgagaatgcatgacgactggaaggttttcattccttcggggtcagacaaaatgaaaatcgctgaacaacgaatttcagacgttgctgacgttattgctcaagctaaaaatcctgcatctatggaaacaatgcgtaaaatcgttgaagtagctactcgtggatttgatatgcctccagctgacgatttcggagctttacgtcaataccaaaatcttgtcaattatatgatatccgcttatgtgtcaattgttggcgattctatatccaaagcaattgaatataaccgtgaaatgcattctcgtttaagcgaagaagaaagagatgcaatacaccattactgtggttctggttattcatttgttaataactatcttattggcatggaaagcttaggcgatccaattattgacaagaaaattcgtccgctcgattctgcctttgaaaaaggtttgcgtcttgaaccaggcactcttttgtatcgtggtcagcgaggaaaatatgaagactttaaagataacattgagtctaaaatgttttatttccagaactatgtttctacttcgttaagtccaattatctttggtgcttattcaaatgctggtgattcattaatgccagacgcacctagttctgatttagaaaacaaagaaacaactatagatgcagtatcttctgttattggaacagacaacttggaaagagttgatagaggcgaggaagttgcctatggcgatgagtttaagtttggattcgttatccatggggccgataaagttaaggtagttatcccgggtgtcttgtcaagctttagcgatgaggctgaagttattcttcctcgcgggttggcaatgaaagtcaacaaagtatggggaactccttttagaaatggagttggtgtagcgaataacaagacattcatggtagaaatgacggtagttccgccagagcaaatcgatgaatcggttcatctctatgatggtgacatcttgatggaacagggcaaagtggaacctcttgaagaaagcaagttcaaaggctttttaaatgagatttacttttcgccagaccgttctacagataaggttagctacacgcgtaccatggagctactggctggtgctatcaacctggatggtatcccagaaaaacttgcataaagttgtttacttatcacaaggacgtgatactatagacttacacaaaccaatgaggaaattgatatgaaacacgtatttcgctttaacggtattgaatggtctgctgatgttaaagatgcagagaagttcaatgaagaagttcttatcatgcttgaagggtttaacgaaggtactccgacggttcttattcaagatatcttccgtaagccaacagagccatcgtttgtagaagccgttcttaatggaaaggcagaaggtatcattcctgttaaagtagtttggaccacaaacgaaatgaaacttcttcgcactgagccagggtttattggctgcattgcataaaacaaaggggccttacggcccctaaattattctacttgttgtagtagtgatattagaaattccaccaccagccccgcctaaacgagacaatcttgaagcagacgcactcaagccctgatttggattaatcgtctcaattttctgaatagccttatcttccaaccaatccatagcagcttgttttccaaccgaacccgtttgcatgctacggtaagcaaacgtgacatcaaacactgctatcgtgttttctccatcatatgtaaattcgggagctccacacgctacaggcatagcccctgagaacaagcatacagtatgtggtaatccatttctagcatgaaggttaacttggatatcacattctacgtcttgtggcaatcctcgcagaccagtcactgggtcttcaacagcatttacccaatcttgcattgcccggtagttgcttgcttctgggtccatcctaaatgaaagaaccagcggttccatatctcttcctgtgatttttatattaggagcgttatggaacttatccatttcatatgataatctgttctctggtattttagcagaataaaccatcaatcctgctgttggaaatgccatattaaagaaatcgagcagataagtacctaccgtaaattctcctaataatgactgcaccacacgttgagtcattgcgccaatcataaatgtattcacacctgatttacgaacaacttgccgagttccttgtgtcactatagttgttataccctgattgaattcacctggggtcaatccaagccaatttccatctaaacccatattattatacagctctccaccaaagtcgtttagaagagcctgggttttactagagggtacagtagcgaatacaacagagaacatgttagttctctggaaatcgatgtcagccgcttgactcttaaattcttcgagagtaaacattattcaatacctccgatataaacgttccctctattaagagtaagtatttcacgcatagtaatttcaagcgtaaatgtgcttggaaggttaggagcaattgctaaaccattgaaatgtccgttcggcgttttatcaaagcggatactctgaatttggcatggaccaaatatatcctctctaccatccattgatgtagaatatccaaaattacgaacagtccaaatcgttgggttagaaactacaataacattgcttaaaaacgatgttatttgctcaaacaccgtgttttctactttagccccatctggagctgcggatttaagagttcctttataccattcatcaatagcagctttaacttcttttgcgtatgatgaatttcccgtcacaccgtaagaatagtagttaaaaatttcatagatgcgaataatttgtataaggtcatctgcagacctaggagttaaatcccaagtaaacactttcgttctgttgtcgggtccggcatacatactacgagctgtgttataaatctgttcaccgttatcagccattaatccctgcgttaaagactctatcgacccaaacaccgcagtagaagccacgttgcttaatacaccggtagcagtaccgccgccgcgagtaacaagagaatcaccaacatcattaaatttatggctaactgaatcaacgtctgacttagaccgcggtaatagaatattagctactggtgcagtactagtggtagaacttgatgaattagccaatgctgacattggtgaatcgaatacagacgataacattacatctcgtctaaatgaacgcaaatcaggagtagttcttcctttaaaatcatatgctgtgaataataacccattgcgatataagtcatgtactctcatatcttgggcggaatcattcccagctgaacgttcagctgggaactgcgccaccttagtggttggcgcattcgtcagtttagatttaccttgggaaattcgagttcctgattttttgatgttttcaaggccatcggccagttcttcaaaaatcattatttttccttaagaggttttcatagcgccttgcattccaggagcagctgtcgaagtctgtggaggcattctataaacatgtgtgctattcttatttacagcagtattaacctggataggttgtgactgtgtattagattcacgtgtacgagcagcttcacgactatccgcggcggctttaatagaagcagactgtttaacctcaggttgttctgctgcaggtatagcttcggcagttggagcaggttctgatattttagaatcaagaagcttttgcaattggtctaattcaacctttaaatcttttgcaacttctggagataatttctccaattctttatatctggtggttgtgctttgtactgcatccttagcagagtctaatcgagtggaatcagatgcgtcagttttttctacatacgcttttgttctcttcatttctgcttcagcattattacgagctgtgatgattttgaggcgttcgtcttctggcaagtctgcatacgctgactgctttttctctccgctcagcagtttgttatattcatcgtcatcaatctgcccggtgaatttttggaacttagcagaaagctttcttttccattcaggttgttcgtcatattctctttcttgacggtcaacatattttgctctcattttagcatcttcttcatcgagttctgctccagtaacagtttgaaatctgtctaaagcagcgccttcaatgttatctgccgaatcgttaaatcctaatgcgcgtaacattccagcaagaagcttactcattccgagcataatggtttctccgagcttatcaattacatcaaccaaacccgagccaatggcttttgctaatccgccccaatctcctttgacgaatgattttactatttcattcgacatctcgcttattgcagttaatagcggaccccattctttagcctgcttgttaaattcaacaaagttcttttcgaataatttagtccaataattaaaatgaactttaattaaatctataagcattatcacacccaaaaccatggcggcagttttcgccatttgggccaaagcgctaacagtataactaaacagcatactgctaattttatctgttaatgaaatagtttttccaaaaccagatttaacgcttttaattaattctccaaattttaggtcaagaaactttttattcttgtcctcagtttcctttttaggctcagctttttcctcttgctcttctgtgctaggaaagaaatccgcgtcaggacgtctgccatcctgaggaggaataagtctttcgagtaattcctctagcggctgctgagtaggagcatccgggacttgttctgttatcgtttctaatgatgttccagtaccagtcttttggacatcttgctgaacatcatgctttttagataacaagtcggcaagtttcgtgagcttatcattaattaatgatgcagtatcattaagttttgatactgcatcagttgtgcgctcagaagcttctgcggtcaattcgacaccagctgaaacatcttctactgatttgataatttcgtttgatttagtttctattacatccgaaattaaatcagtagatgcttgttggtcgtctaaacgacgaccaatatcttctagcgtattaatttgagcatcagcttgagactcagcctttttctgtggagccgagtcagcaataactcttctacgcattgaattcatttctgatttcttagtcattcaaatatttccattacgttaagcatgcctttgattggtccttcaggtccatcaatggctatagtgtttactaagtcatcagcccactttgtcacaaaagctggaagcttcataaagtttatatccattggttttccatctactgattcaagaaattcgctcaaaattgaatctactgaacctagtttggaataacgaggaggagctctgaatttgaattctttaccatctaacctttgagttaatcgctggcaaatgtaaaccttattcaaatcgtaggtaaaatcatctttaacaacagtttcttttattctgttgttaaatgctaataaatgtaatacaacaatatcagattcggctgctgttaatcctggacaaattgaatccaaaagaagattcatgttttcatctggacccttaacatctttcatcagattatggtgctttaaccccagttttggaattgatatcgtcttttcatttattactattttcttaataggaagaatcacgtttaagttcatttttcaccttaatcaaatctacaggttcaagggcagagccatttgtgaacatatataagttagttatagatgtgttatttgatatttcatggataacttcatctatataaaagtcagttctgaactggtcctttaaatcaacaaagttgattttcattcctggagttagttcaaaattaccgtaacacttagtttgagcatacccgtcatattgagccatcgtagaaatgcgtagtgcttcttcatagccattcctaaaaatcatgtcagaatatcctcctgacctattaatgaatacgctgttttggccttctccattaataattcgggtaacatctttgtccacaaacgagtgtgcataaaatgttgcgtttttcatgggatttctattatatctgtttgatttaacaagccattcaaaatcccatgctaatggatattttaatcctgcagcaaactgacctattgtttgaggagccccgaacatgaatacatttggatcctgggatatcattgattcataatccatcatgttaattccggtgatatcttcccacgcaaaaataaattgatcgttgtctgtagaaatgcctacatttctaacatatcgtaagtaatctttgagggtactagtccagggaacccgtgggacgtaagcgttaattccgttgataggaggagcaatcaatggttggtcaacatacattgcacctatcatttcttttatagtttcatacgcagaactaaaaaacgctctgctgaacttgagattcattatgtcatgcagtgttccaagctgaagggtgataatgctatcgcctttatcatcaacaccaactgtaaagtgtttaatcccataaattcgggtttgtgttctcgatgtgttactgtttgcaacagatatttgaactagttcatcaccgttcatacgcgtgtgcatatttttcgagtcataaaactgaagtaggccttcgttagtcccgcgtaatgaatctctcattgttaatgtaataaatgtagctgctaattcaacgaatctattagctagccacgcatcatatccagaatataattttatgcttatattaggatatcctaatctttgtgttgtcatgatttaaggtccttttcaataagcgataaggttatgccacgctcaataggcagcatcttcattatagaattcaagtcatatttaccttgagaaaccaatctatggttaatttggtaaaatgtgaaaatctcgtcaggatgtagcaatagcttaaagatatcaacaatgttatcatattttaatactgtcgtggtatcacagcatgacgtttttagctcaaaattaaacggcttcatctgcgataaaatcttttccaaggtttcaacatctatagcatcgataacggtcaatttattgctatcgctcaattcattccacgcgtattccccagatgaatccttcacagatataatgttatctaaaatcattttacctgtatcgtcaattatttctatgggttttttgaacttgagcgttaatccagcaacctctactttcggatttgtcaacggaggctgattaagattaaaaagatactgcttatattttccgcattttgggcacttcattctgacaggtattttggttttaccaatacttgaaagaaataccttaagaaatatataaggacgatactcagcaggatggtcatgaaaataatcatccattaattctgctataagctgtttttgttcttcttcagacttggtgttcatgtcgtttctaaccaataaaaggtctctataatcttctactgtaaatggcttaaaacgttggacaccatctggtaattcgcatctaactatattggccataaggtaatcctctttatactatttataaatatttgaataagaggagtggatatgaacatcacatacaaatttgaaacaagaataaatggcaagaatatccagtgccgagcttttacactagaagaatacgctaatttaattgcagcgaagaaaaacggtacaatcgatgaatgcgttaaagcattgctcagagaatgcactaatgccactgaattaaacaaacaggaatcggaattacttatagttatactttgggcgcatagtataggcgaggttaatcatgaggtgacctggaattgcacctgtgggcgtaaaattcctgtgccattaaattatacacatgcgcaaatcgatcctccagaagacctctggtatgacttaaagggatttaaaataaagttcaagtatccgaatctttttgacgattcagacattccaatgatgatatcaaaatgcatagattatatcgtggttggaaatgagcagatttactttaatgatttaaatgatgcagaaatcgatgatttatattctgctattacaaccgaagatgtagttaacatcaaaaatatgctattgaagccacaggttcaattggcagttcccattacttgtgaatgcggaatttctcacattcatgtaattaaggggcttaaagaattctttaagattatgtcatgagcaatattgataaattatattctgaccttgacccagagatgcgacttgcttgggataccgatgtgtcaaaaacggtaggagcacgatcggttaaaaatagccttcttggaataataaccacaagaaaggggtctcggccatttgacccagcgtttggttgtgatatcacaaacgaattatttgaaaacatgactccattaactggtgatacgataaagcgtaatatagtctctgccgtgcgtaattatgagcctaggattaaccgtctatcagttgatgtgcttccgttatatgacgataatgctataattgtcaccgtgcagttttctatagtagacgaccctgatacgctagaacgtatacgcatacagatgcgtagtaatgctaactctagcagtagagtataatggtactagtccttccaaagaaacagtagagtggagatagaatgagattagaagaattacaggatgaattggataatgatttgattatcgaccagactaaactacagtatgaagcggctaataaccctgttctgtatggtaaatgggtgcgtaagcactcgacttgtcgaaaagagatgttaagattagatgccctcaaaaagcaaaatcttaaagcacgattggattattacactggccgtggcgaggttggtggtgaagtatgcatggatgtgtatgaaaaatcagaaatgaaaactgttttaagcgctgataaagaaatcttgggtgtagatactaaattgcaatattggggaattcttttggagttctgtagtgatgctatggatgctattaagtcacgaggttttagcattaagcatattattgaccttcgtcagtttgaagctggcgcgtaataaataaacttgtaaactaaggagacaatcatgtcgaatacggtatgtgtcgtctgtaaaggaccaatcgatgaagcattggttgtccaaacagacaaaggcccggttcatcccggagcttgctataattatgcgattgaattgcctgtcactgaagacacagaagagcaattgcaagaaacgcagcttttaatttagtctagtgttgatgtagccaattggctttgccccttcctttcggttggggcttttttatatcagaagtcttcgtcgtcttcatcttcagaatcagcttcaagagcttgtctacgccccgccaaagcatcacgcacaatgatatcatcagaatcagcaagagtagtttctttagagcgcttatcgtaatacttctcgagttcttccagaccatctaaggtctggcaagcattaattttactcatgaagttatcgatagtagcctcacgaattgtggcttcgtaaatatcttcaaatttaatcatagatttaccgttttcattacgtagttaaatttttcatcagcatatcgttgaatacgctctaatgcatgttttaagcaatagtttaaatgtgtgtatttctttttagcattggctgacttcggctttacacccaggtcatcaatgatatcccacactgtagccaaagatttatctttatgcttacgaagaacacgaccaatagtttggagtacgataatcttcgatttaactggatgggctaaaattacatgatgcaggtttttaacagaaataccggtagaaaatacaccgtaacttgcgacgataataattccctttccgttttctgccatagcctttaaagcattacgtgtttcggtattaacttcgcctgacacataatagacatgctcatgaccagcagctttaatcatctcgaatagctctttaccatgagctacatgtttaaacatcacaaaggcattttcgtcacgcgctgcaagtttagtagcaagattagcaatccaacgatttcttttcttaacattggtgatgaatttaatttcttcttgatacgtttttccttttaaagcatttgcggctgcatctggatatcttaagaagattgtattaattttaagctcagttacttgtccgtcttccattaacttagaagttgatactggacggaagatttcaccaaacataccaacatattgcatgatattagctttgccgtctttaagagaaccagacagtccgtacttaaacatgcaatttgtaagacctgcaatgattgttgaaattgacttacccgttgcaagatggcattcatcattcatcatcatgccgaattgagaaaaccattctttaggctgcttaacagcggtctgccaggtagatacataaactaatgcattcgaatcacgagcagtaccacctcgaatacccagcatagcattacgaggaaataaacgatagtcacaaaaatcatcaatcatctggtcaactaacgcagtagtaggaacgatgataagaaccttgccttcgtaattttctacataatatcgagcaagtaatgcctggataagagacttaccagcagatgttggaagattaagaattctacgtcgattaactagaccttcatatacagcatctttctgataccagtgaggttcaatcttagttaatcctgaataaatttctttagttgacaaccaattatcaaaatcctcccgcgaaagagtttcttgctcgaatatagctggatcgaaataaaccttatatccgaattggtcagcgaattttctaatttggccaacaagaccaaacggtaagagacgattataatctagcagacgaattcgtccatcccaatgtccatagcgatatttcgggttgaatctgtatccatcggcttcgaagctaaaatagtctctgagttcatagaaaatcgagtcatcacactcaatatgaacatgactaaaatctttaaatttgacttggatgtcgtgcactgtactatcctcagtttataaatacaatcatatttatacattacatgaggcacacccaatgctagataaagactatattaaagaaattcaggcactcgataaaaaagaagctaaagacaagctcgacgaatatgcccagactttcggtattaaactgaagaaaactcgttcatttgacaacatggttgctgacttagaaaaagaactggctaaattggccgatgagcctatgccagaagataatgatgggctgtcaattgctgatttaattcaagcagatgatgaaattgagggtaaagcagtatttaaagatgaagcgtctgatgaggcaaaactactgtttgacgctccagttaatgttggtattaaaattcatgatattgacccaggtttctataaagaaacccctaaggtaaatgacccagggtttgaagtaaaaacaccttctatcaatgataaaggattttatgctgaagctcctattggagacagcgttattcatatagatgatgaaggacaagttaccaatattccggttagtatcacggaccccgaagaatttttcaaagcaatggacaaagtagttaaaattattaaaacagacgaaatcattgagcttcctgaaaactttagtccaaatatgcaattgctaggtaagaacccaggatatattactcttccatggtggatttaccaatggattaaagataacccagattggaaatctcggccaacgtcgtttgaacacccatcagcacaccagacactgtttagtttaatttattacatcaaaagaaacgggtctgttatgattcgtgaaacacgtaattcttcatttgtaactttaaaataaggaacacctatggcttatagcgtatctattgctcctttggctgcttcggcagtcattggagcaacaaccaattttactgcaacaacttctggagccgcggctgcaggcacagaatcatttgtgtggaccgtaaacggcgtaaaacaatcttctgttaccgcagccatgaattatgttgctgcgggtcctgcaggcagtaagactattaaagtagttgctactgttactccggctgaaggcgatcctgaaacggctgaagcagaaactactctgacagttaagaacaaaaccatgcctgcgattactttaactttgagcccaacttctgtttctaaagaaattggccaatcccaagtagttacagctaacgttgctggggcgccagcaggagcaagcattgcttatgtttggaaacgcggctcttctgttatttctggccaaacgggtaaaacaattaccttaactgaatcaacggaaaccagctacacattgaattgtgaagtgacggtttctgctccagactataataatggaactgcaactaaaggtattgctgttgcttttactaaaaagaccatgagcggcgtttcagttactttgactcctgaatctattacagtcgagcaggggtctgatgcatcttttaaagccgacgttatcggttctccagaaggtgcatccggaacttattcatggaccaaagacggttcccctgttgaaggttcaactagtactttagtgattgacacgtctgatatagggtctcaagtgattggggtttctgttgaggtttccgcagaagattataactcagtcacagtaactacaactggtaatgtaaatattaccaaaagagtagcccctgagccagacggagaacttccatatattcatcctttaccattccgtggaacagcctatatctggtgtggttggtgggtaatggatgaaatccagcgaatgactgttgagggcaaagattggaaactcgacgaccctgacagcgattattacctgcatcggtatactctggctaaaatgctagatgattatccagaagtcgatgtacaagaatctagaaatggatacattgttcattgtactgcactggaagcaggtattatctatccgtaatatttgggagccttcgggctccctttttgctattcacagactggtttaatatgtcttcatcacatagatgaggttattatgaaagcactacaagctcacttaatgcatgaaagtggtaaagattttcaagaaattgcgagagcattagatatcactccagcggaagctgctaaattgtgggtctcagttgagaaagcacacgaacagtttaagcaaaaagaaaaagtcgtttatcggaaacgcttaacaaacgttggtataaaatctcgtcataagaaacttgttaaacacatgaggttattatgaaaatgcctaaagtagacccaattgtagtagaacgatttgaagaaatgctttctaagaaatttacgccagctgctaatggggtaaatgtctggttgtttgcatctaaatttgttagtaaaatgatggctgttcagagttcttactactataaaagtggtgcacgtaaaataacggatttgattaatgaacggtatggaaaaattgattggatgctgatggataaagatattccattagtacttgaggttggaagcaaaagtcaatttgaaatcatgctaactaaaagcggatatatcatgtatcgcttcgtgccgagcggctattaattgctttaaaaatcgatgtggtataatgggctcaggggaaatcctctgataccattttgaccaagatagactcctggttttatattatttattgagagaaaaattatgaaccttgccgatagaatggctaatacagccatcaatattgctacagaagaattgagtgcagcaaaagaagaagtattaacccagattgagaaaaccgctttagcgggtcaacgtgagttaattatgtatcctagcagtttagttaagaaacatattacaagtgttcttaattatttgcatgatgaaggatttgttacaaattataccagtgcccagcgtaatggtgatactgactttatgaaaatcacattctaaggaaattataatgtttgcaaaatattctagtctcgagaatcattacaacggtaagttcatcgagaagattcgcggtgctggttttgatatgcatactgttgagtgggtggctcgtgagaagattcatggcactaactttagtgtgattattactcctaccgaaatcgttcctgctaagcgtactggtcctattttagaaggtgaaagcttcttcggtcatgatattatcatgaagaagtataaggattctttcgttaagatgcagaacatgctgaacgccatggatttagtatctgttcaaatcttcggcgaatttgctggcggtggtattcagaaaggcgtagattatggtgagaaagatttctacgtatttgatatcctgtcggattccggtaacgaaaaagtttattgggacgattatgtagtagaatcgtttgctactggtcttggtcttaaattagctccacttcttggtcgaggttcatttgccgagctatctcagtatgtgaatgactttaaatctattgtcaattactataatgagcttgttgacacgactgaccttgaacatgcaaataaacatgtgttcggcccacaggcttcttctgaaactggcgtagctgaaggctatgttcttaagccggttcatcctaagttcttcaataatggtactcgtgttgctattaagtgtaagaactctaagttcagcgagaaggctaaatccgataagcctattaaagcgaaggttgaactcaccgagaatgataagcgtgttctggaaatcttttccgaatatgtaacctggaaccgcgtaagtaacgttctgtctcatattggtactgtaactgctaaagatttcggtcgtgttatgggtctgactatgaaagatatcattaacgaagcagcacgtgaaggtcatgatatgttattcgctgataatccttctgcggttaagaaagaaatcactactttgattcaaaatactattcgtagtaaatggcatgaggttgtagaataatgagattggcgcttattggttcacgagaagcgccacgcagagttctgagtctaatgactacaataggtcaacgcctctcggaagaggggcatttttcatattcaggtggagctccaggttcagatgaagcgtggttggcgaaatacgataggtcaaattcttgtaggattattccttattctggcttttgtggccatgttcctggtacaggtgttgttgtatggtctgaattatcaaacgaagccaaaatcaaaagcatcattaaggcgagagaagttacgtcgtactgggatgaatgctcgaagatagtgcagactttattcgcacggaattctatgcaggtattgggcctagaatgcactgagcctgtagataaggtattatattgggcgcctgagaaaagatgcgggagtgtatctggagggacgagagtagctgttgatatagctcgcaggcacgggatagaatgtgttaatctatacgataagaaagtgtttaaatccctcgaggaggaatactctccgaagtttgacatatttagtttatagcaaaaagggagcccgaaggctcccataaattagtccgcaatcagcttaggtaacttaacaccgagcataacagacatctgacttcttcctgccatcttatccatatccgcagcattaatcacacgagcttcgtcctcgtccaatcctacagtatatgggttaaccgacagcgcgtaacgaaccagtaaagctacagaaggctgcaagctagctgggtcaacaataactttaaatgcaccaacatgctcagggtcgtctaaatcaagaccttcggtatacggcgcatagaataatgaacctacagtttccttcccaccaaattctgccttaacaccaacaataacgtaatcaatcggactgttagtatcacaatacagtggaaggccgttattcagaatgccatatgcgttttctggaatagtcccatcgttcttctgcattaaccaaccagaagctgccagtaccgctgcacaacgagtagatgctactgcgtaggtgccagaataagaagtattacgttgaactgctgaattcatttcacaaatgaaacgatacagagtacgaccttgttccggggcagaatcctgcttagttaaatctaatacacctttatcggatacaccagctactttaaaccgagaagaaaccgtaatcaatgattgcaggatgtctttattaatgtcttctgccatttcagtagcaagtaaatcatcaataagctctggagcatcgaacccgttagcttctaagtcttgagctaattctacagttaaatccgttttaagcttacgcgatttaacctgggtctgccatttatcaattttaaaactggcttcggtgattgggtctgaatcaggtccttcgaatttttcagtgactgcagcatctgacatcatacgaatattattagctgctactgcttcagatacaattccaaattcatcggtttctgctgtatcggtaaacgggctatctttaagtactttaaagaccacattctggtatttgaacatatcgtctttattgaatgagtctttatttgccatagtgagttcttcaattgactcacgttctggcgccccgatttgacctgcataagttgcacccgtattaaacgtcaggtcaccattagggttaagatatttaataccatacagtgctgctacaggctgtttagtacgctgtgtagcaacaagatcggtatagattaatttagtggttgcgcgcgttaatgcaacgagattagggcgaccaattaagttgctactcgttgtagttgactcgcgcagaagttcgttgattttagccattgcgctttcctctgtggatttataagtttatttatatccattaaaacaactaaagggagcccgaaggctcccttattggtattagatacctttaacccatacacgacggaagtaagcattcttaccaacagagttgacgatagaaggcataccagaggtaatacgacctttcggctgttgagcagcagaatcggcgaacgggttaataccgataccgtaacgggttttgaaccccatgaccggttggaagttcttcggatcggaaccacgcagcggggtcagtgcaacatacggagcatagtagataccagcatccatttcgttagcacctttataaccgatggtgaagtaatcctgacgagcatactggtcgatgtatacacggtagcgaccacccagaacaccagcaaatactgctttagtggtgtcggtattataaccacgacccagaccctgagctgccggagatacgttggtatcaacagctgccagtacgttaactacgttacgggaagcgataatgaagttaccttcaccgcgaccggtctgacgagcgatttcagcggattctttgtcaatctggaacagcagagctttaaagctttcacctgcccaacgagcaccgcggatatcaatcgggtcttggaagtcgaatacaccagctttagaaccaacggtctgggtcataccagatttaccaacctgagcggagtagttaatccagtcaacaacttcacggttgatttccagcataatttcggtagccaggattgaactcaattcagcatcagcgtccataccatgaacagcacggaggtcctgagccagttcgatggaatactgtgctttcagctgacgagatttcgcttcgatagtttgtttatcgatacggaagcccatttcattccacgggttatctttagaaccattaaaggcttcttgcagttcagcaacagaagtagccataccttcggcgatttctacaactttaccagcttccagagcggcagttactgcagcgtccagtttagcagcatcagtagcgccagcgtctacagtgaaatcttcaacaacctgcagatgagcacgaccggtctgtgcgaaatcgtgaacaacgatatcaccaacagtcagagcatcaccggctttaactgcttcgaacttctcggttgcaccctgaccagagaacattgcatccggagcgtacatcggatggaaagcttctttagcaccagcagccagcgggtctttgccgtaaacagcgcggagagcgaatacctgaccggttgggttagacatcggctgtacaccacagatatcgaaagcaatcaggttagggatagcacgacgaaccatacccataactgccgggccaatctgggttacagcaccagaggtctgaccagctgcgatgttctgtgcatcataaccgtggtcaccgccaatttctgcttcagacaggaaagaaccaaatgcttcagcgattttttcatcgcggtattccggagcctgattaatatcagcttcctggttttcaaaaatcttagcgatcagagcttttttgctagcgccaacaatttccggcagagcttcgttctcaagcagcggctgccatttttcgataagtttattctttttcatgtgttgtataaccttttaaattaagaaagacgagccgcttgggctacataagcatccataacggatggggttttagtcgcaggagtttcttcgactgcttcagttgtgaagtttaaaccgtctgcttctttgtcgatagtatttatatcggcagattccgttacagactgctctacagaaccctgcaccatttcaacaatagctttcagcttagttgaaaacgagtcagaataatccataccctctgtcagagaaactactttctctttttgggtatcagtcagttcacgggttgcttcttggatagcatactcacgttgggcataattgatatactcatcgcgcttagaaacttcttcaaataaacgagcagtttctgctttttgctcagcaagttcttcttccatctcagctactacgtctactgattcttcaggaattacaacgttgtgctcaacaaacagctctttcataccgacaaacatggattcaaacaggtcagctttaataccgcggtcaaccgccagctggttttctgccatccattctgcagcgatatggtcaaagtatttagaagcagcttctttcagctcttcgcgagcttcttctttagctttttctttttcttcttcaactttttcttctgctttctcagcaatcttttcaatatgagattctgccagagctacggcgtgttttttgactgttgcttcgaatacagtgctgaagttagctttagcttccggagaaagctgaactgattcgaaaatactgtcaagagcgacggaagcatcgatagttttagcttcggtcattaaaagttctttaagcatttttgatgtcctgtgttaagttacataattatttataacgcttttaacttctctgcgagagccataaaagcatcatcagcactattggcaacttgtgccgaggtattttccgaaatttgtttcggttgtacccatgcatccggagcactaggaccccaaactgcgtctacaccaacagtcaggcgaaagccttcttgtacgatgttatatccttttcctgagtctttcaaagaaccgagcccgcggcttgatacaccaggaatccaaccagcacgaatgttagcggctaatttatcacctggaccgtggtctccttcgatgattcttgctcgcccataaacatcgttgcctttccaccacatatcttcgataatgattgcggcttgcatcgggtcaacatttgcacgaggtggatggtttaattctcctagagcctgacgagtagcaacctgttccttaatataacggcttaccgcagtctcaagaatgcgttttggataaagacgtttattacggtttactacttctgcctgcataaaaacaccttcgatatacagaccaggttttaagccagattcattttcgccttcaacgataatagattccagcatgggtttaccatcaattacatcgcccggttgaccccaatgctcaattaaaagttgttcattgaggttttccattaacttagccccagagcctgacggcgtttaagtgctttcttacgtttacgtaatccacgaatttgagcagatggattagcacgttttgattttactgctttacgcgcgatttggcggcgtttagctttagaaagtccggttgtttggaacgcgttacgctcacgtgttttacgatccttagtacgtgtaatagtacctttagaatcaacgtgcttaacgataaattcatttaattgtagagattcgttaattgaacctaaagcaattgctaaatcaggctcagaagtaaccatgttctctacaattttatttatatcatctttagaaagcgctgcggacaacttatcaaaacgtgcctgtgcttcaggaagaaaagcttcgacagcgtcgataactaattcatgattttcaggcagtataagcattactcgtcctcttcgtcgtcgtctttctcagacttatcttcatcttcgtcgtcttcatcttcatcgtcaacgggctcttcaccctcaatcatgacagacgctgcgataaattttttgcgctcttcaattaaaccagatgtccgttcagccataattgcaccaaaagcttttttggctgctacgaggtctctggattcaattgcggaaatataattttccattagaaatcctcttcattttcttggtcttggaagcgagcctctttagactctaattcaatttgcttggcttcttgttcaatttcttcgtcagacatctgaaggaaatctttcattgctgtcttatgagaaatatacttgccgataaacggttcagccattgtgagcatattgattctacgctccataacttcagcatctttcaactcggtgaaatatgaatctttatggaacacaatcttaatattatttatttcgtcttcccactcatctttagacaaaacttttttaagaattagattagtgcgaagtggatcaagcataatctcttcgaatttatgctgtaatctacgaataaatttagcaaaatcaagctcatcgcgagtaattgctgtgccagcatcaaactgcacaccaccttgattatttgcatctggcatgcgcgaaagaggaactcgcaatgccatgtataacgctgttctaaagtaacggacgtcatccatatcactcatacctgacataccaggaagagtatctacttcagtaactgctttaccatctctacgctgcaaccaatagtcttctgtcattgacatattatgctgttggtttttaatcttaccagttgacgcatcatatacaacacggtttttcatcgtgttcataatatgctgcatgtgtgctgccgctttacgagaaggcatattaccagtgtcgatgtaaaacacacgacggtcaggagcacgagtaatacgataaattaccaacgcatcttctaatagctttaactggttggcaggtttaacggctcggtgtaaataaccaatgatgttttgacctgagcaatcaactagcccagaatgtgcatatactatagcatcgcgtggaattttaattttcgttccggcggaatataatctaccatctgcgtaataactttctttgccagtatcgtaaatgaaatactctttgtaccccttaacgattttagtgccagcgtcatcagcggtaacgatttcacggatgaattgtaagttgcgcgggtcaagacgtctcagttcctgaattccgtctttcattttcttggtgttgacgattttgtggaagaatattcttgagtcaacataccaacggcggaaatggtcggctccttttcgctcgaaattaaggcatgttaaaactgtattaaattcttcaagaatgcggtctttaattgcttgactgaagtcggtagaatctaaatcaagagaaactactggatgaccgtcttcgtatacaaccgcgtcagaaactatttcttcaacagcattgtcaacttcgtagttattcattaaactacgataagtgttgattaaatcagcggttgttttcattccaggttcattggaaccaaacatcatttggttgaatgaattatactggatttcgttttcgtttgattcaacttcacgagctccatcatcaaattttggagcagtgattgactctaggtcattgttgatttgttgcttatattcagcttcgtcgcgtttttcccacggagcgaataagtccaaaatatgaaaggccattggagtctccgaaattatctataagtatatttatatcgaagttttgtcagatatttaagcaaataactcacagaacttcgatacggggccgaagccccataacattattcccaccagtcaatagcaaatgtagtttcgaacgtttctacctcattattcgaatcccagtccatctgtacttcaccaacgttagttggccacagaccggtaatggtgtgttcatttgtgatagttttgccatcacgactaaactggcgtaccgtagcaacctttttgtaatcggctggagtcataccagagatatcattgccttgagcgtgggcctgagcctgccaagcaataattgccttacgtacttcatgtttatcatcgttatagatggtaacagtccagtcgtcataagtacggtcaccggcaacgttaatcttacggttcatgtacccgactggaactttttctacgatacctgccggcatcggtgctgctttacatttgaaactgaagttacgacccagataaggaatttctacctcaaacaggttaggacgtgcaaagtcaccagattcaaacgcacgggtgatgtctgttaattccatcgttgtttcctatagatatttatatagcctcttgattgactacatcatcgtagaggctattaaagtgtgcggtaatataatttatcatctaaaggttagatgaccccagaatgtcctggggttcatttcaatagatcccataaatcaatactagatttctttgattttgaccgattttcttcccaagtgattatctctaaattatcaatgcttcctataatttcaggaggaactttgttgtaaaacccatatgcaacagaaaccttatggtctaattgatacgctccaggtattccacatagtccaatcttatcaaaattttcccatgtagaataaattggtttatgcttagaagtttctcttctaactttactagcatattcattatattctgtcttgtttggattccagcgaggatggttttctcctgtcatcgaagacaacactttacccttattagctgttccaatagtatttcctatcttaaattttccgctacggcaatcatagcacacgtcagtgtctctgcaataacgctgtgaatattgttcaccgcatttatcacaaacacaatcaacatatatgtttgacccgggctcaagatggtcaacactgatatcaattgaataatatttgaatccatgcctaggcgaacccagaggaggcagcttgtatccaagttccgaaaagtatttaaaatttttaggaattatttttactttaacaaatttagagataatcacttggttttccttaattgcacataatatttcatatgtgcaattgtatcaggatttagcgaaaatgtacaatttattgtggtccgatcaactcatcgaaatccgctccagtcgctgtagcaacaaagttaagcgtaatataatttatcgatctggctggtttgatgtagaagctcgctacaaactcgttgcggtcgataactgctggagtgttgttcgtggtatcacatacaactcggaagtcatatacaccacccagagctttaatacctgcgaggtattggctggtttccatacggaaagaactacgggtaaagttatcgtttaattcaaacagctgccacttagaagaatcaccgatgttgttcttcagcatgttaaacaagcgacgaacgttaattcggtcaaacggagttggaacagtggttgcagtcttatcaccaaacagaatgaaaccttcacctgtaccttgacccgttaccgggttaatacctgcttgatacatacggtcacgatgtgcttgacgaggttcaatcgcaagtttaatgcagttcagaatctgaccacgacgataaccagccggtgacatccaaggctgagcaatatcatcagtgcgagcacacagacctgcaatatcggcagccagtggaacccaacggtttacgtcgttatatttatcatactgatatttatagttaccatcaattgccgcgtacgtggtattaatgttcatgttagcagaatcataagttccatcgccttggcgccagtcgattaaattatcaacagcacgagtcagaggaatatttacaatcgttgaccttggaggcgaaatgagtgctaaacagtcttgacgctcatctgcaatagacgaaacatgtttttgtactgtacttgcgatttcatcggtttcaccggcacaagcaccagcaatcagaaggtttacacgcaatgcttcacggtcaccaaataaatcccagccttgaattaaatcgccagcagtaactgattcattagctgaaaccccaccacccagacgaataacaccggaaaatccttcaggccatccttgcgcggtagcaaatatataacgtgaagaacctttggagaaataatcgtccataaagatgttgtttccgtagatgtctttatcttgacggcttgttgataacaccgttgattcaactaccgcaccatctctacgaacaatgatagcgtactgtgtatcggtctgaggaccatatccaaatacggcttttgcggttgatgcacgctgtccaccactcggataaatcgtcagctgttcgcctttatcaaaagcggcttttgatacaatttcaatttccagttggtttccgagctcgccaggatacgcagctacaattccaggcattttatattgcgcaagcgcagtctggaattcagtttttgtcatttcttcatgggcagtttcaggttcagttaacagaactgttgaatcagaaataattttgcccagagtaataacagcggaaacaccagaactctgtgaagtaatagtagttgtccatgaatcacctaaatccggatactgattaatgctttttgcatatgcaataatttttgccgtcggaatgaacaccgacataatttttccgtcactatctacttcagtaactgaaccagtgtcatctacagtttggtctgcatatttaaccgtaattttatcaccaacttcatagttactaccagcagttgtgatttcccactcaatattatcaaccagtggagatgcgtttttggcagcttcacgattaactacacggactgtacgtagatcattaccatattgcagaaagttcattgctgacataaagtaatcagcagtttggttattaggaccaccaaacatatcaaccagttcaacttcgttagtgatttgagtaacttgatatgcaggaccccattggaacttcccgacaattgcggcacgacctgtagcgttaagtactaccgtgctctgtacgctcgtttctttgagctcaattccaggagagactaaaggcatgatatatcctcaatgttgtttgctttttattatttatacaaatgaaagaccatgttcttgaggcgcatattctgcgctattcacggcgtcaacgaacactacaggagcgtaatcgtcgttcatatcttctaattcgcgtttaaaaacttcagatgctaaacgcatttcatctttatccacgaaatcagcaaatttttgctgtgttgttaaccatgcgaaaattacgagtgacataattaaatcgtcatgatatccatcttctgccgcccaggatactcctttctcagagaaagtacgaaattcttgaacagtagcacgatggtgaataatgagtttatctttttcgataaggtcttttagtgcagaacatccgacggcttttgaccttttcgtctgtttcattcctaaatcaactattgaatcgcaaatgacattctcatattctaaatccatataaagactcttcgctacagaaacacctgtagagttaagttctatatagatcggagcttcgttgtactccattagatatttaataactatatccgggaggattaagtgagaaattgtattagaatgtaatactccaacttgttcccattcagatgtagtcacgtcaataatatttagtgcatggtaatcctgaccgcgtccttcagcagagtcaagagttgcaatatatttgtggtctgcttccgcttctttaaatttataaaacccgtgcgagtcaggagtaacttcaatccaatccatattggcaagtttcataccggaaatgagagtaccggatgtgccatgaaattccgcacagtgctcttgtttaaactgttcaagagaagaagcactgatagtttgaagtgaccattgccacccatcatcaaacatatcttcgtcgttatatagacgttctttaaccgagttccaaattgcagtataaggcgtaaagccggatttaccttcaacagctgcagtccaaatatcatagaagtggtttaatccacttggtgtagtcgtgataataattttagaacgacgacctgatgaaataacaggttggatagcaagccatgcatctatgaagtttggaataaacgcacattcgtcaatgtaaatcattgcaaatgagttaccacgaacagcatcaggactcgaagcgtatgccccaatagatgagccattatctaattcgattgagcctttgttccattcaacaataccaggctgaagaaagtcaggaagtaattcaattgcttgcttagtacggtcgagaacttccgcagacattgagcctttatgcgcaagaatacctactgctttatccttattaaaacacacgaagtgcgcaagaaagattgctactacagtagttttaccaagctgacgactaaggttacaacaagtcatacgtttagccgccatgatttctagcatgtccctctggtaatcacggagctggactttgatagtaccgtagtcaatatgcgtaattgcacagtaggtctctgcgaagtacacaatatcgtctcggcatttcttccattctgcaactatttcacgagtcaactgcattttaatatttgctcgtttaaggtttggcaatcccatatagcgggtgcgcttattatttttgtccttaaacgtttggaaatgagctgggtcttcaccttgcaaacgaattttaactatcccatgcaacttaagatagtcttcaaatttctcaggataccacttatcatcccattgcgatttaaagaaacgaactccgttttcgattttcgtttccatttcagacgggtgacgaataaccgtcagtttcccgtcatttaaaggatgggcatcactcagaacgttaaacggttgagtctgttccatttactattttctctcgagcttcttgtgcttcataggcatcaccgaattcatccatcatatcagcggtagaccctacaaagactgttgcgttttgaatattcattccttgttgaggattagctccttttccagtactaacctgctcagaagtaatgtctttcatttctttatgaagcttaagaatttctttgttggttgtagtcatctgacccataagagttgcaaatacttccatatgtctaggagagtcagcattcttagcagtttccaaaaatattttagctgcgtccattaacatttgttgctggaagtgcatgttcttgcgaacgaccgaatagtcatcttcgaggtcaggtttacggtcatttggattagatttaacttcaactaattcaagtttttcataaactggaatttcttgtccttctattccaggaattccttcgatgtctaataatttagccatatctaattgtaattcactcatttttcacctctcggtccaggagcctccggatttaccggaataggaatatcgtgagaataagtttgtttactagaaccatcccaattttcgtgttgaacatctcgtggagtgacttcgctatctactgattcaaagtttccttctggagttagctctttgctgttagcgaagaaatctaaataaatggttctaatttcgccgtcaacctcggcaacaggaggatataaccatccattgacttcaaacatcagcgaccattctaatctacgacgagtgatattatctccatcaacagcttcatccggagaaaatgactgtaatacaattctaacatcacgattaaagcttgtgtctttgtcgtaaagttcagttatagtcgtgttaaaatgcggctgaaaataaggaacgatttgctcgatgatttgatacatatcatcttgattgcgtgtataaattcccaattcaaaaatcatcttaatcggagtaggattatactgagatgtaatttttgaaggggttttatatgatttggttctattcaactgtgatgttttatacatcgcgttgtattgcatatcaaccaagtgcaaattcattcttggcaaaacagtttctatctttgctttattctcggtagactggatagcagtccattttccgagttgagaaaggaacttttcctttgaagcataagtgataggtactttaatatattttagtccagtgtcttcacgccaacgagcaatttgtacatgagaaaataaatctccaagcaatacaatgtatcggcgtaaggacgaattataccaatgtccaaacatgatttctcctaagggacccaaaggtcccatctttattttatttattcaaaaaatccgtcatcaaacgaatctgctttaggaggagactcaagtcctcttccgttattaacataatacggatgaacatattcagaggcttctttattaattgcatcgctttctgcgtattgtacgtcagaaatatcagcaagagaatcaatgtttttgattggttctaaatcaagttcagagaactcaggaatgataattccttcattgcgctgcaattctggttgaagctgctcaccggaataaatgtatttctgcgcagtaatcttacgttgaacattttgacctaactgataaaatggatcatatggttgaacccaattaatttcaaacagcgaattatccatcgggaaataaatcaggtcacctgcctttggttctgaattattggtttgatgcttgaacaaattaggattaatagtcaaattgacttcatcattaaccatcataccaaatttactgaagaacgtgttatcaccagaataaccgtcaaaagagtctaagtaagcagcaaatttccaagccttggtgaatttacttgatgggtcttctccgaaaagcaaatccggattgttatattcgcgaggaaggaaataaaactcaattcctctcatttgaatagcctcagctgataaaacatctgctaacgtttggctatttctgtgattataaaaattcacataaggattgagaatttctgtctcattagttttattgtatcctcggtaatcctcaaggcgagcgaataaactagaattaaatgtagtcatcttttaccccaacagaataggacaacccgggtcaagtaaatcaagttcctctcggagcctctcgatttcttcttgggcctctactttaagtgtttggccatcaactgtaacgccgccggctaattgtagcccttggtgtttaaacagaatttcaccccacaactttttagtcagtgctgtagcataatcttttacccaacgattattataagcaccttctctatttgtattaccttcacctgcatattggccgttattgcgaaggttaggattctgatacctatctcctaagccccaatggtcggaagtttgttcaccagcgaagccgtaacctgcagtattacctaccatcatgtcggtattcataaatgatttagtccagcattcgcaaacaatgatgtcccccttcatgaagttgcccattactttaagcatttcattatcagagttataccaatagtctggaagtggggcaagcaaatcctgcatcattgaccaataagtcattaattgagtaaaatagcccaggtcagcaccgaaagcgtttggtccataactcttattacagcttgaccccattccgccattaattccggccattcccattaaaaagtcagtaaaccacggataggtagcattaccatccattgaagttaatgaacctacatttgttctaacgatttgagtgacagcaaatacattacgaccacgcaaatcaaacacaccatttaaaaatcttgcgttgtcagcttcatcttttccaatataaaaaacttgatagcctttattcaatccgttaaagtggtattcaccatacaactctaatgctcgttgaatacaatcataaatttggtcttcagttacttcgacattaattaccggcgctcctagacgtcgaagtatagcgtctttaagcgtttttgggttgtatgtgttgtatgacatataagctcctctttatattctatttatacgaaaaagggacccgaaggtccctttcattatactgctggatgaatagtaatatccaatgatttaatactaacaggaacttttgattcttctgaagcagctctatacacaattttgattgcatcgccagacgaaaacttaataagtttcttggttttcaacagttgctcgccggttactgctttaacacctaggctataagtaaacacctcaatgttattgacgagaataacaatttggacagctttatctgaatcagaagcttcgataactgtatcagtttctacacaaaatacgccatcgtcatcaacaataatatcatcaacaatacgaatgccagcattaaatgaagcagcgaccaatgagttaggatttaccaatgcatcagaacttaaatcaacagtgaaatcttctttactgaattcacctattgatgaaggcttcttaaaccattcgccccgtttacggaggtatgctccagtctgttctacgtcagtaactgcagtcacgaatttatcttgcaattctactacagtagcgtatacaccatcccgttgaactggattttctgacgaaaagtcaccattcatttgagtctgtaacgtaaatacagaaccttttaacccttcgctgttattgccaagttctacttgaatgtcctggatagcagactgctgagagttttgcatcccttcaacattggtcattctcgctaaaattgaccccggaggaatcggctgtccgccaggaacaataccaacttgctgatttatccatgctacttgaccctgaagccctgatgaagtatcacgtcctacaacatcagaaatgtacccttggtcagttgaaagagaactaatttttccttcaatagtatcaggcttatcagaagaccccaaacgagcatcaatattattgacacgaggaactaacccggtttgtgcagagttaagtgttgcgtcaactatacgataatcgttttctaatctagtagtacgagctccaatttttactggattggtaaaatcaatggcttggttaatagcaaagatttcattattagctgcggaaatagcatcagcgttattcacaagccttgcataaattgaagctgacgtagctccggatttaggaccaacttctttacgcaggtcgtttacttcaatagtcagagaacctacgtctgaatcattgtatgcatcctctagcgcctgaatacgctcgtcatgttttactatagctgacgcattgttgatgattcggtatttcataccagaacccggagcgtcttgcttaggctgtccgttaacatcttgcccaggatacgcaccaatttcacgtttaacccaaactatattatcacgaactgttctgtaataatcatctttactagaatcataaacacctacatcctcttcgagaaaatcaaggtcagttcgaagtttttcggtgtcttcttctaatttaagaatttgtccatcatgcttttcaatattctttttattgatataaacctgctcaatggcgtcagaagaacctgtaatttctaacgattttttgatttggtctacatctacttgaatattttctacagcagttccaacgttgttcaaatcgttatgtacctgaaccacatttttctgaatctgcacagaagctctattcagttctccatcatttccatagcgggttgaagccccattaagaggctctgtattttttatccagttaattctctgttgaaaatcgtctggaattccgtctacaaacggaagcgagtctactaattttgtcatataattccctatcggttggtgcaaaacgttaatgacgctgaataattatcgccacggatattttcaaatggctcaatttgaactctggcgttaggaggaacatcatttataatatatgagcctgtagcatatccttcaaatctccacgaatgaccatttctaccgcccttggtattctctatattgagtgtatgttctcctctattttccccgttgacagttattctaaatctccaaattctattgtcatagccgtcgttattacgttggaattttattgtgagagtcagcgccaatctagaagtggcttcatatggagaattacacccaaaccagtttccagcaggaatataagttccaccttctacccaagtaatattaccgacacgcgttccagctggcatatatcttccatccgactcagggcgtgtataacaattgatatcgttattggtaattgttatatcgttatcaagggtttttccatttattttgcgagttttaaagacagcatcagtcgcagctgcagcaagtgaagcatctgatgttggagaacctgataatcgggttaatccatatttatccttggttgattttaacgcttgtagactttttggagtaacagccaaattgttagaagtagctgaagccacatctgagtctttagcaaattttactataccaaatacgctgtcagacgcttttgatgccatgaaggtttttggagttactgcgtatccatcgtgaacagcacctgctgctacctgggcttgggttgcgacacgaactaatcccaagttgctttctgttgcagaagtataagtaggaggattaacgctgaactttccaatcatttctacaacacgcttaggagttactgcggtggtttcatcagttcctgcttgagcttgagcggcagtcgttaacctaacagttccatctacgttttcttgggcttttacggttttaaacacatggccaagagcagcagctgtaatagttctatttcctgcggttaatgctgcggcttcagtattagttgcgtatcgggttaagccaagaattgcggtagttgcttcaggccgggtaattgtggattttaatgtagctggggtaaccgcagcattacctacagttccagcttcaacttcggcctgcgtagctgtacgaattatacctgctacggttggagatgctgcaggtaatccaatgtcagttcttgcccagcttccaatcaacgctagcgctgattggacgtcttttgtagcaactggccattgtgtatttgctgggtcaaatatcgtatatttggccaaatcactgtagtgattatagttattctgggccattatcccatccttctaaaatagtggaatgtaaatgtgtttgcaccgaaggttttagtttcgttaccaatagcgtcccattgtccataacccgctttagcaggtgaagtaacagtaaactcaacagttaaaccatattttttatatgtttcaaaattatggttctgataatccagatgaataatatcaacatactgaggagttgcaggtgattgagtaacttgttgaaccacttttccaactgcttctaattcttttaccttatcataccacctggtagctactgctgcaaagtcatcaccattcgcaattctaattggcaatccaagaatgtgaattattactgggtcgccaacagaaccgtcttctttaggttctaacgaaactacgcctgaaaaagtagcgcgtgtaatttgctgtgctggttgtggagatattccggtgtcattacaaataatagttccaatttctgctgactgtaatgacattaaatcattaatagcagcttcagtgtttggataccaaacacctaaatccatttgttcaaaggttaggctccctataggagccttatttcctaccgcaatattctgcgggtctacgcgatattctgaaaaggcagttaatcttgaattaactttagccccttcacgagttttagtttcaatcgtcattttaacctaccctaatccaacgataaacggtgattgttggctgaattttagtgatgtcatttggaactacaccgttgtttaccgcaacagtgtcttcacggtatttagaataacctggaccttgtgcgtctgggtctaattgacatccgccaataactacgctgccatgttcagggtctgaaattagaactttgtctcttgacattaactcaggaatgtgttcttttcctaatgtaaacgtcaaatctccaaccgttccacctgctgttaatgatggctgaccattttcgtttaagttattgttgttacgcgaaaaataaggatcagatgaatcattattccaaccagcagtaacacggccttgtgaataaagcttccacaccccaaatcccatatagtcagcagggtttgcgtggttgtgagcgttttcataaatcgtgccaatcggataaattacgtcaaaaaatgctgcaatattattgactttaatcataatatcgtcagcaaccggacgcatatttttctgattaggttcatcataatttgtgtattcaatgcgattttttagagttactaattgctcagcattcatatacacttggtcggtttctgccatgatatcgtcaatatccatagtagtaccgatgttattattgaaccaacggacggtaagaaggtctttatcttcaaacgcctcaccaaaaataatagcttcgacgttagtaccagttgagtcaaattccagtctatagtcttggttagaatttacccattgaccaccattgtttatacagtcttctgcatatccaccttccgcgccttcacaataaaataaaggaagacctgcagttccagcttcgagtaattcctttccgttcaatgaaatttcaagcgagttaggatttacccctacgcccggaagtacacccatgtcatccagagtgattctgcggagagtagtaaggttatctactatcattgacccaggaatcgtctgggatgtagtctgggctgaatctcgtatctggatagccaacttgttgtatgaagaccgataaacaccaattccatctaggaaggtttcaaatgttattacttccccttcaacacatggaacttttaaacgaatgtctttaccgtttaattctaccaattgacctgctactgttccaggagaaccgtaatcagcattggctttatccataacgctggtttcaccgtaatataaaatattaccacgacgatatacattaagcgagtcttcgttatattctacgccatcaaaaatgttaagaaagtcagtctgacccgcagcagcaataattgattttttcgctacagtacttaagttaccgttagttagcttatctaccgttttattttcaatatattcccagcggccaggggcgcaataaaccaattccaaatcttggaagttagtattgaaaattttaggagaagctgaaccttttaatgtatcgccttgagcaggaataactgtgattgggcttaatcgccaggttgaccaaacatcacgaagtttaataactttgttatagtcgttggctgtaccctttggaagctgaacgttaactcttgctgcctgggtattaatagcaaaggcctgaccaaacttagcatttaaagtagttccagtagggctagctttaaaagttttccatgcacctgctgcaaatggaactgaaccatcacctaactctgaatataaatcatcaaagttgttattaattttaagaccacctttacggaggtaatcaccagacccatcatctacagattggcctactatcaaattttgtttcattattgagatacccctacggtctgtgtagcaataactttaactgccaaacgtgcgtttccataagatgttgaagctgtgcatattaaatctttctgcgcgttaatagagtatgaaatagaatacatcttttcattttcagatgattcaccgcttcttaacactgcatattcagtgtcaaatactcttccgtttggcgctgatgaagtaatagtcgggtcaatcataagcatgacttcagatgattgccttttgatggtttgaccacctggatttgcgctgaagcttaataacaatttaacagtagagtaatcatcgttatatccaagccgaatattaataggagaacttgttaaattatatgtagcttctaacggtgaatatgtgctgccaaacatacttgaaattgaataatcccaaactgcagcaccgttagctttgacttcaacacaccacaattcaattctacatcttggtgtgttgataatcaattctcgcgatccgtctttaaatgcatctgctacaccttcgccgtttgttgttatttttatggatctagcttttgatgctgagccattactatttacaacgaatacagcttctcccgctttaccttttgaaagacgaatttgaactgccccttctgagcaatcagcatctatgcatgaacccatcggaactgtaccggccgagttagcatcaccaaattttatcttttgataataacttgttgcgtggattttttggtttaaagctccaccaccggctgcaaataatcgttgatcagcgaaggcgttataaatggcgtcgaagttatcattaattttcacaccgccatcatacagaatgtcgccggtagaagcattaccaatctcaccgacgtcaattatttttttacccttatctgtatacataggttaacctcatatcaaagtatagtcttatttatataaaaatggggagccaaaggctccccataattaaaactcgaaaattaaatttaactcttctgtttggtccattgaacgtataataggttgtcgattttccatgtaaatcatttcacctgactgtctttcaagaccagaagcgctataccaacctttttcagccttaacgttaggagaatttggcattggcttaacttcaagcggattagttataattgacaactgcctaaacccagtatttcccggaagactaaactccggaaaataaattgcatcaaggtatgctttaaatctaatcgtattacacttcatacgatagattaggttaaagtcgttttgttgccaagttaagttgttttgaaatccccaacgagctggagattcttcaatctcttctggccaaggaactacgatatattcatttgtacatctgttaattgatacgtcggctggaatttcatatagatattcccaaagatatccatcgcccaaatcgacagtaccatttgcatcaccacgcccacgaggcgctgaaccggaaatagttgatggcgtccatttacccccaagcttaatacattcttctttgcttgtaagattaccaattgaacacattccattctttggaacatcaatacatctatataccatccatccaaatccagcatcagttctgttatatggcgcagagttagcaacaacgatatcgccgattaaaaatgtgcgtggattaggatatcttgtatctccccagtctcttcttggaacaacacagtcaagcatagatgattcaattttgactgcacccatcatatttgtccaaatatcaaccacaccgtcttcattatcggccgggtatggaggtgcaaacccaggttcagattcgttatctgaccacggagtgcttttaccaaatgaaacatacaacgtgttttggtccgttcccggaccaattgatttataaaatgtgtacatcttttcagttctaaacttagatgtaatgatagcacgataaatcgtgctacgcgttgaacttgctcttgttgaattactcatcaatttttacctgtgtcggattttcaggatcgcgaggattacctgcatcgtctttaagacgttggttaactaaatcgcgataattagcaaacgttactgctgattggtcaaacgtaggacttaacggcttacgtcgttgtccagggttttgtccagcgataacactattgttattttcttgattatagttagcaggtaacgggaaaggttcaccagcttgagcacgtgaagaatacctaggctcattggttattgggtctctttctattgtatcatctgaagcgataatagcaactctatcaggataaactgatggcagtcctgcatcccatttatagttcttgagtttatttatgatagtctcaacatgcttcatatttaagccactattgataaacattgtcagcaatgttataccaatgaaaccgaaacctaccggatgaacaaaccttaatacatcgtcgcggaaccgagaagtaggaagctgagacttaattttcataacatagtaagaacggctgcggtttatataatcaatgttattactcagcatatcctttccacgaacaccttgaactataataccctcaaagtccgtacgctctgatttaatttcctggccttcaatgaaccgtcctgataagttatgaatagtaatacgccataacagacgaccatcccggtattctctctcgatataagtcacattactacgaccggaagcagtataaatcgtacgaccaactaaatcgtcagaaatatttgtactttcaacaataatgtcatattcggtagtgttctttgactcaatatcgatttcgacgtcttcgttataaagaagtttaaacaggaacttatatgagtcttcaattcctttagtagcatagaaatcattcttgcgtgcttcaaagaaacggacgacagcgtcacgagcgtctttactcagataaatgttgcgtttataaacttctgaccacagatattcccatgcattttcttcgcgaggatatttgttcttaacaagattaacgagactgttgtaatgtgttccatttccatctgaaaggaattggagatagtacttacaaaagtgttcaaaattactatcttgtagcaagtaactatccggcatcattttagtaagatacggacgtaaatccgggtcacgcaagcctggagtatgttcaggagtccaatcttcttcacgggtttggttctgcagaaacgccttaaacattacatcagttggtttccagttaagcgttacctggtcacgaacacgataatcgaatgcataataacctatcagctttccatctggctcgtgaaacatgataccagaagcatactgcaaaaatccgttaaatgaaaccggagggcaataaaacgttgcgtcgcctttatcccacacttccgaaagaatgcgctcggtagttccctgtgctgctgtatctactcttttttgataaagaatatcattataaatgacaactgcatggtcagctgtacttatccagcatctgttgccttcacgagccatccagacaaaccaaggttcagcataaaacctcatcggtccaggaacaaatgtttcccatcttgaaaattcatctgctctgaaactcatcatgtgataatgcttatcagagtgatactgaattgggttaacatttttaactgcggtagaaattagttctggatatttcgtctcaagctcaatatcctgagcgtactctgttgtcttaaaattggctgatgaaaagaatatttcctttccgtcagttgacatagaagtccataaatgctctatacgacgtttttcttcatcggtattaccaaatacacgcttccaagtatttgtgccttcctggtaaacatagacgcctttagttgcagaatccacaacgttccttgggtctgttgggtctaatcctaaggttttaacttccccggtaataagggcaaagattttgcccccaacggaatccattttaaagcatacagatttaggattgcctgttatatgagatacttccttttcaaataccttttcaccaaatgtcgggcttaaagggtcagtatctattggagcatcttttaatttaactttacggacagtgtcttttgcaacaacatacaaatagtcgtcattgcaggtaaacgcttcagcatatttggtaacgtcagcaggcaatgatgcatacgttccgaataactctacttcaaagccaagctttaactggtctcccaatttagcaaatgtaacttcgttatcgctaaacttaacttcattcgatgaccaacgtacgtcagatgatttccttccgtaaaagattttatcatatcctaaaacataagaagtagttttagattgataaattaccactctagaaaccggatttccgacacggtcattaaataactgaacgtattgccaattctgtcctttatcatttgatactttaaccatatgttggaatctttcaaacagatacaaaattccgtctatttctcccagcatagttctatttttatcaacacacactgcttcaataggtccctgaatttcatgatatccagattcacctacaacgaagttttcaatagctgataaatgagaatattcaggactaaactgaaaagactcagtcatcaaagatgccatcatggcagatgtgttgaagttaacatacgacatgttgtttaaagaaaacttctgtttaatgaattctttcactaaactgaattcttgcatatgctcaaatgtgtatgcgttttcttcaaaagtttggaactcttctgtttcaacccattcagacggctcaaaccctgctgacgtagtttgaacacgcattttataataagtaagcggttcaatacgattttgttcgaaccaatcattatccgcggtataacccagtgaagaccaactcaagttatcagcggggataacttcccccgctctgtttcgagtttcggccagttctacaaaatagtagaagtttgcaccaacgtcatcccaacgaatattgacctgattcgcagatagcttatgaattcgtaagctggtgacgaacggtgcaattgtcattgagtaataggctccaatttaatagttgtgtattgaggacgaaggtcattctcaaatacgataagtgttccatcgcgggcgaagacgatatcctgggtaggagtagaataaagctcaatactctggtcttcaaactgaagaggatcggctccaatagctccaaggctccagtaaatattatcaccataataatctacttcaccgattttgtaccaacgagttctttctccattagtagttctatcaaaatcgtcttcagtatatggctgaatatgagtattctctttaatatcacctggtttaaatggtccaatgaccatatttcctttaccatttttatctgggtcagttccaacgatattaactggatatgaatctgcagttggagtgacagtaaagaccaaatcaccagaacgtaacgtccgcggagtaatagtattatagtatttaatacctgcgctaggaagagtgaaatagttgacaatttcacgaaccatctgaatatcaacagaagaaccgatgattgaatggtcagtatcatcaatataggtcaataatttagatttactgaaatttttgttaaacatttcaacttcatcaacgtaatatctattaattgagtctataatttttgactgtaaccactgctcagattcttgtaacttattcagcgcataagaagctttaatattatgacgaatgaataagtaatctgggctcattaccgaaggagtaattggagcaagacagaaaggttttagataatcctgaatgtcttctcgttgaacagcagttaactgcaacccagattttggtttaattgcgataaatgcatatccgggtttgtcctgatcagtaaagcattgtactgcttgtacgatagaaccaaagcgtgaactaacgaatgattcatagtcagttttagacacgcatcgcatctgagattcgcgcttaatctgggcgagctcacgaatacgctcgatgtcttcaggttcaccaccgccatcagctccaacataatcaggagaatctgaccagttttcaatgattttgtttactacgatatattgcagagtatcagcatagctgaaatcagttgcgccattcgcagattcaccatcagtacgaatatattcaataactacctgcgcgcccttagtaggttttaatccaccaatgaaattactttcaagaactcctcctgctacagaggcttctgccacgccttcaccaaagaagaattcggtatttccgtcgacagtttcacgcatataataaattgttgaaatggatgaagcatgaaccattgacctgtctgtccagttagtccattcagcgccatcaacccacagcttaacctgcttacggtcaatcgactgatcacgaataacaataggtttcttcgggtcatatgacaattgagtacgaataatacgtccttgtgccaaattgacaataggaagatacctattaactccttctggtgctgaagtatctcttaaagcaataacattttcggtaacaacaaagttgtatgggtctactgatgaatctcgtgcatatgctaaaaacttggttccacgaggtatttttattgctggctctggatttggatgagttacctcaagcataatagatgcagtagccgctgatttggaacttggcaaatacccgttttgctgagctgcttgaacaacggaacttctcaagttagctgttccaataaagctttcgtataaagcagtattactaaattgctgtatgtaaagcgtgttatatgctaataaatctaatagcacatttaagcgcgaacccgcaaaatcaaaatcttggaactctttttgaccactaagccagttaataagctgatttttaatttcgtcgaatgttgctccagtaaatgcgtctgggatagcgtttgcagtacgcgttaactgataatttaaaggttctttaatagccattagtgtatgaatacctttgagcttgattgcgcgacagtgtcgccgcaagaaattggatcggccatttgaacagcttttttgcctgttacaaataccttggatgtgcgaggttgaacaactcctccatgcgtatcatgagggtcaaccgtcttggtgtgtggggtaattgagtcgccatcaactaataccgctattccaccagtgaatactttactttgtgtagcatttacttctgtcggaggatacgcactatgcccggcagttaagcatttattaaatgatagtccagccatttagttccccgcatatacataagcacgaagctggtcgccccatctactccagttgcctttaactgtttgagagtaaatcttttgctttttatgttctgttatgattggagcactagaacctccggatgaacctccagacgattcttctgtcactgtatatattatctcaactgtataggtaaatgtcttctctagtgttctgggggctttccacaggtataaatcagcagttttgggattaggtaaatcctcccacgctgaagcggacttcagctcatcgccttcacggtatttaagcacatcgtttccaaaagtaaaaactgagttataattacctttataataggtttcagacacagagatatcagatactggttgatagtcgataatatttattgattttaatgtttcgttggtagataattgagcagtaaagtactgctcaacgtattcaccttctattacttcgcgtaacgtggtattaataggaagtatatcagccatgattaacctacatcaattcgtgaaccatcaacagtgtattgaccttgggcgattgagctcatagaagccattgtctcagtccaagccccgccaacattccaattcacagtacctgctacttgccaagttaagttaccaccgacggttacgtcgtggttgccatctactttagtagtggcatcaccgttgacttggatatcagcatttccttcaacgactatcttaatgttacccttgacaaaaatagtaccatcgccttcaatagttttagtttcatttccacgtacataaagcgtgttatcgccatcaatttgctgtcgacgattatacatgttataataggtctcgttccctccaacgttaaccttcttatccccagagattaaaatatttccatcaccctgagtcatgtcatataaatcggctacagtttttctggtacggcgtccatcgggagctacttcttcgtatgaacctgttgggtgaacaatacgatagcgttcatagccaggtgtatcatcaaactcttggatatgacctgattctgtttccattgtgtgaacatatggatactgaccattatatgaagactcaggttctttgaaaagaattcttgaatcttccggagtccatgggtcttcaggattacctccagactttggttctacgtaagcagcagacaggttttttccttctggctttggagcaggaactccatatgattccatattacccgttagaataatcatggaaacacgagaagcacgaccttttgtctgattaaaccaaacagagtttcttgcttctgtataagcggttttccaatcaccaatgagcatggcatcaagcattttaccaaattttgctaaaccacctacacccatttgaaaactcatattttctaaagccatttgccttgatttgttgactttagcatatacaggtcctacacgtgaattcgttttaatatcagaaagcattttatcgcggtcttgcttaaataacgcgactgcttcgtccattgtaatgataccgggatttcccgtaacagtacgaccaacctgattagataaagttttattaatgacagacatatcacgtactttttgcgccatgataagatgcccaatacctatagtaggatatccttctgtgtcccaatagaccttcaatctaagaccttcatccctattaagcatatctgttattgtaattgcaggatttgggtcttcaggaatatcacttaagtcagcatcatcaggattaatgccaatgtctaaatttctgtcctgaatgatatttggtatagcactatacccagtttcatcgccttgaactagtgggttggtatctgacccgacctgtctaggatattggcctgtaggatcagaaaagccttccgtgtagtttggcttcgtttttctatgcgcagaatatgttcctattactagtcctgctgttttgaattcatcaagccataacccaaacactgatgttccttctaccattccggttatagatgagccaactccagaaatcccagctgagttggtaggctgaatcactgacatccagggaaggtcttcagtaggaagacctgttatagctccttgcaccttttcaaatgggtgaagcccataaacacgtactcgcactcttccttgtttcaacgggtcttgtctgtcttcaacaacaccggtaaaccatttcaacgaatcattcatttcaatcatacaacttctccaattgtggtctgggatttatatcgacctgattcatattcactgtcaggagccttttccatttctcgtataatatcagaaagaaatgcttcaatatcactaggattgataatgtttatttggcgcagtttttcattttctataatagagtcttcataaatgtcaacaccagctaaagccccagtatattgagggtactgatgattaaagtcccctttatcataccaaatgcctgaattttcaggatattgctcgaggttataataacgattgccgtttgcatccacgtgatagagtatttggtctccacctacatctgcatatttttgttgtgcaaattgatagcatgcatcctgggttttaatccaatctctaaacgggtcatatacgttattacacattaaaagaatccagtacaactgactatttccataaagaatatatgctaattcttctggtctaggagctccacttatgtaatatgtttgtaaaagatagttttctgctacagtgtcgaaatatttgcgataattacgaaatatgtcagcggttgggatagcttttgccttagcaccttttacggtctttgcagaataatctatcggactaaaaaatgagaagagcatagtttatcctcttataaatattaataacagtatttataaagttgtagtgtacatgacgagtggtttatgatattattaccctactaactacttaggagaatagcatgaattaccgtaaaatttatgaccaactaattgcaagaggcaaatcccgcaatttagaagggtacaaagaacggcatcacattgtgccacgatgcatgggtggaagtgatgataaagataaccttgtggacttaacagcagctgagcattatgtggcgcatcagcttttagctaagatttatccaaataatcataagttatcatatgcagttcatataatgtcttctaaattagcaggaagaaataacaaatcatatgaatggattcgcaaaagggtttctattgctaactctgccgtattaacaggaaagaagcgaagtccaaggtcaaaggagtggtcagctaaactgtctgcagctcttactggaaagtctcagacgctagaatcaaatgaaaagcgcagtatttctatgacaggtatttcaaaaagtgataccatgaagaaaaatatgtctactgcagccaaaaatagaactaaagagcaccaaactaaattaaatttagctaacaccggaaagaagagatcagaagaaacacgagcaaagcttagagctgtttcagaattgcagcctatagtaacatgtcctcactgtggtaaatcaggaaaacctcgtggaatgaagtgctggcattttgataaatgtaaggagaagcctaatggcttatagcggaaaatttttaccaaaaaacataagtaaatataagggggaccctcgtaagatcacatatcgatctacttgggagcaatttcatgatgcggtggttagataatcacccagacgtagtccaatggaattcagagtgcgtggtaattccatactttagtaatgcagatggaaagaaacgccggtatttcatggatttctgggctaagttttctaatggtcaacagttcttttttgaagttaagccaaagaaagaaactagacctccggtcaaacccacaaagttgacgacatcagcgaagaaacggtacattgatgaaatttacacttggtctgtaaacgttgataagtggaaagcagctcaagctactgccagtaaaatgggtatagaatttaggttaattaccgaagattcacttaaaaaattaggatggaaaggctgatggctatatttgaatttatcactgaagctgcagaatcgcctaaagctaaatcccgtagtgaaaatcaatgggtagcattaggagttgaatactctgctgctcgtaaaaaaggcatgacgtctaaatcattcgctgaaagcaaaggaataaatcctgctacgttcagtaaagcaatggctcgtcatgcatcaagaattaaaacggcaattaaagtagcagaaattgagaaaaaacctgctaacaaaatgaccaaacaagagcgtgctcttgtgatggtaaattcatttcgaagctctatcaaagataaaattcgtaatgaaggcgcagcagtaaacaataaatctgctaaatggtttgcagaaactataaagaaaaatatacgtggtcattctgtaaccaagcctcaacctggaaagctatatgcttacatgtatgacgctaagcacaaagacactcttccattctgggataaatttcctttgatagtttatcttggtcttggaaagcaaggtacaaccacattgatgtatgggttaaaccttcactacattccgccaaaggctcgtcagcagtttttagaagaacttcttaaacagtatgctaatacgccagtgatatctaataagaccagattaaagataaactggagccaagttaaaggatttgctggcgctgacaaaatgattaaagcatatattcctggtaatataaagggtgctttaattgagataaaaccggctgattgggcgaatgtagtcatgttaccactgcagcagttcatgtcgaaaggcaaacgctactctgctacttctgtatggaaatcataatgtctactggactgtttaatcaaactaacacaactaactttatattagaggtccctgatgggggcctcacccaagcgtttaaagctaatcttcaaacagctgtagttcctggaattcatattcctgctactgatactgtaggttcgcctcaaggcatgcatcgtgctaaattgcctgggtctacttttgagtttgacgctgttcctgttagatttttagtagatgaaaatcttgattcatgggtacaaatgtacaaatggatgttaagctgtcaaaactacattgaccgagacaagtctggatggaataacggcggtgaaggatttcctggtgcagttttaatgcatgttcttgataacgataaacatgatatagtattaactgtccgctacatcggaggttgggtgagtgatttatctgaaattgagtattctttaaccgaagaatccgacccagcaatggtatgtgtagcaactttgcagtacaaatacattgaagttgaaaaagatggtataataattactggtagaccttctgtcaatgatactcgcgaatcccagtatcaacagaaagttatgggaatgcatccttctatgaggtaataatttgaagcttttatttttgattggtaaaaaacgtagtggcaaagatacaactgctgactacattatggataactataacgcaacaaagcatcagttagcaggtccaattaaagatgcgttggctgatgcaatgcttactgagtggtatcgcgatacatcacgtcagtttcctcgcattactcggtcaatgattgaaggtattgattacgatcgtgagcaggatttaaatctgtctactaaagacgtgattcgtattatggcgaatgctattgaatatgtccatcatgatttgcctttacctggggtggtttatgatagcaagcgtaaaattcttgacggcgatacgatggaagtcatccgtcaagttgtaataaataaacctgttgagccatggtcaattcgtcgtctcatgcagacccttgggactgacattgtctgtgataagctcgatcgcatgtattgggtgaaacgattcactttggttatggctgatacttttggtgattatgattatttcattgtcccagatacccgccaagaccatgaacttgatgtagccagggcgatgggtgctacagttattcatgtagttcgtcctgagcaagaaggttctaaaaaagatactcacgtcacagagcgtggacttccgattcgcgaaggcgatatcgtaataactaacgacggttctctagaagaactttattcaaaaatcaacactatattaggaattcaaaaatgactactgaacaactgcaagcccaagtcgatactttgaaagttcgtgtatttgacctgtctgaaaccatccaaggtctgtccgctctgcgtgcacagtatgaagaagtactacagaaactgattgctgtgtccggcgttgaaatcagtgaagacggtcaggttaaacttgatgacctggttgcaaaaatcgaagcacagttcgcagaagaaactactgaagaagctgatgcctaatgaacttcagtgattttagcactggtctatatgtagctgctaaattctctgagaaaactcttgatgctattgaggaccttcagcgtgagttgaaggtccctaatcctgtacctcgtcataagattcatacgacgatatgctattcaagagttcatgttccatacgtttgcgcttcaggaagttttgaagttgctacatcaggtaaacttgaagtatgggacacgcaagacggacgtacactagttcttaaactagattcagaatacttaaaattccgtcaccaatatgcaagagctctgggagcaactcacgatttcccagattactcaccgcacattactctcagctacaatgtcggtccagctcacttcgagggtgaagttcaagtacctgtagtgcttgatagagagtaccaagagccactaaaactgaactggtcagaagatttgaaatagaaatttatttcacaaagttgtttacaaccggtcctagtggtgatactatagctccatcaaaaacaaactaacaaaacggaagcaacatgaaaacgtaccaagaatttattacagaagctaaaagacaggatgatgaactgccgattgttacaaaaaccgttgacgggacattagccgattttaaaaaagttcctagtgataaactttctaaattgactggcagcatcggtgaaaaagatggtaaggtaactttttcagcccgaggttctgctaatcttaaaaagcttttaaaagccgctggcgctgaataaagttgtttacaacgggttgtagtagtgatactataaccctatcaacttgaggagaataaaatgaaacgttgtgaattaattagaaatgttgcatcaacaatctgcatgggagcattaggttttggcattataggtgcagcctttatgtctcttcctgaaacagtatcagtgttaagtgttgcatttctaatgggtatcatttctttcataatggataaaatagcacatgaaaaagattaagcagtggttcatcaaaaactatgatttaaaccgtgaagaagtaactaagtatgattatgttactttgggtgtaggactaggtgcactactggcagcactgcattcatcactacttgctattgcagtgcttcttattttggctcactacagctggaaacgtaagtaatgtacgcacttttaacttggtctaattattatcctgctcctggctctgaccaaatcagaggtgtctactctacggtagaagaatgctatgaagccctccagggaacgtatcaagactattttgagatactgaattcccgatttgagaccgttgctaaaggttcaactgaagcatacaaagattaattgtgaggaaattgtgatgaatatcagagctgcgtttaatactttctatcaagagaattataagcttcttgcccatgaatactatgatgcacaaggcgttccaattcctaatgatttagttacgcctaagcatgtcaaaactgattctcttgacaatgaaatccagcctggtgatttggtatcatactattgcggcgggtcactttctgcagcaagcgttggtattttgctaggatttacgcctaaaggttatcgtgtggttccgttccatacaagtccaattcctgagcaccgggtattgctctctcatatggattcaccgcatagggtattcctggttaaatcaaagagctcaccgattgtgtaatatgctttaggttttctttgttattattaatctatcaactgctctgattaattttagagcagtataaataaaattacccattggggagttagaccgtaggggtagcgggacagactgtaaatctgttgctcaaaaggctcgagtggttcgactccattactccccaccaaatttagggatactagctcagttggttagagcaccggacttttaatccgggtgtccgaagttcaaatcttcggtgtcccaccaattcgggtcgttggctgagagggtaagcgacggactgttaatccgtgtcagaaatgactaggcaggttcgatacctgcacggcccgccaaatgaagaagtcagaagacgttctgataaatcgtcggcatagaattccctgtgtacgagttccctcaacgataactacgtgcttataatttcttacggcgttgaaagttcgctttcagggatacatcttagaacagagtgctaaacaagattcatctggtaccaaggtgatgagagttctgttcccctttgcttcggcatcgtgccagagtatctctgaaagcgaattatggacctatagtttagttggttaaaatactcccctgtcacgggagagagcacgggttcgatccccgttaggtccgccaaataagaacgtggcagttcttgaagatgagtttgagtcctgtaagataatgccgaggacgaagctgtttgttcccacggaataagctctatattcgtaagattatatctttagcgtgttctacatcaagctacttgttagtacttcaagaacccggataaatgcggggtaacttcagttggtagaatgttgggctcatatcccgacacgcgcaggttcgagtcctgcctccgcctcttttgtttactttatccgtaccatgtgatataattatcacatagttggtatggagaataatttatgtactatttgatttataaaataaccaataacgtaaatggtaaatattatgttggagcccataaaactgatgacatcaatgatggctacatgggttcaggtgtattaattaaaaaggcaattctaaaatacggaattgagaactttaccaaggaagttattcattattgtgaatcatctgaggagatgtatttaaaggaatctgaaatagttacaccagaatttttattaggaaacgtatataatttaaaacttggtggcgaaggtggatttgactatgttaactcaacatattggactccgtcaaaaatgaaagcaagaggaatacttggaggaaattcaaccagtaataaaattagaaatgattctaaatttaaactgaatttttcggataagattaaatctggaattacaccagatgcacgttcccgcattgcagacgcagttaaagctaatatagctaaaaatggaaatccgtttttaggtaaaacacactcttctgaaactaaacgaaaaatttctgataaactgaaactagctcaatccggttcaaaaaattcacaatttggcacaatgtggattaataatggaatagaagctaaaaagatttcaaaagattcccctataccagaaggatggtataaaggaagaaaattagtaaataaataattggactatagacaagcggttaagtcaccggcctttgactccggtatctctggttcgaatccagatagtccagccaaattaatattcattcaacgcgtctacaggggttgaactgatcattcttctcttaatttcgtatgaagtcctcatgatggatggagtgaatattgatgtggccgtagttcagttggtagaactcgagattgtgattctcgtagtcatgggttcaactcccatcggtcaccccaacaatgaaggaatggtggaaaaatacacggtccgcaaaacgctgtggctgtcgctaagcgaattgtgtctatatgacacttccttcaccaattaatggagagtagcgctagtggtagcaaaccggacttgaaatccgggccatcggaaacggtgagggttcaactcctttactctccgccaaatttatgaaagttaaacgctgcccatagcagtggtacatcaacaatcagatgattagctttccatgggagtatagctcatttggtagagctctcgaccgataatcgagcggtgactggttcgagtccagttactcccaccaaataacaggttcttagtataacggctattatgctgggctccaaacccagtgatgagggttcgattccttcagggcctgccaaatttgcatccatcgtataacggctattataggtgacttccactcacttgataagggttcgattccctttggatgctccaaattactccgtatagctcagtctggtagagcgctccatttgggatggagaggtcgaatgttcgagtcattctatggagaccaaattaacggtatgacacaatacaagatggcgtaagctgagtagcgggattgcagtctcgttcagatatgctatcgagtatgggtgatatattaaacacatggattctgcaaagtcaatgtgactcggttcgaggccgggcataccgtccaatcgcttgccattgagaattatattatgaaatattacggcttcaaaacatcccatttcgggaaagcatatcgtacagaaaacattgatagacgccgagcatattacgaatcactgcataaagcaggacgttctcgtgcacgacaagaaggccaaaaacaagcgaaggaaatagaatgaatatttttattggtgttgcgaataaagtaaatgctattacggtgaaattacaatggaatcgtccaactaattttgctttaggattatgtaaatctgaacgtgatttaatgcttcatgctgattttgcatatacttttgatgaacgcaaaggtatgtgggtctggattaaatgcagatacgaagcattaatcaaatatgagtacttcagtgagcgtgatattcaagaagttattgcttatcattctggctgtaaagtaagtaaactgcgtcaagttattccgtttactaatgcttcaaatgtagaagagctaattactgattttaaacgaatttatcaggcgaaatatgatgaaagattctaaaggtcgagacgtacaagttggcgatatcgttttctacggagaacgtacatataataaaggtggtcgtggttctatgcgctgcggtcgtattactgatattgcttcaggattggctaaagtagataacgactacgttgcaatgcgaagcaaatcattcgttaaggtttctcctatgttcgcaacaatgtgggaaaacggaacgattttcgagatttaatgctacaagaataacctgttattattactacatcaaaacaaacaaggaaaaagaatgaaacgtatcgcactgattgttgaccaagaagctatgttcgctgctaccggcaaattccatccggtgagtaaatttgttgctcgcagcgagaaaatcgttggtctggtagaaactgtcgcaggtgatgtaattgtttctattaaaacgtctgaaatttcgccggtggttaaagtagcagttgaaaatgacttctgggaagtagctgattttatgtgtgagtaattctgcctagcaggtggataagcccgacaaggcgccctcttcggagggcttttataaaagtcataagatttctataaaggccctgtagctcaattggtagagcgttcccctcataagggattggttgcatgttcgagtctttgccagggtcaccaaattatcaactgaggaaattgaaatgcatattaaatttggacaagttattcctaaaggcttagcaatggcaattaccacttgggaaaatgatgccgatcggtattctacccaaatggtttatggcttagaaaaagaagagattaatcaagtaattcacgttcttgaatggttctcttctaatggtcgccgcggtgaataccttggaaataatgattacaaccatgaagcaattcttgaaaagcttcatactgaacagaagtatgtaactcctgaattttccaagaaattctttggtgttgatgttcctgcatatgattgctcagacgaagagtttgatgcttatttagataatcattattcttgttcaaatgaagttatgtatgctattcaggcttggctaggtaatccaattgaatatgactatgatttcatgcgagtatttgagaaagtagaaatctttgacattaaagaagaaattcgtattcctgatgctccggttgcattccatattggaattacgtataagcagaaagaaagcccattaaaagttgattggttgaaatacgtgaaggaaaagtaatggatattggttcaggtagttcatatccatcatgtgctttgagtaattttgctcctcataaatttatctatgatggcgtagaatgtgcctcaatggagggattcttgcagtccctcaaattttcttcgcctgaaatgcaagcacatgtatgtacattagttggtaaatcggctaagttcaaaggtaaaaagaaacggtggtggccaactcaaacactttattggaaaggtgttcctattcaccgtgcctcagaagcgtatcagaatttactaacaggagcatacgatgcacttagtaaaaatgaaggattcagaaaagctttggctgctacccggaatgctacgctcactcacagtatgggtaaaaataaaatttctgaaacgattttgactgaacgcgaattctgtaatcaactttatcgtttaagaaatgctataaataatcagtaatataattatcttgttcagtgttgaaatcggtagacatggtgacggacaccttttgagctcgcatattgcatcatatgctggcgacggtggtaaatcgctgacggaatcagtcgtgcaggttcaagtcctgcctgaacaatctcggggcatagctcagctggatagagcagcggacttctaatccgcaggtcgaaggttcgaatccttctgcctcgaccatttcgcatcgatggtggaactggtatacacaggagacttaaaatctcccgccgcgaggattgagggttcgaatccctctcggtgcaccaaattatgaagaatgtctcagtcgtgagaggatcaatggtgaaaagccatggtgttcctgctgcaagccttaagtggacagaacagccaacctagtgacgtaggtaattcttcaccaaatatgccgatttagctcagttggtagagcgcttcacttgtaatgaagatgccgcgggttcgactcctgcaatcggcaccaaattctggtatgtgatagctcaaataggtagagcgtgaggccctggtgctgaatggcttgtaggttcgattcctacccataccaaaaattaatgaggaaaatatgaaagtatatgctgtagtaaaaaataactggaactgtgaatatggctatgaagaatattctttgcctcttaagatttttcacactaaatccgaagcaacatcatatgcggaagaacttgaagcaaacgattcctattatcagtatctagttgaagaatacgatgtaatgtaattcgaagggaaacttgcgtataccctcgttgagtcgtcagatagaagagaatggttcgtccattgccgctagtcggttgttcactgtcgcaagcataacctcctgacgctatacttctttggatgagactgatgcctccgagtccaaagaaatgaatttcgcaggtcatctgccagtgggtgatgctgtcgattattagagccctgtcttcggacggggctttttagtataaatagtaatttaatcgacactaaggatttttttgcaatgaaatttaaagattttttaaccgaagaagagctttttgaagcagctcctggccgcatgactaaatcgaaatggcgtgacgctctggtattggttccacgtggtgaacgccatgattttagcaaatttgcggcttctgtggaaaagatttatggtattgggattagcgatcctaaagactatgctaaggtagcagctgcctttgaaagtttaggcggaaaggttactacacctgcacgtggagcttctccggcacaagcaccggccgcaaaaccggctccggttaaagcgaaacctaaaaatattcctggccttaaaattagtggagaccatggagacatcattggttcaggtgaactgtttaaagctatcgataaagctcttccgctagtaagagataatggtcctctttataaggcagttcaattctatttcgataatctgtggaagtatcgtgaatcccaaggtgctaaaccttctgcacgtgaaactcagcatatcggtgaagtgaaaacgcttttagctaaactgaatcatcaccttgttgaactcagtcgtcagacagaattatcgtacaatgtataataaaatgtaatcctacagccctagaattcatctagggcatttttgtatccccggctgtataaatccattctaacttccagaaagttcctccagatgccctaaaatttttgcacaaagttgtttacttcctctatcaactcggttactatagctccatcaaaacaaagcagagtaacggagaataaaatgtctaaattcaactttatccaaattgaacgtggttataacaattacggtactcctgatcgttatcgcgcgatttggattaaaggtgaacatgaacacgcagtgttcaacgtagcagaaactcgtgaactgaaagatttgattaagcatgttcgcaaagattggcctgctgttgaagagtactacgttcgagtttaccatgaagaagctgctaccgaaactgttcaaattaaattcgcaaaaactgctagtgctttaaccaaacgaattgaagcggtaattaactgctaataattttggggagttataatgaactccccacctactgaggaaatagtaatggatacagcaaatatagttccaaaaactcttgctgatatacgtcttgaagctaaaatagctatcgagcgcctaattaaggcaacagtagaagaaggcaaagaaactgttcttattctcgggttagagtcatacgttactgattacatcgagatattcgagcgcagcaaaaatgaacagggtctaatcattaaaccatatgtttatgattggattaatccgtacgaataaaaccaccataactattgaaaggaaataaaatgtctattctgaaaaaacttgttgaattcatccgttctaaattcggtacctttgttgcacagaacacttctgttgaagaccagtataccactgcggcaaatcgtattattgatgaaatcactaaactgcgtaccacgcatgttaaatcggtaaatgaagaaaagcgtctgctgaaacttgctgacgaaaaagaccaggcaggtgcttccaaagagcgtgaaattcgtcgcttgatggcagaaggtatgaatgtagaaacccatgctaaactaggtcttctgtatcgtcgtactgctaaggctttacgtgataaagctgccgaatataaagaaatgcgagcccaaattgaagaaaccgtagttaagcttgatgaccaacgtcttgatttggcagtgaaactcgaatacatccgtgagacccgtaatgcttctgctctgggtattacctctgctgatgacgtgattgaaatcgcggaactcgctaaagtagatgtacaagacatcatgatgaaagttgaaaccttcagcggtactcagcctggtattgaaaccaccactgctgatgtccaggaatatctggaaagtctgaagtaattttatcggggccttcgggcccctaacttggataataaaatgttatatgaatgcgctggagatattccaatggcaacacctcaaattaaagaattaattgcagcaggattcccaaaagaaatcactgatattcttgagaaatttgcttattctgatactcggcctgaaaattggaaaactcgctataacgggtataacaccacagttttaccgcgggctatcgttcttaaagactattccaagctgaaaaacttaatttctaatatttcgtctatttccgacggagttaagcttgtagatatctttgcacttcggtacggaatttattctttcaacgattctccatcaaatctaacatcagctcgtactaatgccgatggatattttacttctagctccacaacatatacagtagttatcgagattatctataataaaactagttatcgtctcggtattaatctggttaaatacgtgacatctcaggatgattatagcaattatttaaattactgtgttaatgaattaccaccaaaagtcatgggtatgtttgactctaacaacatggtaggcaaacaattaatcattgatgaatttatcaaatactgccgtgagagggtgcagaaatgagtaacttatatctgccaagtgaacctcccgtttataattatgtctataaatttgatcagattgattatgcccttgttcctggtattggtgcaactgtcggcgcaatgtgtacctttgccgcgattgatatcatgcatttaactgatattacaccggcagtgttattcggaattctgcttgcatggtggggaactagtttgctcatcatgggattaattgaatgttcccgatgggttaaatggtctcgcaataattataagcgtaaagctgaatggaaagaacagtgcaagaatttaactcttgaatggaaccgcaaaaagtcgtttgagtttattaaagaggtgagaagaaaatgaatgaatgtaaacctgacgggttttggaaccaagatgggctggcgccagcttttggaatcgtgacatggattttatattgtgcttttgtaattgttggagggacattctttggattgaacgtctcagagtttatgattatgcttttatttttaggtgttttcgcattcagcctcatgtggatgctaattatcgcgttgattaattgctgcacatttttagcttaccgtatgaaatacaagaagtggaaagaaaaagaagatttcaacacctggattaggagctgcagaaaatgattaaaacttgttatcgtggaatgattaaagatgatgatttcttgtatttcttcctatttctgcttatcctgttttccttctcaacatttgttggtgttgggatattctgggggttctacttcttttcaccagtatttggtgatacgctgtactatctaggttggatgtcaggggttggaacttggtttgcaatgcttgctcgttggttgcaattcgtttcccagcggcagcggggtgtatttgataaacccaaagtaaagaaagaaaaatctaaagatgattctcgtaatgaaactttatcctggattaaggagatgaaataatggctgttgcagtgcatgtaaaatttgaaaatggtgatactcgccttctgtgttacagcgataatgaatcactgagcggtatcgagatttcacttaaagaagaactgcttggtattaatggacctatctgtgatttctcggtagagggttcatataattgtgatggtgtactagagtctatggtctatactgccatggaagatattcttgaagaaagttggaatgaatgccaatgaaagagctcagtgcaggaatcttattctttaccgatgacaaacggcttttcatgggtcgtatgacaaatacatatgtccagggcagaggctctagatgggatattccgaaaggacatgttgagcctggtgaaacaccaaaagaagctgctattcgcgaatgccaggaagaaacagggtttactgggtttgaccaggacctcttatatgacctcggacgacatgattatgccagcaataaggatatccatttgtttggatatatgctccctgtgagcccagaagtgtttaagaattgctgttgcacagcttaccataaagatgaaaatggaatttctttcccggaaatcgacgcatttgctttaattaaaccttctcaatggaaatatgtgatgggaccaagtttgtataaaatcatgacacagatgtatagcacagcccagtgaggttactatggaagaagctgttgaattaggcattccacacatttataagcatgaactacgatttgttcgtgacggaagatggattagcatatttcatcctcgagataagttgtcacgtacactaatgaagtcacggtatgtcttcggtgacggcgagtatacaaaatcagcatattatatagcagaacagctatatccgggatttagtgaattgcccgaggacgatagaagagattatgtgtggtggaaaggtaaatggacaccatacgagaagtgtagccttgaattattcatagccaagtgcagggccaaataaatactcctataattaataggaggtccttatggatatttttggcatgctgcgtattgatgaaggatacgatagcaaaatttataaagataccgaagggtattggactattggtattggccacttactgactaaagacccgtcaaaatctttggctatttctaacctggacaagcttgtaggtcgttctactggtggccaaattacccaggctgaggcagaagtaatttttgcaaaggatgttgaaaaagcaattaagggcattgtggctaatgctacattaagcccggtatataatatattagatgatgttcgtagagcagctctaattaacatggtattccaaatgggtgtaggtggtgtcgctggattccctgcttccatgaagctcttagctgctaaaaaatgggatgctgctgccaaagaactggcaaattcacgttggtatcgtcagacacctaatcgtgctcgtcgtgtaattgaaactatgcggaccggaacttgggccgcttatcaaggaaaataaatgaaaacttatcaagaatttttaaatgaatcccgtttagcaacagttggcgtaatgactgaatctgttggaagtaatcttctgaaatttaaaaaaggtcagaagatgacagccacgctagaagatggtacagaaattgaaatggacgttgttggatataactacgtagtagacggcaagttatataataagagccatgctaagtttgattcattcgatgatttcacctcttctattgaagatgagtcttctcgcaaagcagtagcatctggcgatgcacgctccttaatggcatttggtcatgagcgtattaagtctaagcagaacaaacctggtgaagataactttgcattagtaggttatcagtctggcaaaacttctaacggttaccaacgtactgttaccatgtacatgcgtaatggtaaaattgcattcgtaaacgatcgcggcgctattcgttacgctaaatcaattaagtaagcaatttcctaataaagccgaacacgacctctcctcatgaacgtcgagtcctctgagtgaagtagcttttcctacctgtaataaggtcgagcccaagtgcggtaaggggtttacatagtgtgtcgatggattaaacatgtgccaaggaatggcccctttaactggaatctaaaatgaaacacttaactcccatttatttgaccctgatgcatgctttcagagacgctgcagacagacgattgaataatcccaactacagtttttatgaaccgtcttgccttatgcgagagtacggtacccttcgtctagacggtggaagacaaaccggaaagaccgcagccttatgccaattcgctaccgattggttgcttgaagatggttcggttataatcttatctactcgatacacacaatcatctgaactgatggaaggtattctacgagaatataattcatcgcatttaattaataaattaccggctaacgagatagctaaatcaattgttccgatgacaatcagggaatttctatccaatgattcctcttataagtttagaggaagaaagtttggaagagcattaattatcattgaagaaccaatgaaagttcccgatatgatgaagttctatgatatgtaccaggaagctatcagatggtctatgcctaatgataccttacctttatttttcgtgataggaatgcaatgatgacacagacagaaattgttgatatgattacagtaatggaaaatacaggattttccgatatgaagcaattaataacaatggttacggctggaaacctgcttgagtacaagcgctacaagtttctgtctggtccgtttaaaggtgcagaattcatttctaatgctcctaacacgaagtggatgaatcgctatcctaattttagaattgagtttatatctggcaagctcaaaggcgtgattagttcaagcttaatcacatatgaccaacgcattcaagagaaaacaatgcaatggctgaaattgttataaagtgtcctccacatttagttgaaagcttctgtgattggttcagtaattctggtgagcaagatttttatgaagctcatcagaatggaacttggaatgaagccacaaaacagtgggaagaagctacaacgtatataggcactcgtggatatggagttgatgagcctattgaaattgtagagtacgataaagaaactgatgaagaaatactttatgctaatgatgccagagaacgcttatggcgagaatctgaattagaagcagaagttattcgtcttaaagaagaattaaaaggaccaacgggttttgctacatggaaagacgctgctatttctgaacgtttagcacgggtaaaattaatgccagaaggtaaaatctcgtacttgcaggctgcatccaagttccattctactgagtggaatactatggacgtaattaccgcgtacatgcgtggttggaataaagaatctaattaagaggaaatatgaaagcatatcaaattcttgaaggtgaacttaaaggcaccatttacatcgaagatggtgatgacgcacgagtaatcgtttcaaaagttcttaaagaagatactattacggatgctgaaactttttatggctacaaggcgcgtgaagtagaaattgaataccagccaacggtaaaagttgaaggcggtcagcacctgaacgttaacgtgctgcgtcgcgaaaccctgctggacgcggttgagcatccggaaaaatatccgcagctgaccattcgtgtttccggctacgcggtacgcttcaactctctgactccggaacagcaacgcgacgttatcgctcgtactttcacagaggcactataatgtcaatcgaagatattaaaggatacaagccacataccaatgaaaaaattggtaaagtgaatgctatcaaagacgctgaaacccgtcttggtcttatctttactgctcttgaagaagaggcattaatcaactaccaagagtcagccaatgaacccaagcaggtactcgatgaagcatacgaacgtattgcccagattcgtacagcaaaacagaaactgaaggaagcttctatgtgggcttgccgggcagtgttctgtccagaagaaaaatattaaaaagtagtttactttccttacgggccatgatactatggccctacaaacaaaggagaatgaactatgtcaactaacccagaagtattcattcgcagaactaaactgcgtcgtaagtttgaggaagcttttcgctctttgaatttatctgttcgtgcccgggcgaaagccgagggtaaagagcctttcttcactaagtactctgatcatttgttggaccgtgctattcaacgtgaaattgatgaagagtatgtattctctgttctttccaaaattcctaatcatcttaaagaaattaatgaattcttagcaatgccttggcttccaattgacccaaaagacattgatgaaaacatcgagtataagccaatgcggttagaaattacggatggaaatctgtggctagggtttaccatggatattccaagaccaggaaaaggacctagtataaagtgtcgtatggcattcgttaatgataaacgtttgaaaggtaaaatcagcacaaaagttatacacattaattgaggtaaacatgaaaaaagcgcttatcggtctaatggccttatgttcaacggcctttgggtctgagccaactttcagtaatgttcaacttgacaacttacattacgcatataattttggtgagcaatatcaaaaatccggaaaggaaaaatctccgcataaccgatatgataataacggcttaggatatataatggctgctatatcatggaaagaatcttcggcaggagccaatttaaaagcaggaaaggggcatcattcttatggggtatttcaaaattacttgcctacggttaaagccagagctaaattagaaggcaaaaaccttagtgattctgaaataagaaaaatgcttaaatctagacagaattccgcggaatgggcatatattgagctttcatattggttaaatatacataacggcaatatgcgaaaagctcttgctagttataatgcaggatggaatgtcaaaaggggaaactcttatgcgtcagatgtcctagagaaagctaatttcttaaagaaacataaaatgctacatataaaggtggaataatggtaaagtacgccgcgcttcttggattggtactggcattctctgctaatgctgaaaattcaatgacagattcacttcgtatcgctaaaacattttgcaatacgaactctgaatgtgttgatatattagcgcttgaattagattcagcattcagcgatggagtaaaagattcacgtagcccggcccagtggacaacactaataaatcgtaaggctaagagcatgaaagatttatgtgtcaatgctcctaacgaaaatatatgtttaatgtatcgtgaccaattaatggctcgttatatgtcaggactatcatcaaaatgaaaaaagcagctattttattatgctgcgcattttcagttaatgcctgggaaaagctcccaggctatcctgaacctgtactagcggcgcaggggactaaaatagaaagcaacggtccattcaagaacaatattgaaatagcatttgtgcctagcagtagaaaattgctaatgtcattttataattaccaagataaagatgaccaggtaatagttccacttgtcgaatataatgctcgcggatgtggaatgcagagcgatggcgtttctattgacggagtaatgcatcctaaagaacaaggagtgctgaaccctatccttaattgtaacaatgctatatttttaagagtatacaataatcttaatgaatatgcaacatataaaattccataggtgaataaatgattactggatatattaagggtaatattgtagaattattcatgaagcatgaatgcgatattgctcatggatgtaattgctttactacaatgggtgctggtgtagcaggacaacttgctaaagcatatcctccaattctcgatattgacatcgatgaagaccgttattatgacaataatttagctaagcttggaactcatactcgagccattcacaagaatggcactgcatattgctataatttgtatactcagtatgctccaggtccaaatgttgattacggcgcaatttttaatgcattccatgaactaaattctggtcgtattgtttataatcgtcctctatacattccaaagattggtgctggtattgctggcggtgattgggaactaattgagaaacttattaatttagcaacccctgatattgacattacagtggtagaatatgaagaggctaaaagctaaatacgtcttgttagaggtaaatagatgattactaaagagcaaaaaaataaactgtggcagttgattgacgattatgcaggtgccgagcaagtagtagctattagtgccatttacggaaatggtctacctgaagaatacgatgaactcattcgttctaagaatgctatttctgattttatggagacactttaatggcacagctttatttcaactacgcgagtatgaatgcaggcaaatcagctaaccttcttacagcagcccataactataaagaacgaggaatgggaactctcattctgaaacctgctattgatactcgggattcggcaacggaagttacttctcgtattggtcttcgtcatgaagctaatacagtagacgaatctattgacatacttgaatttttcaagtgggcacaaacacaacgtgatattcattgtgtatttgtagatgaagcacaattcttgactgctgaacatgttcttcagctatgtaaaatcgttgacttgtatgatgttccagtaatggcatatgggcttcgcactgattttcgcggcgagttattcgaaggttctaaagctcttctttctgtagccgataaacttgttgagctcaagggcgtttgccattgtgggcgtaaagctactatggtagctcgtattgatgaaaacggaaatgctattaccgacggtgaagtagtagaacttggtggtgaagacaaatacgtttctctttgtcgtaaacactggtgcgaactggtaggtgtttataatgaagccaagaacgtataatactctcctgatgctagttttaagtatgttattcatttggattggtgtggcagcatctatacaaagtgatagacgagaagaaatgcaaaatcgtcttaattccgaatgtaaagtattggcacagggtaaagactttattgctaatatgaatgggtgttatattaaacatgagtagcttatttgctatagcgggtggtatagtactagtactcgtgattgggtttttactatacgtaatattgctttcgttattggtttaatatgaaaaaatatgtgatgtgctatcgttgtcttcatgtatatgattacaacactgctccaaagactgctaccaagcgtcttaaaaccaaagaacctgaatgtccaaaatgtaaatgtaaggtcatctattcatgaatattaaattttttaaatcaggattttactatcgttgaggtactttaacttaacgaggtaataatgtctagaacaattcgccgtaaaggctggcatgtagtaaaatcttccaaatggaacgatcagaataataacgaatttgcttatattaaaagctataacgaatacgttaaaactcagaaagataaagaaacccaacagaaatatgttgaactgcgtatttctgaaaatcgggaaagaccgctagaggccaagaaactgattgctaaatcaaagcgcgatggattctggaaaactctacgttggacccgttatgctatgccgatcccacgtctatttcataaagccgaaattaaacgcgcattgaagtatgacgaagaatataactgggacgaagctggtgctagaaccattgagcaaggcatctgcgaatggctttgggattaagtaacacatacttatataaatactattactaactgatgaggtgtatatgcagcatttaagtgaaaagcaacttcgtaatcttactgtagaacaactggacgaacttcgtcgtgagattgggcatggtatttcgcaccttcaggaagaaattcgtcagcacagttcaaaagcagattatacccgtaaacgtaagctggacaaatacctcaaagaagttaaggctgtacttcagcacaaacgtaatactggacaaaaataataggaggccgtatggcctttaatcacatttgcttagccctggtgttgggctgcgggatttcactcccagctgcatcacacaacgacatttcggattataactcgtatgttgagggagctctacaagtttatgctaaatttaaggagcctagtaagcaagagtctgaacagttctattcttttatacaaagtaaatggaagagtgagtcttgttctaaagattgcgattctttaggacgttcagcaggtgaagaatatgctaaccgcatgaggatacaactcgataatgaaattcaatgattttgtaaaggacggtaaacttactccacaagatgaattcatcggtttacttatggcgtctcaggcgtattttcattcagcgcattttgataccaaatcgtatgccagacataaagcgtatgaagttttctttaacgagattccagatttgatagatgcttttggtgagcagtggttaggattctcaggtaagagttatacaccggctttaccatcgcagaaagagctgccaaaggacaccattgaaatgctagacctcattctggctaaggccgatggtatctacaagtcagttcctgccgccctccaaagtgttctggatgacattacaggtctatgctacaagactaagtatttgttatcattgcagtaataccctccgcctcctccgggaggcattttcttttcaaaaagttgtttacttcccttcattacatgatactatagacatatcaacaaccaaacgagaaaaacattatgattaagttaactactgaacttcaacctggaaaaatcttttatcacgtgtgtggtgttaatcgcacagaaactaaaagcggcgaaataacgcgttacattgttgcttcaggcacgtatgatgttgaactcggtcttcgcggtgtatattcgcgaaaatctcctttcttccgggtgatttgtgaatatgaaaactatgctggtcaaactgaaagttattcaactgagcgttctgctcatgatatgggcgtattcaagccaggtgaaaagcgttcggttcataatcttaatcgtgggttttggacgcgtgaagaagctgaacagttcattaaagaacttcaggaagacaagttcagcgatccagatgatcaagcatatgcagacagactgaccccttctgaagatttccgccgtcaacaagaatttatggattcttatcttgacagttgtgattatgattactacgactttgatgatggcgaagaatgagaaacgttttacttatcatctacattgtggtacaataccagcatccgatgtttacatataatttggtgcaaatgattctggagagtttgaaatgaatggatggggcccatcagatgacggatttgcaactcgcgaagctacaatagcagacgggattgaatgggcccgtcttcagaaacaactccaagaacagcgggaatccgaagagttctgtgttgattgtgatgaggaaatcccagtagctcgtcgtctgttggttaaaggctgtcaacggtgtgtagaatgtcaaggaaagtgggacattgtaatgacttctgcttataatcgtcgtggttcaaaagattcacaattgaggtaattatggaaagtattcttgatagtaccaatttagataatccgtacagtgatgtgcgtgtaaaggttgtgaattcatatttcactaaaaagttgagtcgtatcgtgctaaaacaaggcaatgatataattcatcttgatactaaacaaattgattcattaattcaattcttgatagaggcaaaagatggcgagtaaattagtatgggacggaaaatcccgtaaaggcgatgcagtaattgaagatgaaagcccgcatgttattgatttgtatcttacggtattccacacgtatgaacataatactatcatcgaaattgaacgtgacggagattgtgtagctattgataaaagcgacgctattgaactggtcaaatatcttgtaactatgattccaactatgaaggactgataatgaatattaataaaaactcttggcatttcaaaatgaacctgtggtttaaatctggcagcatgtggaaaatgccaaaaactctatgtggatacttctggacgacagttcttcatgttgtgttttcttcggcgattatcacgttcatcggttctgttgcatggatgttcggttggccgattgtggcagagacaggaattctctcttggataggtattagtttatccgcgttttggttaaacgttgtagcagtaccagttggcgcagtggttatagcagcatttgtgcttttatttgcagctatagcgtttggatttattttcggtttagaaaaatttaaagaataccgtaaaaataaacaatttacgaagaaacttgctcgagtaaaagcgggtcttcctgcagaagccgaaccatcggtatttgtccagtatttaaaagcccgtaagcggaaagtctgcccaatgattgattatgtagaaggtgataaatgaaacgttttattcgcatgaaatttgaagaaagccttattgaaaaacccttaaaggttggtgataaagtagaaattgggtttgataaccaaagcaatcgatttgagcttgaagttgaatttatttctatcttcaaatgcagctcagcgcatacggtatcgattttctttaaaagtaaagacagcaaaatcgtagtatattacgaccatagcagccgagaaacaactactgtagtatatccaaaagacggctaccgtggaatgtatatcgatgattacctaaatgaatcggcagacgatggattttatatctgcaaacttttaccgggtagttctaagtcggtaattaatctcagcagccttaaatacacagtttatgagaagtgtaaagttaatgttcctcttgtagtgggtgataaattctctacaactaataactgctatgaagtactagcaattgcagcagatggaagcatgttttgtcagaacgataaaagaaaagctcacgtgtttagtacaaatgacatctcgctcgttaaatctatgcttgatgttacagtaggtgaacctagtgaagaatgatcaagtttatattgtgaacggccttcgggccgtatttcgtgctaaaaccgaacgtggtataatttctacataccctattgccgaatttacttttgatgacggcgaaaaggttacggttaaatttattcctttgactggcaagtacagcggcaaagataacattgatttagacatacattatgagggcgggtcatggaaattgaaatcgtaactactaagaaaaaacttagtatgagcattgtgaaacagatgccgttagcttcagccgaaaacattaaattcgcaatgatggacccggaatcacgggtcctaggatatatcaatgcatttcgctggaacagacttgacattcaggtggcaatcattagcacaggaattgattgggcattagttcctatgtatgaaaccacactgcgtgaagaaacctgtcgtgaacagcatcctgatggacaagagtaccatacccacgaagtggtgtattattacaccagtcaaaaaattggtaatgtttaccgtacatcaaaaagaactacagataaaactcgagcagaagaagcagccaagcgttctaatgcattagttaaattcgctaaagggaatcatatttacttatgaaaacaatcgtaaaatcttattttggttcacatctgtatggtacttcaactcccgagtcagatgtggattttaaagaaatctttgtacctcatccgcgtgatattctaatgtgtcaggcgatgaaccacaccaatcgtaatactaacaacagcgcaaccaaaaataccaaagacgatattgaccatgagttgttcagcttaaagtatttcttcaagctcgctgctgacggtgaaactgtcgcgttggatatgctgcatactccaccggaattggtagttgcatctgaccttcctgaagtatggaaattcattcaagacaaccgagctcgtttctataccactgacatgaaggcttatcttggatatgtccgtaagcaagcaggtaagtatggcgttaagggttctcgtttagcagatttacataaagtcctggatgttatcagagatgttcctgaatggaaatatgacgatcgtcctcagcagaagggtatcaatgagcgttggaaagtacaggatatcgcagagaaacttcctctaggtgaattcctcaaatggaccaccttcgttgaccacaaatcaggcgagcagaagttttataacgttctgggtcgtaaattccagacgactatcactatcaaagagatgaagtattctcttgagaaacttgatgctgaatatggtgaacgtgctcgtaaggcagaagctaacgaaggcgttgactggaaagcactgagtcatgctcttcgtgcaggtctgcagcttcaggaaatctatatgactggtgaccttcaattccctctgacccatgctaaaatggtcaagatggtcaaagcaggtgagttaccgttcaaagaagtacaggagcttctcgagtctgtagtagatgaagtagaaattctagctcatactgctgaaaagaacggaatgcctaagaaagtagacatgaagttctgggacgatttcgtcgagaaggtttatcttgaaaaccacaattcttactacaaatgatacaatgaaggtcttcttgaattacggaagacctcataaaggtagacggtggtatttggaagcagtttgcagagagactggtcgtagagaaaatgctaaattctctgctcgaccaactcgaaaacaaatccaccgatttatgtcatgggccggagaagagctccggttctcactttattgggctgaaatatgattttactgtggagcgtagtagtgccaatcgttgttgcaataatttactttgtcgtgggttggtctgtctgtaagcatctaatcaaaaatggaaccatcgagaaagcaggagagtattggttttatctcatcttttggttccctgcgtttattgccggagcgattatcatgttcttccgctgggcaggtaaacttccaaaacgtatagcagaaaatgctatcaacaagcacgcataactgaggagccttcgggctcctctttttgtttcaaaagaatgaaaaaagtagtttacaagctcgcgagctggtgatactatagctccatcaaaacaaaacagagtaacggagaataaaatgtcaactatcaccatcaagaaagggatttacttcggcaaagagatttcaggtacttatgagttactcggtgagtggttcccggatagcttaagtgctgaagattctcgccagggtgatggtaaagtctttgttgaactgaatggcaaaaagcgcggtgtttgggtattcaaagatgatatcacaattgacggagtagctgctaaaattgaagttgttgaatccgttgatgaaatgaaagagcgtatcaagaaacgctttaacgtcatgggattaatgactaacggcttaatccacgggaatattcgttctctgattatctccggagcagcaggtatcggtaagacttactctttggataaagcattacaacatgctcatgatactaacgctattgattacaaatcagtgaacggtaaaatctcaggaattggtttatactgccgtctctgggaatcacgtgaagcaaattcagttcttctgattgatgatgtggatgtattctctgatatggatattttgaaccttctgaaagctgctttggattcaggggagaaacgtaaagtatgctggagcactgcatcttctttcttggaagataaaggaattcctaatgagtttgagtttgaaggtactgtggtctttatcactaacgttgatattgaccgtgaattagagcgcggttctaaacttgctccgcatcttcaagccttggtatcacgttcagtttatcttgaccttggtgttcacactaatgaagagattatggttcgtgttcaagatgtaataatgactacttctatgttacagaaccgtgggttaagaaattctgaagttattgaagttttggaatttatgaaagataacgtaaatcgtctgcgtaacgtatctctccgtactgctctttatattggtgatttcgtcgcgactgaccgtaaaaactggcgtgaaattgctgaagtaacaatgctgaaataattttaatgggaggagaaatcctccctaactgaggaaaatataatggctactttaatttctaatgatgtaaaacgtgttttgtttaaaggcggaatgtatatcgttgatactcctaaaggtgatacctcttcctggactattaacgagtggattaattacattgatgaaaatggagcgtgggtacaatgagtttagcagctattaaagatattgaatgttggttaaacgatattaaagtatatccgcctggtcatatctttgcaggtaaacccaagggtaaagcagagaaagcctgtgaagcaatctgtgaaaaactttataagtttaactttggcgataagaaaaatgtattagctgaagtccattcttcttatcatgaactacgtgtaatggtaaacgtatttcgtgctcctccgttcattgagctcaggaaagaatacgctaataaagtatttgatactttccttgcaaatgtgcaggatgcagtaaagcatttagacgaaatgcataaacaacaccaagatttaaatgcctattataagccttggcgtaaatcataccaagagcttaaaaaccgtattgaacttattcgttatgaggtgctaaaatgaaatgggtaatgacagaaagtgaagcctatgcagcgtatgtctctccagacgatcgccgtagtgagttgtttggttattatggttcatattgcgttgccgaagaagcagttaaggggcagtcttggtggggctcagatggtacagttaatcgtaagccaacggaactaattacattcaccgatgaaaatggcgaatcatggacttttcctaaaagcgctgctattagtgttcaggaagaaacacctgaagctaagcgtaaacggttggaaaaaattaaagaagccgctttggctaaattaaatcctgatgaacgcgaggcgctcggattatgaacaaagaatttagtactgctcgtatggtagatgcttttggatatccgtgcagcggatatcgtgaatttattcacccggaagttgaaaatcaatttaaagaagttgtaagaaatattttgctcaatgcatttaaaactcaaggaactaacccgagagatttaggcatttatcttgaagaagccatcagagacgtacaaaagagcgtatcggctaaacttcattgggctgaagaaaatattgcgtggtcaaacaagaaacgttctgatttaaattggcccgctgatcgtgaacaaatcgtcaattatgctaaggtgtaataatgttaaaaacctatgaagttaaatttaaacgctttattgatggcaaatgctatgacaataaagaacgttcaacccgaatttctgcgccgtcagcgtaccaagcagtatttcagcatgggcagaccaatggcgtggcattccctgagcaagacgttgaagatattatcttagatgttattgaggtaaaatgtgtttagtactatagtgtctatacatgcgtattacgaagggcagttaaatgctgcccgaaccaagtataaacgagggatggaggaatctgtggaaggtctcaaaggtattcagacacttgctcagaagacccagaacctcatcctgatggaccgtaaacagttattattggctgaagagctaaaagcctctaagatgcttatagaagacaataggaaacatcaagtgaaattgcttaagcagcgacagcaccagtcgccatggtttaacagtgatttccgatctttttaagggccttcgggcccttttgttgtttacatcttagaaaagccatgataagatagcttcgttaactaatgaggagattgaaatgaaagcacctacttggaacgaacttcaagaaatgttcaatactgaagaagcttttggaactatttctgaaatggttgagaatttagtagattctccttcagaagataatcttctgtgtttagcacagttcatcattgaaacctacatcgagaatcagaaatgacagtatacgtagatgtcttgatgaatcatggttggaaaatgagaggtcatcaagtaaagaactgtcatatgtttagcgacaaccttgatgagttacacgctatggcagaagccatcggaatgaaacgttcttggttccaggataagcgagttccacactatgatttgcgcgatgttcgtcgcaagcaagcagttgctctaggagcagtagaagtatctcgtagagatgcagttctgctttggagaaaatttttcacaaagtagtttactttcggcgaggctgttgataagatggtctcgtcaaccaaactggagaataaaatgaaaactttaaccgagattatctctgcacttgttgaagaaaatcgtgtagcccgccaagcacaccgagcgaaagttgaaaaacgcgccgaggagttgaatgctggatgggcgaagacccgtttcggtcgtgaatactttgataaagttgtagctcctacttggggcaaagatgatcgtcctcatgctccctttgatggttatctttgggaaaatgaattaggtgaagttgaagcttatcacgcaggcagttacttgccgtatgttacagaatttgattcactggataagcctgagtatacaggtgaccacggttggtggaaactccgcttaactcaagaagagtataaagaacttcgtgagtatggttatcctcttgaagtacgcgttccatataaagagtggaaattgcaagacggaacggatgttgttatggcagaagttagagcccataagagcatcttagaggctatccaggaacattcaaaagaggtctttgataatatattcaatgagctgaataagaataaaggggatgcaccagaaggacgagtgactgtctccggtaccgtaacgtcagtaaaagtttatgaagactattacggcgtacaatgtaagatgatggttgtacttgagaatggagctacggtttacggctcccttccaaaaagtattccgtttgaatacagaggcaaagtacagtttactgctacatttgaattagcgaaagatgataaaactcatgctttctataagcgcccaagcaaagttataatgcttgaggaataattgttgtataatgggttcagggagattttgagatactctttgagcccagtccaaaatagaggaaaagataatgaataagaatgaattaaagatgtttgtagccggtgaatttgataagcataatggaaagggcttgtcaaagcgtgagaagcacgtaaaggttttggcagctttacatgatttaaatccagctgcttataacgtagcaattgctggtaacgtagctcgtcgtgtgctaaatagcatggcagcacacgaagcaaactatgtcagttttgttgtagaaaacattcgtcgttctcgctggttaggtgcaatgtcagcagagaagcagctcaaaaagtttgctatcggcaatgctaaaatttatggtcagcgttatagctttgcggcaggggcgtttaaaactgaagaaagacacgaccgcagcgctgcccaaatcttctgctctgaatttaatgcaaacctgcgtcgtattcttaatcgttcaatttgcttacttaaaggcgatgaccgtgtgaaataccaggtatcttctactagttctagaaatcctaagggtgtttcatttattcgtgccgaagaacttgacaatgtaactgtacgaattcatattaacagccatttgtccagcggaaagtatccggcccgggcgcttttagcgcaagttcgtactgctttagaccatatggatgtagttaaaaaatcatgctgtaaacagcagggtgaaaactcatctgttcttgaagtacatttggacccatttaagatttttcctaaaacattgagcacacaggttattgatgaagatgtagcgcatatgtatctcaatgttgttaagcctcttccgttaacaccagtaaatcatgttgaaattgccaaaaacagtattacagctgaaatggaatcagttaagcggtttattgatacaaaagaagctgaattaagtaagcatgaattgatgatggcggatttagtcaaatcgcttaatgagtacaaagagcggtatgaatctctcgagtatgcccggagcttactgtgaaaaatcaattaaaagaagacatggtcgttgatgataacgaccttgaaattgagtttgagtatccacctgtacctgaatttaaaattgattgggatgcctgtcttgaaatggtagaccgtcgagaagctgcagctaaacaagttgtgccttgtgaaaaatgtggtagtattcaagtacagcttgttgattggacaaccgatattctgaaaatgaaatgccggacttgtaagcataaatttgagagaaaattaaaatgattactaaaactattactggtgctaatactaagttttttgtcgagtatgctaataacctcataaaagacaaaaactttgataacatcattgcagatatgattcttgacgcatacgaaagtggcatcgaccctatgcagcttaaagaatatcttcgagcgacaatggattttacagttcttaacatgatgcttagaactgatactgaattcaatgaaatgattgctcgtcgtaatgaaggcaagttcaatttgactgatgacgaagtattagcgtgtgctgctcacgaagcttggaagaaggtgctttagtctacgtttatctccctttacttcatttcctttctcacaggccagaaaacataactggcctgaatattctctctgggaccacggtcccacctgcatcgtctgtcaggttatctgcctgggaccacggtcccacctgcgtcgtcggtcaggttatctgcctgggaccacggtcccacctgcgtcatcggtcagcttatctgtctgggaccacggtcccacctgcgtcatcggtcagcttatctgtctgggaccacggtcccacctgcgtcgtcggtcaggttatctgtctgggaccacggtcccacctgcgtcatcggtcaggtaatctgcctgggaccacggtcccacctgtatcgccggtcaggttatctccctgggaccacggtcccacctgcgtcatctgtcagcttatctgcctgggaccatggtcccacctgcgtcgtcggtcagcttatctgcctgggaccacggtcccacctgcgtcatctgtcagcttatctgcctgggaccacggtcccacctgtatcgccggtcaggttatctccctgggaccacggtcccacctgcatcgtcggtcaggttatctccctgggaccatggtcccacctgcgtcgtcggtcagcttatctgcct

SEQ ID NO: 27 - DNA, 43008 bp, unidentified
  source 1..43008: mol_type = genomic DNA
cagccgaccacgtacaccgaacccaccacagcctccggcacgtcaaggaacaccttcgtgttcgtctcgcgcttcacgccgagctggtaccgctccatgtaggcccctgcctgcggctggagctggtacactgcggcgccatccttgatcaggtcccaatgctgcttggtcagctccagctcgccgtccacggttgcctcaatacggcgccagtagtcgtacttcggatattgcagaccctcgcgagccggcaggctgttgaggtgcatccgacccagcgcgatctcctggcccttctgaatcaggaccatcaggttgtcgccagtgaagtaggcgccgatgatctgatgccgcagtgtccatcggtggaaggcgttctggactttctcgttgccctgccagaggtactggtggcagatcatctcgtccgccgtgctggtgccgaacaccaggtagccgctggaggccgccgcctggatgtactcagccggccccggcatgtagctcgggatgtggctggtaacgtcttcggcgacgtagtggctgtccgtggacggcgacggggccatctcatgcaggcccatgaaacccagggcacgctccgcagcgaagtatacactgcggccagtcacggcaggtgccgccctggtatcgaggtcgtactgcgtggtgatgctgataaccgccgtccggggagttacaatgccgccaccggggaccacggcctgatacttcttggcgaagacgatcaagtccttgttgaaggtgaccgcgtgctcgtacggctcagtcaggctcccctgggctgcgatctcgataggatcgtcgtcgttcagcgcggccgccgacttcttgaaccagcggtgcggattgttactggccgacatgcagacgtactcctgcgacaggaggacgaggcgaccctggaaggtcgtcatgccggtgatgcctcgggtgacgaagttgaacgtggggttcgtatcctcgtcgccggagccacgtcgatcatactccagctcgttcaagctgtaggtgtcggtagcctcatcccagcgcagggccagtggcatcttcttcaggacccaatcggtgccgtaggcggcccgctctgcccagcggcggttagcggaatcccactcgaagtataccggggccttggtagagccggtggccatgatagcgccgtccatgaactgcacccccacaccaggggcaccgactcccggcagcaaggccggcaggtccgccgtagcattgaggctcataccacctgacgcgatgccgtagttgttgcccatatccgtggacacctcgaccacgatgtccccgtcgccccggaaggcgatgtagccgtcctgcacgcctcgctggttgagatagccggctaccgtagccgcagccgggtcagggtcaaccttcgggtacttcttcgtggagttgggcagggcgtactccggggcgccgaagaacttgccgtagagttgccaagcgatgtagcccacgctcgtttggaacggtgcctcagcgaggttggggttcgtgctggcgttgtccggtgtcacgtaggtggccgtgtgactgtaggtggtgcccgtggcgttgtccttgaccttgatggtcagggagaatgccttcgaatactggcctgccttgacgtacagccagccggccttgttggggtctacgcccttgatgtcggtgcggtcggcctcgggcttcacgctcaggttggcgatgaacaggtcatcggccaccgtggcggcccgtagctgcctgtaatcgttggccttgaggtagtcatgcaccaggggctgacccatcagcaggcgaccgtcccgctcgtcgaacaggtacagctcaccacggtgctgcgccaccagcatcgcaatgctgcggccaccgaggttcgtgtggtagaggaacggcctcggccagggctggtcggtatgcagcaggtgggccatcagctcgataccgctgcgccgccgaagtcctgacacgggatcggataccatgttgatctgctcgctgagctggcccggcaggcgctcgaagggcacctgctggctcacacccatcagcagattgggatacgcggattgcttgtagctcatgctcaggtcctcaagctgcgccgccaccggctgaagctacgcttggcctgggtgttcagcggacgtgatcgggtgtgcatgcgggacagttcgttctgatacgcctgcaattcctgggcgatgacctgggcggtctcgtccggtccaatctcgtgggtgtataccgcgagcgcagcctggtgcgcaatgacgcgctgtgcgatctccgggatacggtcccactcccgagacagcaccaatcggccctcgaccgacttaccgatgcggtcgtcgccggtgttggcatctcgcactcccaggccgtcccactggaggtccggggaatccgggtagaatgccaaggtgcccttgggcaggttgatgcggcccgtgggatcaggtgtcagcttgtgcttccaccaggtgttgaaccaccagccttgggtcagcaactggatgcgttgatcttccagctccgggagggcgatggccatggttggatacgtctcatccatgctcgggatcggcagctcgccgatcttgcgcaggatgacattcactgcgtcgagtagtagcatagggtttctcctaaagcgcaaaaacccacgcagggaatctgcgcgggtcgttaggctttgaagaaaccccacaccgaagtgcggggtttcgtggcatcacgcggtgatgtcgaaggcgccgatacccttcagttcgatggcaccagcggtgtccggacgacgggcaccgatgttgtacatctggaaggtatccaggacccacgagaatttctcgttgtcttcccacagcttggcctggaccggcgccacttgggcggtgatcagggtcttgctcgggaggaacagggcgatctggcgctcggactcctcggcgctcacgttgaagtgacggcccagcgggtgggctgcgattgccttggtggcgaagcgcggagtctccagcaccttgacgccgttgaggatggccacgcgggacttcacgtagtcgttggtcgcgccggttgcctggtactcgacgttcatcagcttgtcgtgctccagcagcaggctgaacacacgcggcgacatcggggtcaggccctcggagtagaccgcatcgcccaggtcgcggtcgatgaaggtctcgactacgcggcggtgcatgcggacgatcttgtcggcagcctgcttggcggtcaggccggtcaggtccagtttctccagcacgcccggcgagaacgcatcttccaggtccaccggcgcgtccatcgcggcagccttgatcacctggatcaggcaggcttggtcgaacttgcgagccagttcctggccgtccagctcggcgacttccttgcgcatgtcgaaggattgggtccactcgtcctggtggtcgaactggtggcggaggtacagcagggtgtcgacggtcaggttccacttgtcgttcacgactcggctgcgctccagctcttcaccggcgcggcggcccttggcctcgacgttacccaggcgatccaggcggaccacgttcgagccacgcaggtcgcggatgttcatcagcggtgcgaacttggaggtgtaggcgaagtgcttatcgacgatgccgaggtgctcttccaggtggatgtcaacgtccgcgttcttgccagcgtagttcggacgggtcaggtcgttcaaaaagctcatacgatgctctctcttttggatgtgggtttaaggccggagtagggcagggtcgttagataccctgcgccatgcctgccttacgacgctcgcgcagcgcagccatctcggcttcggatgcgttcagcggcagcttagatacttccaagcggtactgctcagcgctcagagctgccagtgcaggtgccgcagcacccaggggttggccggtagcctgtaccacggcacccgagccttgtgcgaaggccacaatttgcttcgctgcgtactgcatggcctgggcatcgcccgagtccatcagccgaccgatggcggccttggtggccgggtcagcgtgttggttgaagacgccggcagcctgcttcaggatggcctcaccgccgacggcggcataggtctggctcaggacggctttggtctgcgcatcaacataggtcaggacgcccttggccacgttgatgacgtgctgcgcctgggccgggccgagaacttccttcagatagtgctcgtcgatgaaccgaggatcgcggttctcggcggccttgccgaaggctcggacggtatccagtttgtcagagaacgcctccagatagctgatggagggcgccaactgcgggtcgccttcgaggttccctgccaaggtgcccacgatctccccgttgggagtgaaggccggcggcggcgggacttccaggttctcgggaagaactgcacccgcagccggcggagctaccggggccggctgagcgggtgcttgcggaacaacgggttgacccacggcaggtgccgctaccggctggtagtgcggcgtcatggcgctggtcggaacgggttgcggctgctgagtcgggatggccagttgctgcggcgcacctacctggccgggctggaccggagcctgcggctggatcaccgggttcggcatcacctgcacatgactcggtgtcggcgcggcggcgggcggtacgttggcaaccaggttagcgaggcccggcggcagttgctgttcgttcggttgggacatctatcagactcctgcgagtgcgttggtcatgtcggaagcgccttccagcaaggtctcttgcgcggcctgggcctgcgcggcctgctgacgctgctgctctgcctcggcctgtagctcgtcggcgctcttgtagaactgcgacgtgtctacgctgaaggctgcccaaatcgtgtccatcatcttcggtagcgagatgcggggatcgagctgagcaatcggggccaggccagcgatgacctgggaagcgttgagcatgctctgcacagcggcggagcgggacagggccgggaggcccgtctcgatagccggtttgtgctgcttggtgatcaagccttggagtagcgcatcatccacctcggagaggcagacgtaggccaggggcgactgaaggttctcggccaggagcgagtaagtaccgcccagtgtgttctctgcctcttccgcagtgatgcgtacttcctcggcagtgacgcgctcggcgtcgcgctggttggcaccatacatgaacgcctggttcaagcgaacgactacggcttgcaagctctgctggatagcagccatcttgttgtagtcgccacgctcgtaagcacggacggcttccgcgccacctggcacgtagtcacccatctcggcgtcttggtagtcatcgactaccgcacccttggcctcgtccacgaggttcaggacctccagcgactccagctcgtacaggccgagtttctcgctcagcagggacagcttggcgaagtcgccgatgtagtcctcgacgtggccgcgaccgtagtgctcgccaggggcgaggttccaggtcggcacgatgtacgggcacaggtggataggccagcggccctccttgcccacacgcacgccgtcgatctcgtggtacagctcggcgtattccatcgccgtgcccttcttgcgctgtacgtgggtgtacaggtcaacgctgcccgaaccggacaggttgcggcctgcgcgcatcaggtcctgcttgtactcttcatccaggtccttggacttgtagcgctgctttaggacgatatccatccagcggccagtcgcatctcggcgcaccgcataggagcggagcgaccatgcaaccaccgtagcagcggcgctgtcgcggtacagcagggcattgccagtcacgatcagtagcttgatcacctgcgtcaggaccgccagggaggcgttctggaacaggcgctgtgttgctttgcgatccacccgagccaaggcagcggtcacttcggtaatgtcagtgtcccggctgtcggcctcgcggcggatcgcatcagtgagttcggatcggaagaacggaatccccgtggggaacagcgaccgcgccaacttggcggccaggttgttcaccaggagggcgccggcggactggaagtcgtgctctacgactccccggctgccggacatgggatcgaccatcaggtagggaagcgtggtcttggcgaactcgatggctcgactctccacgctcccatcccgaagtttctcccacagcatagctgcggtggttttcatggcgtacctcgtcagtagttgataccgagggtttgcgatacgcctgtgcccgcctgattccggcgccgtcgcgtgccggtgccagtggcatcggccatcgctcctaggtcaacctgcgccacgttatcggcggtgaggtcaacctgctggtttcgtgcgagctggtccgcctgctgttgcattaggcggttctgctcttccatcttgcgggcatcgtcttgtgcgccgctcaggtcggtgcccagcaggccatcagcgagtttgccgatgatggtcttgcccagcaccttctttactttcttgcccataaggcttggctctccggtagtggatcgtgtaccggctatcgctttcacgatggctccagcacacgagggggatttgaccccagccggcctgacggtggagttcgcggatgaactcccggaccacgcctgtattgcggtagcgcggtaggacgtactgccactgtgctgtgacgcacgggccgacgtggggatcgtcctcgaacacaatgcaggcaccgccggccaactggccatcgcggaataccaacagctcggttcgatcgttgccctcgatactgtccagcatcgtattcagggcgtcgtctttcgagcggaagagggtgaactcctccaactcctgtatcgccagccagcacaggccctggagttccgagggagtgccggcctttgcgtggactcgccagatggacttgttcatcacttcagctccactgcgatggcatcgcgtcggcgcaggcgtactgctcgcaccacgtctcgcctaccggcctggaactggatgtcttccatcgtggttccaggaccgatctgatgttcggggaaggtctgctctaaccactcgatctgctgagaggtgaacgtgacaggacgggccgtacccttgcctgttctcgatccttccactgtgggtgacataaccataggtcggtgggtcttcatagtagccatctatcatatctcctatgctggttagtctattctatctagaatccttcgtagtcatctagtctcatcttctactcttcttctaccctctggtcttccctgacctctctctcttcctgctcccctctacgagggccttggacggatgcacttgctcctatgtgggtgacataatcccctcagcagaagaacgcccaggagtcccgtacagcctccagattcaacgatcctctccggggcggggtagcctctatcccgagctgttttgccagttctacgagcacacaggggccgctgtacatggcgatgaactgctccctgatgtggacgtgcatccgatccacgtctgccgcataggtgcccatgctgtcgtggatggcctggatcgggatttcctctgccgcgcatgccaaggccgtcaggcccaggtggctgctgtccagcccgtggacgaagttcggagcgatgccgttggcgttgcgtaccgggtccagctcgtccttggcctcgtacagggtgacgtactcgacagcctcggcccgcagccgtacccggacctcctcggtcttcgggtaggactggaagacctgcatgccgagtggcgtggtccagtgcaaatccttggatgcgtcaggaagggccttagcgagccgctggagccattccatggcaaagactgccgagggtactgtctcgcgtattgcgtccagtatgagcgttgccatgtagcttcccaggcggtatgacgggataccctcgggaatctccaggccggactcgtccaggtagtccaggcagtggtctaccacgcccttgaacgtggtgccgtataccagcgtcatgcagggcttcttcgtcaggcttcgggatagaccagccttatcccacaatacagcgtagccccgagcctcgccttcagcactttctctgtctcgtgccagagactctgcaacgagaccgagaactcgggagtagatgtcagctttggcaagtccaggtggcagcaggttgacgtaggctccgccgatctcgtctcggagaatggctgagtagtgctggaggccggagcaggttgcatccatgtggacgatgaacccacttcggtaagcctccggctggcctgatgcgtaggccgcccgcaactccagcagacctgcgatggcgcacaggggcgactcgtcttccgggaagagactcggatagttctccgggccttcgtcgagtgctcgctggaagtcgtcccagcgttcatcaacccaagccgcccggtcgtcgaagtacaccttgtcacatccgagggagttggcgacgtggactttgagccagtacaggccgcgcttaccgagggcacgcttttcgtggaatcgcagacacgccttggcgatgtcggacccctggggattcggtgtgccccaatagtacatgcggccacgggagtcaacgtgcatcgggaagtacactgccttgccatgatgctctcgaacaactcggtagagtgcagcaaactcgcgaagcttggcggtatgctcccgctcgccggtgtaccatcggtggacggatcgcttccagcggttgaaggcttccagctcttgttcactggcgttctccttggcccactcgtcgccgagcgggaactcaggtttgtccgggtaggtgcgctgagggatgcccagcacaccgccaccggaagtgaagacgcgctcgatgatctcgtacacgtcgtggttgatctcgtaggccactgattgcagcgcgttgaccgcctcatacaccctgggcatcttgtcccggcccaggtggcgtagctgcatctggcgcgcccgcttggtctggtgcttggtacggcgcactagcacatggtgcttctgcgccttagcgctgtagtaaccgccatcgcaccagtcgttccacggtcgcggcggtgccagcatcacgctacggcctgggcctccccaggtcatcgccgccgaagggtcttgcaggaactccttggcttccggcgacggctccaggtggacgctcgtaccgccccgacctgtgaagcggttcggctcgaacaggccgcactgtatcagcggatcaccaatgaacttgccgaggcgcaggtagtcgccatccggcaggtcgatacgtgcctcttccggcagtaccgcgtccagaagagcgtccatcgtcttctggatgtgccggacgctgcgagtcctgctggtcttgaggtagtccagcgtccggtcgtaatagggttggttgaccttgaaggccaaccgcacttcgatctcgcgacagagcatcttacccatgtgggtgtaatacttcgtcgctgtgatcgttggatagttgatgagcatcgacagcccggcccgcagtgccatgactgcgaggtcctgggcgtcgatgatccgcagcaggtgccgcagctttgctgccggccccgccgccttcgcttcctggtgggcgaagatcgcttcggtcacgatggggagcatccgcatcaacatgatgcgcgccctcgggatgcggtcgatggacccttgggcaatcgccttttccaaggcaatgcgggcgtcattctgcgccgccccgaccagggcctcttcgtgggcgatctgctgctgtatcaggtccattccgtctcctatcgtctttcgattacgcgcccgatatcctcgggaccccactcggcctcggccaggctaaccgccccatccagcgtcatcgctcggtagtcacgccattccccgcagctcagaatctcagcgcggaaccagcgcagttccaccagcttcacttcccgctccaggcgctccgccatctcccggagaatgtccgggagtatgacatcgctccagtcctgatggctgaccatcgccggcgtgatgtacgctgtgacgtagttgaccccgatgccccgctcgttgaaggcccagatgacccgaacaccttcatcggtctcgtgctgtcgggtacaccaacagattttactcattacctttctcccggtccatcagggcccgctcggcggcggccattgcgttgaatgcctcatgcaccaggtgcatcaggttggactcgtcatccagcggtccgtcgatcagccgcttggactcgtgccggtgttgggcggacttgaactcgcccaccgtcatcttcttccagtcgtgcggcagataccccttgacctcggcagcccattgcatcattcgagcaagctcccgcttcagcagcgggaacccctcgactaccaggtgcatgggaagcttaccgaccttgcgttcttccagactcgcacctttgcggtacggttcagtcgtgatcgtcgactcgtaagagtccgggaatgctaggctcatgctacctccttagttgctcagcagggctttgcgctgttccgaggtgttgcgggtgtaccgcccccggctccagccaccacagccgccgcagtgatagtgctcgtacttgccggtctgcgtatgcacccagccctcttgcttgacatccgtgtcgccgcacttcgggcagcggatggtcggctcggcgtcattgaagtacacggccacgttgggatggccgacgaaccacgggcgcatcaggatgtacagctcctccatcgatcgtacgtcgtcgatgttgtacaggcgcatctcctcccaggcttccgggttgtcctggaggcaggctgcccacaggtcgaatccggggaacttgccgtggaggcgcttcttgatggtgcatgccttgtgggtcatgtactccagcttgcggctggtgaacgcgaattgctgcttggcgatgatcaaggtgtcgatcaccttgaacggtctcggcggcggcatcttgttcaggaagaaccgggcgttgatcttgggcacgtcgaagcgcttgccgttctggacgatgatgatgtcggcctcgtccagcagcttatgcagggcgaccagcaggtgcatgtcgtccagggggtcaccctggcagtccatgtagatcacctcgtcgctgtgcatccacttcgcacagaacgacaggatggtccagtcccgcttgatctggttgaggcccacgttctgcttccagagcgaccagacccagccctcgataggcgaggtctcgatgtccaggctcagcaccttcggaccctggcctaccacgttgcccacggcgccagggaacttgcgcactacctcggcagccttgcggcccagccagtgcatcgcgcccttcttggcgtacatgccgcgcgtcctgctgtcgtggaagcccagcttgatgcaccagttgcggaagcactggcggctcacctcgccgaagcgcgaatgctcggtcaggtgctcggcacccttcttgaggcccagctcgacatagacgtttcgcaggtactcattggtgaattgcttgcggagtttgctcatacgttcctcgcgttgtgctttgcgacggccatcgccgccttgcgtttggcggctgcctgccggcgcttggccagcttcgcttcgtgtttctcctcgtcggtcttgtgcagggggtagatcagcggatgcttcggcccctccagatacgtcaggagggcacgaaggtaggggatgatgtcggaatacttcatcgacttgcatccccaggaacctgccgcattcgttatcttgccttctgcggtgttacaggaccggtgcaggacgccccgcaccagccccgtttcgtggtcgtggtccatcaccgcttcgcccttcacgctgatatcgatgggcttgccgcagagcgggcacagcttgttctgctcggcccatagcttcagggtgaaggtgcgctgttgactgcgcggtatctggtagaccttcggctcactcgtcataatcgctctccctccgcttctggagcagcgcctcgtggtaggcgtccagctcgatgatccactggcggaaggccggacgaaggtcgcggcttaacagatactgcgctgcgttgtcggtaggcgttcggcgcatccacagcacctcggcctctgccagcgggttttgcttgatcttggcgtacgcctccaggatcatgtcgatggcctcgtcctcatccgtgatcggatggaggatgtcgaaggccgtcttcataccgcagagcttaccgttgaatcgatcgatccctcggatgttgtcagcggtgtcgccgccgagccactgcgccaagaagaacttccgtccatggcccttgagcttgaactggccggaaggcgtgtacgcttccttgaggtagccgaatccgccctcgatcctgctcacacacgccgtatcgatctcccaatacgggtagatcgtcatccgcaggtctttgtcgtcggaccggatgatggccttgtcctgcatggcgtaggcgtccatcatcatgccgtcgtccgcctcgaagaacgtgtgcaggatgacatcgatcccctccggcgccccgcctcgctcatgcacgtccgccacggcccgccgcagtggctccagcagcgcgggctttgccttgcccttgcgctggccctggtacggtttcatggtcggatacgtgtcgcggtacgccttcgccccacctgctgccgtgaggtgaacccgtgtccctgtgcagtgcgctaggaactgctgctccaaaatgagcttccagaatcttcggagtgcagtgtccagggtcttagcagtggccgcagccacataggcgggtccgtcggcgtcacacaccaacgtcccgcctgccatgctgcggtcgaactgcgcggatagtcctgccaggaactcttccgatggcaggcgcattagacctgcggtactgccggcactaccgggaccgccgggacttcgaccgctgccggagccgccgtctgagccacctggggcacgtcaggcagcacgttctgtgcctcggcagtacctaccacaggggcggccacattcgccacctggggcacgctgggggccgtctgagccactgcctggggaacagccggtgctgccgctacgccggcgtcggcggccacgttgggcactgccggcaggttgctgcctgcggcctgggtcgtcggcttgatgatcagatcgtcgccgccgcccaacatgatgtgcagggccgagccggggaagttggtggccgagcgaatggtctcttgcaggaagttcttggacttgccgttgtccgaggtgccttcgatgaacagggcgtcccaggtctccttggtcggcgcgtcgaagaagaagtattgcagcaggtccagcggcagttccggtacgttgtacgggctgccatcgaccgggttatagggcttcatgatgccgccccaatcgatgtcgttgcgttccttaccggcgttgttgcccttggtgatcttggtgcgcttgatcgggatgatgaacgcctggccgagcatctgagcgaagtgggtatgctgcccgctccagttcatcttgtcgaaggccagcttggtcttggacttttcgttgttgccgagggtcatctcgaaggtacggaacaggccgggcttgatcgagccgtcggcctcgtaggtgtggaacaggtcgtccgggcggctctgcgggttaccggcctgcgggttcacgtcgccccacaatgcgaagcccaggcggatttgaggcgccgggttcttgagcttgccctggaattccttggcgtggtcacccagctcgatgtagatgcagaagcggcccatggcggtgcccgccgggaagattcgaccgccgccaccgccggtggaggtttcggacatgtcgatggttgcggtctcggcagccttgttggccagggcgagtgcagcttgcagagcgttgagttgctgagtcatacgtggtctctcttgtgtcgaaggaagatttaagtccggagtagggaagggtcgtcaggcgttcgaggcgtgcggcagcgccttgaagacgatggacacactgcgcctggacgcaggccggacgaggacgttcctgtaccccagggcctccaggatggtttcgatgcggtctaccaaggccgccgcgctcccgccgtggtggtcgtcgaatgtcatcgtcttacgtgggtgggcgagggccattccgatggcttgcatggcgatacccgtggtgcggccagtacgccgctcgccgggcaggcatccggtctggtccaggaatgtcttgacgaactcgggcgtgtgcagcggatgcagttctttcactgaatcacctccatattgaacatgttcggccccatctcagccactgccgggaacggaacgtcggcgatgtcgtagcccaggcgctcgctcatgtagcgggcagcgtcggccatgatgtcgcgcacgcccttgttgacctcggcggcggtgtccttgtggcagtcggtgtacacggcatcgtgtacgttgttgatcaggaactcggtgaccataaatcctgggcgatgcagcatccaacggaagatgcgccctacgctcacggtcatcatgaacccagcctcgccctggttccagtagttggcgatctgcgtgtccttgaagtccatgaccgtcttgcgctgttccttgtcccagcgctcctgttggcggaagctgtagcaggtgccaccaggcgcttgccagaatccccggcggtactggcgccagttgccatccggccccatctcgctgaaggcgcctgccggcatctggtcctcggccttgtacattacgaggctggtggcctctgcactgtcgcggacgatctgccggaatgcgatggactctgggaacagggccgcctcgttgtccaggaattcctgggcctcttccacggtacagccggtgttgaatgcgataccagccgcactcgcgccgtactgcgccgagaatgccttgggcttgatgttctttcgagcctgcatcatgcgaccgtgccacgggtggttggggtccttcttgatggccacgagctggtcgtagtcgaacccgttccagttgttgtgcttccctgccaggcggtacaagtgcatgtcagtgccggccatcagtttcgccaggaggttccgatccttcgacagggccgccaacatcaccacctccagggcggtatagtcggtctcgccgatcatcccgtccgcgccgaagcgagacacgaacatctccttcacgcggctgccggcttccgggtcgtcctcgtccttcgacgggagctgctggaggttcgggcggctggacgacagacgcgttgtcgccgtcgccgtcgtattcagcgaatggtggatgatgccgtcgtcgtccacgtactggagcatccccttcgtgtccttaatcgtcccatccttgttgtaggtgtgggtgatgtagaacgaggagttgtccttgtgcagctcggccaggcgcatcaacagcttggccgcctcgaagccctgtttctccagagccttgagggcgtcgccgctggtgctgaacacgggcgacccatccgccagggtgagggcgcactggaactccgggcgcttgcccaggaatttctcacgcactacttccggaaggttggtcaggttgatcaggccggggaaccggaatcgctggtcatcatcccacttggtcgccgggatgtccgtatcctcccggaacaccttgacgctgcccttgttcttgccagcggagaacgtgatgaccgggccgtgcttggtcgccagctcggtgatggtgggccagtgccactcaccctggtcggtcacttcatggatcgggacccgaactgaggtactctcgattggagtcccccgcttggccgtaccgaagcgcacgaagtcggctttctccatccggccatcttcgtatggcacccggcccttgtaccgcacctcgccaccgtagagccatgcgctcatatggtagaggctggtatacttgaactcgaagtattccgggaagtcgggcatcagcttcttcagctcggcctcgatcccggccacctcttccagttgcttggcgtggttcaccttggcgacttcgaggtccaccttcaggccggcacactccatcgccgagaaaccgatcagggcctcgcagcgctccaggtagccagcccacatgccacgggcctgaagcttcatcagctggccgtagaacacgagggcggtattctcgatgtcgccgcacgggccggacaggtactcgctcagcaggtcctggtccatctccgaggtgagcacaccctggtcccacagcatcttgatgccgtccaccttgtgggtgccgccgtacttcggagccagctcgtcgagtgccgggtacagccacgtctgatgactcagcagatactcggcttgctgggtacaccagacccggccaccgcgtcgcaagaaggccaggtactcgtcccggtagcgggtgaagaaccagttcgattcgaacatggcattgtgagctacgatcacgtccacgccgtcgaggttgaaccagcggttgttcgggtcttcggcttcggcccggctgcggaagcgatgttccaccttctggccgaccttgccgtcaacatcgtcccgccagccggccatgacgatgtagttgcgggggtcaaagggcgacgccttgcgccccttgtgctcgtagctctcggtttcgaggtcgaggattcggatagtcgtcatttgctgtaccagttgctttgactgtactgctgcgccttgaccagtagaccttccagcacacggcggggaatctcctgcatcaggtagcggaccattccttcacgtccccatatggtcagttggtacagggagaccgcgtggcagaatcccatacggcccagcttcgcatggtcgtagtcaattcgaatcgacagctcttccgcttgcgggtccatatgggccttggtgcggaggccggggaacagcaggtccaggggttcgtggatatccgccagcaagcagcggatcatgcgttcttcctcggtgggcattctcatactttgactcctacctgtcgcagattgcgacgcagacgtcgcatgacccggtgcaacttacggcgaccggcgccgagggattggatgtcccgcgcatgatgccgaacttcggacccaacgtggtcccaagtccctgccatgacgcagatgcggaatgttccgtcctggctgatgaacacggaacccatgacgtacttcggatacagcagcgaatcccggttggtggcgtggtataccatatcttccgggtagttgcggttatgggactttcgaatcttcataccttcactccagggttactggccaggtcgcggaagcgactgaagctgggatggcggagggtgttggctgagcgttccatcgcggagacctcggcgatgcgtccatagttcggcatggcctcgtcgatgcagccgttgaggtgggcgcaggtcaggagctggatgtgctcctcactcaggccggtggcgcccacggtgccggaaccatcttccagctccacacggtagcccacgacgcggcccacgttcttgccagtcttgcccatcacgtacccgacgatacgcccgtccacggtgatctccggcttgcgcttgtagcagccagcaaccttgccgttgcggtaggtcaggctagggtctttctccatcgacccctcgaagcccatggcgcggtggtagccgtaccagcgtagtaccgcctccatagaacggcaggattgtgcggctacctggaagaagtacggggtgtcgccccgccggcaatcttccatgaggctgcggaccatggcgcggcgctcatcgtacacgaggtgggacttgcgcgacttgcggagcacgccgatatgggtggcgtcgaataccgcgaagtgcaggcacttcagctcggcctcggtcagcggggtcttgcgggccatacgcccggtcgcctcactgaagggcatgccttccaggtacatctcacagtccagcaccagaccggagtccaggccggactgggacagtttcgcgatgatgcgatcctccaggccgtccagggcagggaagcggcggccgctgcgggataccacgccatgcgcacccacgatggcacggcacccgtcgatcttaggctcgacgatcacgtacccgtgcttcttgatgatggcctcgacggccttgtcgttctggtctacgccgcgccagatgcctttctcgatatccaataccacgtcgcgcttgctcatcacacgttctcccatccgtagtacgcggccttggcccgcatcttttcgcatcgctccggcagtcgcgagccggaaccaacttccttgttcacgccccaggtaacgtccttgtgcaggtacgcacccagtcgcgggccgccctcggggtccggccagttgtacgcgatgcccacttggttgatggtgaagtcgaacgactccatcacccgaccgaggctgtcggcatcgtagtagttaaagtccaagtccatgccacccaacccacggcagcccacgagggacatcacgcccttgaagataccgccatcgccgccatcggcgtagtccgagcgccagccaccgtcccggacgaagatagggtccaggaccgggagtgccttctggatcaggtgctctgcacgcccccaggtcatgctatacagggcaacatccacgtccttgggagtggcgccgtgcatcaagtcgcgagggaacccaccggccaaggcgacgccctcctcgtgagtcgcgtcggagtacaggcacaacagcaggcccgcgacgctgcccagtaacagctcgatgccgcccatcggaatttctttggtgccttcgagcacccggctatgcttagcttgcatgatctacactctcaaagaaacgacaccgtgcggcgtcgaagttaatcatagcctccacgttcgaaggcttcccgtccatctggaacttgttcttcggcagggacaggccgcgcatgacctgttgatccgcaccgttgagacggcccaggtggatttgcacgtccacagcaccctgtaccgccgtcttcgaatccttgaggcaggactgcggtgggaacaactggtcgtgaccgtcgttgctgatctgccacgtcatgaagctgatgaagtcgtgacgcaccgccatctcgcggacctcggccaccttgtactccatctcgtcggtgcggttctggtccttgcgctggccacctttgacgtgggccatcatgtcccaaaacaccaccgccggcttcatcgcgtcaatgacctgctcggcctgggccagggacccaccgtggaagtccttgatgcggatcagctcagagtcgccgccgattttctcggcgtacatcctgcgaacctcctccgggtccagggcaagaatctcgcccacggtcatgcccagggctgccgagtacaggcgcggcttgatccgccggcccttgccctcgttgttcagccacaggatgggccgcccagggtcgaagtaccgcttgagctgcggcgcgatatggacagcgatccaggccatgaacgaggtcttgcccgcatcaggcggcgctgccaccagcaccgaggccccggcgtggaggcccttcatgtacgccggaagcaccagccccggcagcttgatgccgtggtcaccctgctcctccgccaggatatcaaacacgtcgtccgtcacatagtcggtcggcgtactgaccccctcgcggcgcagggcctcgtcgctcagccggcgcagctcatacgccaggtcgatgtcttcgccctggttgtactgcgccaggagggcatccaccctgcctgaaaaatccagttcgttgagctgggacacaacgccctgtagcgagtccgggtctaccggcttgtccagttggttgacgaggttcaggaccaccgccagttgctccggctggtagccacctcgcagctttatcagttcgcgtagcgcctgcgggtctaccttctgatgcgctgggtagaccttccagtattgctcgatccagtcgatgacaaagcacgtctccggccccatcatcccttcaggcaccacactccgcaacgtgcggaagcggtccttgtcactcagtgcgtgtagcgtcaatacgtccaattactaggctccttatctgctcgcgggtcaggtccttgggatcgaacccgtccggcgtgggtattacttggccttcgataagcagggaccggagccggcgcatcacgcctgcactaccacggacacctgccgggtcgccatccaagaagatgaaggcgcgcttgcaggtctgctgcaacatgatcgccgccagcctgtcgcgcagccttgtaccgttcagaccgacagcaaagacttcgggacaggcccaccgcaccttcagcgccgacaagtagtcttccgtcagcacccatggcctgcccattgataattcctggggccatccatggtaatccggggcaggatacccgtagcccacccacttgggattttggtcggcagtagcgcgcccaatccagcccgcgttggtagggaagataagccgatgctgcctttcgctgtacagcagcggcagccctggcgtcatcacgttgtagtcgatacccttggacagcagcaaaccataaagcgattgatagcagtcggcttgcgtccagtccgaggcatcctcgggccagggcatgaagcgttcttgatccgcgcattgtaccctccgcacatgcgttttctcgaccacaccaccctcctgacaggagtagcagtaagccacccagcggtcaggcaggttcttgcaggtcatgttggtcccgccccggctcatgctcttgcatcccaggacgtgtcggaaccggcctacctgcccaaccgccagggattgcgcttgctttagccaggagtcgcggcgcagtgccattggtaccattcctcccacaaaggccgcagcccacctcgggcctcgaacatgtcctggaggtgccaggtcatgcgggcgccgtaggcgggccgccgttgttctgtgtgagcagcacgcccagggccaccagactgaaggcgactccgatgaccagcggtttgttctcgataagccatgtcatcacctcatacgtcatggccgggtgccctcatgtgcaacacgtccggctctcctgctgtccagttcgcctcgcggtgggtggtgctccagcccaagtcggcgtagaacggctccaggaactcgaagcaggtcagatactcggcacccgccagctcggcggcccgcaccagctcagcgccgataccctgcctgctgtgtcggtcatcaacgcacagggccttcagttcaccgcccactacgaggcaggaacctaccatcagacctgacaggtcgaaggcaccgagggccagcacgcctcccttcttgcgccagatgtcgctatcttgccagccactccggcggaggtggagcacacactcggcgatactcgcactcagctccccggctggactcaggctttcccggagcgggtggtacttccgctgccagaggaaccactgccaccagttctcggcgttgctcggggcttggatgctgaatacgtggatcgtcctgatttgaatcaggccgggatgcaggctcagcggatacaggctcgtcttgctcatcttcgatctccctcaacttgcgctggccgaagtcaatcaggtcctgcgccatgtaatgcacaaggctgccggcacacgccgccaccttgtcccaggttgcccgcttaccgtcgatgcacgggaagacagcctcgtcctccagctcgacgccgaagcggtatccgttgtaatgcgtgaaatggtattgcatgttcgtgatcctccagactcacacgagagggcgctctaggaacgccctcggatttgaccccggagtaggccctggtcgcttagacgagcaggtacgtcagcacgctacccacgacgccgccggcgatggtggctgcgaaggttgctgcctgccaggtgtccttagccgccgccttcgcccgctcacgggcctcggcctcagccttcgccacggaagcgcggaaggtataccgcacgccggtcagcttgctgatgagctgacagacggccttggtcggggccaccgtcagcaatcgctgagtctccgcgccgtcccaatacaggccggcccgttgacctacctccaccagccgggtcaaaccctgcttgaggccgaacagttcagcgcccatctcgttattccggtccgcaagcttccgtacccggctgcgcagcggtccgtccatttctattccggcatcgcgcagggcacggtttaccgccagcttggttacgtgcagatcgtgtagacgtacctcgaagtccttggcggacagcgggccggccttcttcgataccagcgggaataccttgagcagcagtttttcgtactcatcggcgcgcttcgcgtcggcctggcacaagctggccgctacccgcgcctctagatcggcatagccacaggtgctgacgcgctccacgttatccaggcgcacctccaccttaccaccgtcacaggtgacgccgctcacacgggcggtgtaagtcccgcccgaagcctgtttcttgggcgtataggcgtgggcgaatgcccggctcttggccacccggcgcatctccggggataccttggcacacggcacgccgaacatgctggccgccagcttggtgaagtgatcgttgcattccattgtcagactcctgccagtttcagggttacggccagacctgcggtcagcaggcatacccaggccatgatggttgccttgcgagcgcggcgctcttgtgcctcgtgggcatcgtgcgctgcgttcaagtcgttctggagcagacggatcgtcgcctgatggctgcgaatctcgtcgatctcccagcggcgcgcccgctcggcggcctggaggcggcggctcagggtgtcgatatcctgggcgcgctcctcgcatacagccagggcggattccaggcgatcttccagggcctggatggcgggtgccttctgtacgctcacgctgcgtaccgggccgctgatgtgctcggggttgtgcttgctcacgttgactcctcctatggtatggctagctcgcaataggcccggcagggccaggcctattacgtgcgggccttactcgccttgggcgatggcttcgtccagggtctcggcggacgctgccggggcctgcactgcgcggatggcaccggccttcacgtccagcagcttggccggggcgctgtcgctgaagcgcaccagtacctgatagacgccggcgactacgctgatgacttcgccgctcagcacttcggctttctcgcccttgccgtggtcgaaggtgatcacgtcgccggcaacgaggctggacaggcgctcggcggtttgcagggcgacgaccgcttcgttgtagacctcggtcagcttggtcagggcgttgtggtggaagacgacgttgttgcggaagtcttcgacggtggccggcttcttgatgagcttggcgcccaggacggttgcgacggtggtttcggtggtggtgttggtcatgatgtagctcctagaggttggttggttcgcggcaaggaatggccacggtggaaggctggcgcaccagccttcgccttggtcactcggcggtgagtgtcacctgggtccccttgtcggcgagggccatgcgccacccgtcgttgcgcagcacggtgggacgcggaccggtcaccttggcagggccgtcgtcatggataaccacgggcagcactgcgggacggcccgtgctgtcccaagctgctacgccgatcaccagtgtgccgcgcttagcctcgggctgcactacccgatacatctcaccggaacgcaattccgtgaggtcgaagagacggcgttgctcgcggtcggtgttgtgggtatgggtgcggatcatgttacctccggtaggttatttgatgttcaggtgacgcttcagcccggtcagcaggccccggcctactgcacgtagtgccaggaatgtgcccacgatgattatgagtggccagaagcacccgatcacgcatgcgtcctggaactgcacttccgtcgggttctcgaacggcggcgacactgcgatgcagtagcaggcgcctgctagtatgccgaggcaacagtacaagccgagtacaagcagcgcggcgatcattggccggcctccccttgaacaagtttgatgtactcacccgcacccaggcggcggcaccgccagtctgtgttgagaatggccgtacccaccgcgtactgcgcggggttcatgctgtgcagtacgatgactgcctgagcgagggcgggcgtctgcttggtcgccagcacaacggcgccctctgccacgctaggcgtcaccaccttgtagagttcacctggtgacaggcgtcctacggacaagactggcggcgccgggtcttcaggcttgacatatatggtcttgacggtcattactcgccctccttcacgaggtcagtgcgatgcacctcttgtacttcacaggccgggtagatagcgaccgcgccgccgaggaaccagagttcgacgaaggcgtggccggcgacgatgctgtcggctaccacctggcgagtagttccgtccttgagacggacgacgtaggtaggattcatatgcgcttgctccagttcacgatgaggaaccggctcccaagcaaggccgatcggcgatgcttgcgaagccagcgtttggccgccttgcgtgagtagaatcgcaatggacgcacaggtcgcttgcgactccacacgaaggcacagcctcctgatgggctgacggctatgatgagccacttcatttacgggtcggtagctgtctgatgaaccgcacgttacgggcctcggcctcgataaggcgcaaggtacgctcgcagcgtacgtggtagatcgtcatacagcgggacggtcgggttatggcttcaatgatgcccttggtgcctgccgcgtcggcacccaggtagcggtcgctgtagttcaccagccccacgcggtggccgatacggtagggatcacgcgaggacatggtacgaggttcctgcaatgtcgaagatcgggcgcccgttcgcgcagcccttgcggtattcagcgttgatccagccatacgcctggcaggtgacgtgcccggacagcgggctaccctgtaccagcagcacgtcgaatccttcagagtccaggtcccggctcaggcgatacgcttcgtcatagcggttcacagttacgccggcgcccactaccacgaacccgcctggggtcaggacgtgcgcggtattcaggtcacccatacggaagccatgggcgcacagcgccttgtcggctgcgttgaatgcgttcgacgggtccttggggattgcgatcaacagagtattcaaagcttgcatggtttagttctcgcttgtgatgagtccagcaatggccccggagtaggcgagggtcgcccgccagggccatgacttgagtcaccgcttcaggaggtggatgaagagtaccgtcaggccgctgaaccacaacatgcgcagttcatcctcgccgaggttgaggccgagttcgaggaagggaagggcgatccagaagtccatggtcactcccccttcgcctggacggcctgctcgccgtacgggaactgagccgggcggctgtactgtgccagggcgatttgacgttgcaggcgttgtttgaagctcattgtgtttctccagttgtcattgattccagcggaacgcccgcttagcaggcgttcgacttgagtcaatgggcggcagcgcgcttgctctgctcagcgataggtgcagccttggcggccagcgcttccaggtcacccagcagttccatgccgacgatcaccttgcccttggtctgcgcctggagcacctgctttttgatcgtggccagggcagcggccaggttaaactcctggtccagcgctttctcaggcttgaagctgtaccacgggttgtcggtggcgccaacgagatcggtcttgccgaacttgttgtacaggaagggcaggtccttgttcgatttcttgtcggtattcacctgcaccttgccatgcagcaccagccactcgaccagcgcattgcggcggctgcctttcggcatggcttcatacagcgccttgactacggtcacgtcgccgcactggtcgatgtggtggatgatcgacaggccggtcagttggatggcttcgtccagttccttgccacggacacggatggcgtcgatagcgcggttgatctcttcggtgccacggaatgcgattacggttttggagattgcgttggtcatggtatgtacctcagatggatttgttcaggtaagcagcggcggccaggtagccagcactgcggggagtggtcagggtatcgacgcggggctgcttagcttgcgcctgctcagccttgcggaagatcgggcagtcggcgcctttcggcatcctgtgcgctagatcaatccggcgtgccttgtcgcggcgagccttggcggccttgcgttgacgcggcgtcagttcattcacacgtggcattacaaacccttcccttgcgacttcttagcgttccacccctttaggatgttccgcgccttgccttcgctacccttcacgaaagccttctgttcagggttgtggtagcgtcctggcgctggctccgggtcggtagcgtagcgcacgtcacgcatcttgcgaagctctttgcgcccttcgacgttatcctgtgcgatgagcttagtacgtttggcttcccagtcccgccagtacgctacctgagcagcaaagggtgacttgggagccttagccttgaagtgtgccatcggcaatcctcactaggtctgtctcttgaatcccctcggtggaagggcctcaagggacaaaccttggcattggcatagtccctgtagtatcagcggttctggcttgtcctgcgcatactcttcgggatcgtcttcactcatcccccgtaccctttgcgctatctgcctggccttgttcaatcggcccgccgatactacccagcatactgtcagtcgcgattaaccgggtattctagtcccgatcccactgacactctattcgttcccaccggacctaccataggccctttgcttaaccgtggacggggaggcttcccgctcagactcttttgggtgagtcttcagcacccgacaggtattccctggaaccctgcctaaccagttgcagcttcggtcaacctaccgcaccagtccatgtaccgctggtgaagcttcgaacctctaccgccagatggctcagccatcctttcgtcttgccgcgcatgttagagacttgcgcttgtcttgtcaatcctctgtcggggattagttcgtccagttctccggcataggcccttttgctgaggggccatcaggtggtgcgaactgtaccgcgtgtcctgcaccgtgtcaatccctgcgatgatgcctgccggccttacacatcgttggtcatgccctaagagtttgccgtgtcccttgcgcctatggcttgtgccgcgcttggaaggttgcaatctcccgtcgttctggctgcgcatcctaccgatgtcctggcagggtgtcaacccctgtctccaggctgcctgtagaggcgttgttgcgtgaagacagggcgaactctacagacctgccgcccacgtgtcaatacccgcgccagggcgctccctggagccttcccacgcgtatagagacccacgcgtgcgaggcttagtctggctagccaggattatcgttcccaggtaacgcaaatccaccacccagggagcagccacccagccagggccaccaccctgaaacccgcgtggcactaaggctgcggttatgtcacacacaatggacaaataggcgtccatcagcgccagcggcgcgaccgaggcaggccgagggagtggcgagggtaagacagcaggaccagcggtagcgccagggagacagacccagggagcaggactagacaagccaggtagaggcgagtagagtacgcggcctagagggaacaacccaggtaggaccagggaagctccagggcagaggcagccaggcagagggcaagggcacagcccaagcacaagaggcaaggccagccactcccgcaaccaccaccagaccagagggcagaggccccaggaggaacgagatgctgagcagacaggacagagccgagcgagcctggcaccagcacgacgcagcatggcagcggaagctagccaggtgggcagcagaggatgagcagcacagcccgtacccagcggccagggccagggccaaggatgaccggaggctagcgctggtggcgcaccgcagggcgctgagtatgagccgatggaccgccaccccgccaggggcttgacactcccggcaggatgcgtagaatgggcggcgaagggcagggaagcccaccgccacccggcgaagccggaagctcccagggatgacccaggcaccacccaggcaatgcgaggggatggcccaccagacggagggcctacgggggaagggtgggctgatcagagtcgggagggttctcacacgacgatatcaaaattggacccggagtaactactcccagcccaggccagccaatccagccagccttccagccgacctcaataaaattccagtagttccagtggagcacccgactatgcaggtgctcggcttgagctactcgatcacttgtagaccagggccttggcggtctcgacagcagccatcagctcgtcgagatgcgcgaccagttcagcgcgcagcttggtctcgttgtagccagaacccagggccgcttcttccagcggacggatcaggttctcgatggtgccggcgaaggcgcggaggtctttctgagttgcagcggcgaaggttgccatggttcagttccttgtgttatggatggagtcaggttggacggggctgtagctcagcccgccggtgcggtgtatacgaccttggtgatagcaccgttggctacggtcaccttcacggaaccaccgccgtccacgggcagggtgtcaccgttcttcaccttgtaggcggtgagcgggtccggtggagtagcgccaccctcgccgcccagggcggtggctgctgcgatcacagcggtggccttggccttgacatcggcctcgtccatgtcgtgcagggcgatgcggttgtcggtgccgggctggcatacctggtagaaggtcaggccggtgttacggccagcgaggtattggtcacgggtgttcgccatgtcaatctccttgattcaaggcgttgcataggtccagggcgtcctgataggccgctacagcgcggattaggccagcctgggtggtagggtcaattagtgggtgttcgcacagcacagcgggcgccggggcggttgcacaggctgtcaacgacagcagcaggcacaggccggtcagcccacgggcggttctggtccagggcacggtccacctcctggcgctgggtgttggtcttggcggcaacctcctggacgtggcgctgcaaggtgacatagcgcacctccagggcctccgcacgggccgtctgccgcttgatctcctcctgggcgatacccaaggcccggtagctctggacgaagccgtatgaggctcccagggctaccacagcaaggacgagtattgcgacgatggttcgaggcattgcttgatctccgcgttgcggcgattcacgaggcccttggatacgaccttctggccgtcgatcgtgaccttgttccacatggccagggcttggcagccctcagtggcgcggccttggttgaagcgcttgaacgctgtgctggttgtacagactggacccacgttgtagcagaagaacgtcagggcggtttgctcgttgacgttcagcggcaccttgatggcgtccaggacgatgcgctcgaagcgctggtagtccttgagcgtcatctggtagcactgctccggtgtggctttgtcacccatcttgaccccggcagtggtgccagaacagatggtgggtacgccggcgatgtctcggtaggcagtggtctcgctaccttccagggcgacaaggccggcgagggcagccgcaagggctgcgccgcgcaggggcttgttcacttcttgaacctccggcgaagctccgcgatgctatcgagcatcttcgggagcagggtgatgagctgggcgcccacgtagagcgcggtgagtaccgcagcacagaggctggcgatctcatagggcgagtaaacggcgatccccacgccggtgacggcgagggtgcctttgcccgcctcggtggcggtatcgagcatcatagtcttcgtccttttgggcggcccttgcgacgctcccggcccatgccgagagaccgaaggacagacttagtgtaacccatcgggttgttcagccattccttcttggcagcctcttcacgagcgcgggttgcggcttcgtcgtcctttacgagcgtgggtgctagctcgcggacaaggccctcaagggcatcgatccggtcgtccttcggcagtgagcctcggtcggtggtgatgttgtgaatctggtggaacacggagcgctcattgcgcttgtccgctgggtactgctgacaggccacatggtcggaatccatcgccgatacgtggaagatcagacggtgccgctgcatgatgggccgcagggtgtcgatgatgcgacgctctttctgtccggacttctggcggtcttctacgccgatcccctcatagcggggcttgttggtgtccgggtcgatggatcgcatgtggttgcggaagagctggccaactgcaccagcgccgaggtttttctcgacatagatcaccttgacgccataacgcgcagccagggcaatacatttctccaggttctcctcggcaaagccacccttccagccgccgatgctcacgacgtggatgtacgggccaagagtcccgcccacagcatacgacagctcgtcgccaccgtcgccggcagggtccacgaacatcgtcatttgctggagtggtgcccagccgccagccatcagcgccggcaggtacagctcaggtttgatgaccgggaatcggtgggcgtcgaacttgagcttgaatcgctcatcggcagcccaggccacttgctccggcacgctctcatgcgtggcgtcgatgaacagcaggtcgcgcagcttgagctgcatacgctgctcgtcggcgaggctggtgtccagcatgtactgaagctggaagccctcggggccttggtcaagctccttgtcgagcaggtcctcttcgttgtagcgctgcggatcggcagcccagccacgggtcccatccaggcccttaccggtgcgcgggttgtggcctttctcctccaggcgggcaatgcgcgccaggatagagggtgcgagccagtcgccgtagcgctcctgctcgtccagggtcgggaaccggcccggccagatgcgcatcaggaatccccgtgcgggtaggccgttgtagatcgattcacgactctgcggcgtgcccaggtagagaatcttaccgtgggtacagatagaggtgaactcctgcgactgccgcgtcagcttggcccgctcggtggcggtgaggccgttcttcgtggtctcgatgtcgtcaggaatcaggatatcagcccggtagccctggagggcggcggtgatcccgatgcagttgatggaggccgatttctcgacgcccttcaacgcccagttcacgtcgaagctggtggccgaggtgcggtcacccatacgggcctcggggcgcagatacgccagcaagtcccagtgcatgatcagcttcgtgatcaactggccgttctcctcggccttgtcaccggaaccggataccagcatggcgcgggtagccgggttctgtgtgatgcaccataccacgtagatacaggcgatagtggacttggcttcgccgcgctgggcggctaccatcgccttgttgggcgagtcctgcatgaagtcggcgatgtccaactgcatccaggtcatcttgaagccgaggaacagcatggcgtccaggcagaagtcccggaagcgcgggtacatgtcccgcacttcgtgggctatctggaatcgttcttgcggcgtcatgctgcctccttaatgggtgtacaggcgttccatctcgtcgtcggtctcgccggcgatgaagccttccagcgcgatgcggcgattctccttctgagcctgccgcatctcctcgcggaggcggtcgatgttgatggtgtccgacggatcacaggtgatctcgttgtccttgaggaacttagtggcagcggcgatatccgatgcggggatcgggatatcgttgtccatgtaccacttgaagttgcgttcgatggcggtgcagaccagctcgtgaagcaggcccagccgctcagcactcgcggtctgctttttgctcattacatgtgtcctctgaattggacttggaagcgtaggttggttcccatgccgcacttgaccagaggccggaacaccttgccggtgtccacctccaggtgctcctgggtgtagttctcgttctgcgtgcgaacgtacatgttaccgcctcgggtgtagggtacgatgacctgtgcccacgcagttgcgccggggcgcttgtcgtcgagggctaccttggcatagtccacttggcccagctcaactacgatacgacggccctgctgcacgttgaagtacgatagggcgccggtcttgtctgcgcggacgaacacaaagacgtagttcatattgctgtcgaagtccaaggatatcgtcgagatacccgcgtcgatgccatcgccaatgcgcacttcgttggtgccgtcctcccagccgaggtaggtgccgtcattccgcagcatggtgcgccatacccggacgaatagcccctcggaggggtcctggatggcgacccctccgtcgcagaagtcgagcacgtcgctgatgtcacgacgtgccctggcacctacaaacttcgacttggccttgggatcgaggtcttcgttgaagtcgtagatcagtgccatgggttatgccctcgccaccgagaactccattgtaatggagaactcctgagtgttgttcttgactacgggagggtcgatggtgagtgcgtagttccgcccattgtaaatctttaggtccttacagccggtgataccccccggcatgttgccgttatctacggtggcccgtagcataagctgacccttgtaggtgccgcgagtatatcgcgggtacagcttcacccactgaccgtcttggacatcggcaccggacgcattcttgccgtcgatccgtggactctcgttgtagaagatgtagcgctcaccgtagaggttacgccggttcgcgaagggcagcggggtgaggcggatggtacgctcaaccccggagatcacgaacttggcctcggccatcgccacagccttgctgcgcagctcatactgtacgtcgagaatctcgtcagcctgaactaccagggtggtgggttggccggcggcgtctttgatccgggtgtaggatagtggagtacctgccggaatcttcgcgccggtgttactctcaaaccccaccgcggattgagctacgatgcccacggtggccagtacctgaccggccagggtgcctattgggaagcgccaccgcttgtgccagtaaatccactccccgtccaggcccgaggtcacgtcgccgttaggggcatacgaggtggtgcgccgaacttcttccggcagggagggcgcggcggggttagggtccgcagtgctggtactcacggccagggcctgggagaacaggtcagaggtatccatggcgcaaatccaatcaagacctgcgttagtgatgaggttgtcgaaggtgtgttgcgccaggacttcacccgtggctttcatatgggtcaccgtgtagcgacccttaactcgcgtctcaaacattggtcagttccgcctgtttaattgctgttgaggtggtgaaggcgtaaggctccacgatatactcagagtatacgaccacaaccttcaactccgcgcctaccactgcggtctgcgacgagaatgcgtaaggttctgcggtgtagtccttaaccgtatcgcgcagtaaaactgcatggatggcaggtcccgtcaggaacccatcgccaccgccgtagccgagctgagtcagcgaccgcagcagcacgcttaccacactggaggtcgcgtggtaggtgtcctctccgggctggttcaacacctcgtgcagggtgtcgcgtgttagcgctgccacgatgttcggcctacaagaccatgcgtcatccgtagccaggatgggatatgggtaggtcgccaagatgggcttgggccgccgaatttgagaggccatgatgcccgcgataatgccgcgcattattcgtcctccatggctccgaacacgatccagtggttaggcccgagacgcttgagggtacacacgccattctcgccgtagagctgcatggtggtgttctgcaaccggttgatggtcacgccggggccggccacgatgttgaggtcgcgcacacccgcctgttcgaagtgaacctcgctgaactcgatccagggtgcatccgggtcttccatctgcatggtcagggtcagcggcttatcagcggtgatgcagcggttccagtaaccacgccagctcgggtcgatgtccgagtcttccgtaacggtgcgaatctcggcgaagcccagggcgcggcgcagcgcttcgttagcggcgtcgagtgcctcctgtgcaaggcggcgggcctcctcggcgatacggatcgcgtcgagaacaccatccagtgcgaggttcgcggtgttgatgccctcctgcacggcgtacagaagctgcttgttgttcgcgtcgatgtagcgaggcaggaacgggatgccctggctgaactgcgtatccggcacttgggcgggggtgtcgcggaagatgcggacctcttggccctgcttaggcacttccgcaagctgaatgttggtgttgtccacccacgtatagtcggtggtgagtatcttgtcgacctggacgaatacgtcctcacgacgcaggaatgggaagtcgagactgaatacagtctcgaccccatctgcaacgtggatggtctcggggttcttgaaccgagccacgctattcccctttgatggattccaacagcaacttggttgccgggaacacgttgacgaaaggcagtgcgcccgccgcgccgttgacgatatcgccagtggctgctgccgggtcgtcgccggttacgaggtctcgaacgcctcggaacacttcgttggagtgttcagccagtccgaagaccggagcagacattcgggagtggccagtgaccacaccccacatatcggcggtgaagcccaggccggcagtgtagccgatgccgtcgatggccatcttgcggatgccttcatcagaggtgtcgaacttgccattgatcgctgccttggcacccatcatcaacgctgtgagcggatactggaatgcgaggagcgaggccacgccaagcacgccggagttctcgtaggttccccggaggagcttgttgtgtgcgaaggccacgaagctgcggaactggcccaggatttggccgaccggcgaccgggcgaagcccgagttctgaccgaccctgccgtacagcagcgagtcgtccatgatccgcagtgcggtgttcatgacggtgttcacgtctgcttggctccaggcgccccaattcatcgattgggcgttccttcctctgtatgtgacataaccgcgaacccgcgccaacactggcgtccagtccacgtccttcccgtactgctggagcacgcgaagggctgcttcatccccctgagccgcccgcgccaccttgttcaaggtgaggttggcgttcatacgggattgccagttgtggatgaacttcatgccgttgagcaccgggacagcctgcttacctgcgtgcaggaagcgatccatgaaggtgtcctggctggcgaggaaggtgtcgaactgccgcttccagggcttcatgcggatgtcgttggcgaggttcagcccgaggacggtctgcatctcgtcggcgaggtccgggttccggcgcatggcccccacgaagtcccccatgcgggagttcagcatggccttcatgacgttgaagacgccctggcggtgggccatggtggccagctcagcaagctggtacacaccggagaacccgagcatggtggcgctggtcagtccactggcacgctgagctaccgggccgagctggtgctcccgaggtacgttgccggtgaagtccccgaagacaccccgcagttggcccgtcagctcctgcaccttgtcggtgcccaggtgcgcggcctcccgctggtactcccggatgaaggcctctacctccgagtcgccgggcatccctgcgcgggccagtgccgagcggcccgacatgctgccagagtagttctccatcagcctgtccaggtcccggtcgatcaggtcctgcacgcggtacacggtgccgttgtggttgatctcagcggtcatgtccagggacagccggcccttaccgtacttgacggtaccctggtcggattgcttctgctcgatcttggccatgatgctgtcgaacttggcctgggacacgttggcctcctccagcgcctgccggatgaatgccgtgtccgccacgcccatcgcgcccatgaactcagagcggatgccggtagcccggtcacgcgcccgctgcacaatggcctgggcgatggtgtcggcgtcggctcgctccagtccagggataccccggaacaccgcctcgctgattgcacggcgggccagtccaggagcggcctcgtccatctgagccatcttggaccagttccaggagcggtggaagtatccagggcgcggggcgaagtcctcgaacccacggacaccagcctccctggcgcgctgccccatcaggccgtgaatctcgtccgagcggtcggccagggccttgatggtcggcggcaggttggggtcaacccgaacgctgccgtaggccgtccattcgcggtcccggcgcagcagctcccgcgtcacctgctcgttgagctggtcccggacagccatcgcccggcgggagttcagggcgcgggcggtgagacctacgccctgctcggccatggccttcgccatcatctcgtcgtaggacttgacgtacccctcgaactcgttccggtagcggcgcaaatagctcgctgcgttgtcgttcgtgctgaacccatcccgacgtaccgggtcgtcgataagacggctcaggagtcgccgtgcgccctctccaggctgtgccaggaggtctgcctcgctgaagaacctgttcacgaagccggcaccctcacgggcacgttcacgggtggtccgcacgatggtctccaggctggcctcctcggttaccggagcgcccttgttggcccacttggcctgcgccttagtgtagccgggcatggcctccataatcgtctcagaggcggccaggacgcggctcagggccgtgtcagcatcggaccgcagacccagtagggtgcggatgccctccacgaagcgggaccacaggcccggcccgccgtcactgtagcggaggcggttcagggtcctttggaagcgggtatccgtcaggccccaggctaccagttccttgacgttggccagggtgttggagttaccggctagcagcgtctcttcgaactcggacagttgccgaccggcggcgcggtcctgcttcagggcgttgagcacgttaccccggacgttctccagggtctgcatggcctgagccaccttcggactcatcgcgccaggattccgcaaggcggcgttcatcacgcccacggtggcagcgtgaaccgcctcgtggagcacggtcaccgggttggtgccaactcggccaggtgcggtgctgccgcgtacctggaccaaggtgtcgaggccctgggtggagtgaatccccgccgtacccggtttgaggaaggcagagctggcagtgtcaccgccctgcaccacacggaacgcggtacgctgccccaggccctccagggtcctgatggtatcagccaccttggcggcgatgccctggagaggcttaggcacctctgcgtgggtcttaaggtggtccaggacctcagacagcttccggcccgataggctatgcagctcgtcgccgaaggccgtgtcacgtcgcgggatggccggtatctcggcctgttccaccttggcgctgacacgggacagcacggtaccctcgtccagcaggtctaccacgtcaccggccttgaatccgcgtgcggcggcctcctcggcggtcatggctacttctggcagcccgacagtaggcgccgatacttcgggcgcatgcggctgcgttggggcttctgcggcaatacgtcccgcacccgaccccagcagagcacccacgccagcgccaagagcacccgccacgatgtaggttccggcatccacgtcggcccctgcggcatccagcccagcaacatacccgacttgcccagcgccaccagcagcagccatgccagcacgaccgagccgcagagcacggccagcgccgaaagtaaccgcatcaactgccagagcggcagggtccagcatgccagccgcgaagttccagtacgggttgtcccgcacgatttgctcgtcctgctcataccgttgaatcctcgacaggaggtaggccgcgtcctcggcattgccggcacgggccatgatctggagatagttgtcagtcggctggatacctgccgcctggagcgcctggaccccataggtcccagcgtcgaagttagggtccacctcgccggtactgttcgccgcaaggtctgcgtcgagctggagcgcatcgccccagcgtccgacgagggtggactggttccagagtgcggaagcacggtcaagggccggcagttcctggtccgctacgatgcgttccagttcccgcgcattggctcgttggcccgctgccacgttccgttctccgatctcgccacccgtcagggcgtcgaaccccacggtaggcaccgcgtcaagttggccctgtacttgggcctcgtcgagctgtgcttggtcaaggggatacttgggcgtcatgcggcccttgaattgctttgccatgtcttactccgctgttgcggcgctgtaccaatcgacaccgatttgactcggtgtatcgaagtggggcgccatgcgcttgatgaatgcctcggcccggttgggcgtctgcgtgtaccacttgctgtttcgcacaccagcctcgaaggcttccttgttgcgatccttgatcgcctggaaggtgttacggaactgccgggcacgtccttcgcccatctggaaggccataccggccaatcccaggatagaggcattgttcgtaacgcccagctcgtcggccaacctcacaccctggtcgagtgcgcggtcggtgtcctcggcgaaccactgcgcggcttgctcgggcgtgactgtagtgcctgccccagcattgccactgcccaggtaatgccccaggcccacactataaccatcggcatccttatacgcctcccctcggtaagcctcgaactgagccagttccttccgccagttgaacacgtcctgcttcagcatgccggcactgttgcccccgttcatgcgaatgtccgtgccactgaccttgacgttggccccgtactcggcgccccgcatagcgttcagcttgtcggagttgcgcttgagcacctcgttgcccaccgcttgtgggtccacacgggtgcggtccagggcgaccccgttctcgtcgtactcgacggccaggaggctgccactggtgcggtcgtactcgaaggcgactaccgacttgtagccgaggagtccttcgacatgcggcttgtgctgctcggccaggacggttcctatggtctcggtgtcgttggtcccgaatagctgctcggcggtggtgccgcgaggcaggatcagcggcgcgctatcgcggcggctgaataggtccccttccttcaggttccgaccttcgcctacctggatggtgcggttacgcacgttggcggcggcgatctccagcagggcctcgcggcccgtgtcgctggtgagcagacccgcatgcttgcggtcgctggccagccagttcgcctcgtcgatggtcgcccggcgatacatgctcaggacggcctcgttgttgctcaggtcgctctcgccggtcagcatgttccaggctcgaccgaagatgttgttcacgaacttgtcgttgacctgcttaccgaggttgtccttgaatgccttggtgttctggcctttctcgaactcgtccatctgcttcacgacttcggcgttggcgctaaactcgcgcagagcttgagctggtgcgatgcccatcttcatctgcttgagtgcccaggccacggcgccctgctcggcttccgggatgccggatagcatcacgttgccggcggatgggttgatctcctgggccgaggccacctgttcgaagatgctgttcagcgtgttgaccagctccgggtttgcctcgccttccttggcggcctggatcatgcgcaccgcgctgcctacggactcgccgtaggtcttggggaaggtccccaggcgcaggccgagctgtgtgccctgcacgagacggtcagtcaggcttgagccgttggcggcctgcatcttgtcccactgctccagcgcctcggtgacgttggtacccagcgtgtggagggcgttgatgtctccggcttccaaggccgccatgatgccctgcatgcgctgagcgttgcccaggccggtcatggccttggtcatgaacgagatggcctgagcgtcgctccagcggccctcctcgaccatgcctcgtgagtacgcctcaacctcggcaaggtctgtgatggcgccgttggccacccgctgctggaagtccgcgtcggcccgcagggtagccatcgattccttggcacgggtctgtgccttcgatttttcatagaggccgttgagcgcacgccggtcgtcaaaggacatactgtccaggaacccggcatcgcgcaggccctcatagatgccccgctggttcatgtccaggctggccgccaggaactgcatgcctaccttgtcgcgcacctccagcgggatatcctcggaggtcatgatgttggtatagaacaggccggcctcttccaggctgagctgccgggacagttcgtcgccggtggcctgagcctgcacagccttggccaggatgctgttaccctgggtgcggaagccacgggcggcctggtcgatggaccagtccatgtacgccttagcctgcatgccgaagagctgttcctcggccttctgctgctgcgccagcgcctgtaaggcatcgttggggttcatgccctcggtcgaatccaggacgtgcgtagcctcctgggacaggtacttgcggaactcctcgggagtcatctcccgccctttggtggcgatgaagcgctgcatcttgaggctgaagtccgactgcgcgatgcggtagtcctgcttgcgccagccgcccttcacgaagggcttggccaggatgttgctctctaccgcgtcctctgcttcgccggccatccgtgcccgctcgccgcgcagcacctcctgctgcacgttgtgctcgaaccacttgccagcgatctgctgacctgcacccaagatgccgtcgagaatctgcgagcctacactcggcccgctgtagttgacttcggagtcgcgcaccccgcgccgggcactctggcccggctggagttgcgtctgtccgacgttgatcccaagctcttgggaagcacgttgcgattccgccatcagttgcctcctttaggcgtggcgccgaacttgaagtattgacttgcgtacagggaacccgccgacatcaggccggccaccagcggggaccgttgccccgccgtggtactcttctgccccagcaggccggccttcgcctgagcctggatggagtgcgcctgctcggcgaggttccacatctggttgtccaggttgtcgtcaatctggatcagggcctccccgacctcacgctcgatgtccagggccaccgcatccacggatgcacccttgacgccgaacgcgccggcctgagcctcggcactgccgccggcgagcatcccctggcgcttggcctccacctgcgaggccacggcctgcttgcggtagctagcggccatgacgcccaggttggcgatgtcgcgggcagcggcgcccaggttgtcgaggtccgtcttcagtcgagccttgttctcggccttgatcttgttgcgctcttccttgttggccaatccctgttgaagggcggacatgccgccagcggccaatagtggtagccagaatgccatcacaccctcctgtaggtctggttggatttgaagttgtactcgacagcccggacgttcatgtcgtaagggctatggcagctcagctcgaacttcgaggtcgccatgtccacccgtgccggcagcggcactaccgcgctgtctaccagcggctcgccggcgttgagctggcgactgaacaggcggagcggggtcgtgtcgtaccacggctggttgggccgcgccgtgtcgctgatgcgccacaggaactcgccagtccatccgaagttgacgttgtaccggtgcagcactgctcgggtcgaggtcatgggcaggccgttgtggtcccgcagcacgggcggggtgaactccaccttcgaccagaactcg

SEQ ID NO: 28 - DNA, 42986 bp, unidentified
  source 1..42986: mol_type = genomic DNA
agcaggtcgcgcagcttgagctgcatacgctgctcgtcggcgaggctggtgtccagcatgtactgaagctggaagccctcggggccttggtcaagctccttgtcgagcaggtcctcttcgttgtagcgctgcggatcggcagcccagccacgggtcccatccaggcccttaccggtgcgcgggttgtggcctttctcctctaggcgggcaatgcgcgccaggatagagggtgcgagccagtcgccgtagcgctcctgctcgtccagggtcgggaaccggcccggccagatgcgcatcaggaatccccgtgcgggtaggccgttgtagatcgattcacgactctgcggcgtgcccaggtagagaatcttaccgtgggtacagatagaggtgaactcctgcgactgccgcgtcagcttggcccgctcggtggcggtgaggccgttcttcgtggtctcgatgtcgtcaggaatcaggatatcagcccggtagccctggagggcggcggtgatcccgatgcagttgatggaggccgatttctcgacgcccttcaatgcccagttcacgtcgaagctggtggccgaggtgcggtcacccatacgggcctcggggcgcagatacgccagcaagtcccagtgcatgatcagcttcgtgatcaactggccgttctcctcggccttgtcaccggaaccggataccaacatggcgcgggtagccgggttctgtgtgatgcaccataccacgtagatacaggcgatggtggacttggcctcgccacgctgtgcagcgaccattgccttgttgggcgagtcctgcatgaagtcggcgatgtcgagctgcatccacgtcatcttgaagccgaggaacagcatggcgtccaggcagaagtcccggaagcgcgggtacatgtccctcacctcgtgggctatctggaatcgttcttgcggcgtcatgctgcctccttagtgggtgtacaggcgttccatctcgtcgtcggtctcgccggcgatgaagccttccagcgcgatccggcgattctccttctgagcctgacgcatctcctcgcggagccggtcgatgttgatcgtgtccgacgggtcgcaggtgatctcgttgtccttgaggaacttggtggcggcagcgatatccgatgccgggatcgggatgtcgttgtccatgtaccacttgaagttgcgttcgatggcggtgcagaccagctcgtgaagcaggcccagccgctcagcactcgcggtctgctttttgctcattacatgtgccctctgaattggacttggaagcgtaggttggttcccatgccgcacttgaccagaggccggaacaccttgccggtgtccacctccaggtgctcctgggtgtagttctcgttctgcgtgcgaacgtacatgttaccgcctcgggtgtagggtacgatgacctgtgcccacgcagttgcgccggggcgcttgtcgtcgagggctaccttggcatagtccacttggcccagctcaactacgatacgacggccctgctgcacgttgaagtacgatagggcgccggtcttgtctgcgcggacgaacacaaagacgtagttcatattactgtcgaagtccaaggatatcgtcgagatacccgcgtcgatgccatcaccaatgcgcacttcgttggtgccgtcctcccagccgaggtaggtgccgtcgttacgcagcatggtgcgccatacccggacgaatagcccctcggaggggtcctggatggcgacccctccgtcgcagaagtcgagcacgtcgctgatgtcacgacgtgccctggcacctacaaacttcgacttggccttgggatcgaggtcttcgttgaagtcatagatcagcgccatgggttatgccctcgccaccgagaactccattgtaatggagaactcctgagtgttgttcttgactacaggagggtcgatggtgagtgcgtagttccgaccgttgtaaatcttcaggtccttacacccggtgataccccccggcatgttgccgttatctacggtggcccgtagcataagctggcccttgtaggtgccgcgagtatatcgcgggtacagcttcacccactggccgtcttggacatccgcacccgacgcattcttgccgtcgatcctcggactctcgttgtagaagatgtagcgctcgccgtagaggttacgacggttcgcgaagggcagcggagtaagtcggatggtgcgctcgaccccggagatcacgaacttggcctcggccatcgccacggccttgctgcgcagctcatactgcacgtcgagaatctcgtcggcctggactaccaaagtggttggctggccagcggaatctttgatccgggtgtaggagaggggagtacccgccggaatcttcgcgccggtgttactctcaaaccccacctcggattgagctacgatgcccacggtggccagtacctgaccggccagggtgcctattgggaagcgccaccgcttgtgccagtaaatccactccccgtccaggcccgaggtcacgtcgccaccgggggcatacgaggtggtgcgccgaacttcttccggcagggagggcgcggcggggttagggtccgctgtgctggtgctcacggccagtgcctgggagaacaggtctgaggtgtccatggcgcaaatccaatcgagacctgcgttagtgatgaggttgtcgaaggtgtactgcgccaggacctcgcccgtggctttcagatgggtcacggtgtagcgacccttaacgcgtgtcttaaacattggtcagttccgcctgtttaattgctgtagtggtggcgaaggcataaggctcgacgatgtattcggaatatacaacgacgaccttcagctcagcacctaccactgcggtctgtgacaggaacgcgtatggttccgcgttgtagcccttaaccgtgtcgcgtagcagtgctgcgtggatggcaggtccagtcaagaacccatcgccgccgccatacccaagctgagtcagcgacctcagcagcacttcgaccacgccggcagacgcctggtaggtgtcctcaccaggttggttcacaacctcgtgcagggtgtcccgtgtcagagccgccactatgttagcctggcaggaccatgtgtcgtccgtggctaggatggggtacgggtaggtcgccaggatgggcttgggccgtcgaatttgggaggccatgatgcccgcgataatgccgcgcattattcgtcctccatggctccgaacacgatccagtggttagcgcccagccgcttgagggtgcagaccccgttctcgccgtagagctgcatggtggtgttctgcaagcggttgatggtgacgccggggccggccacgatgttgaggtcgcgcacgcctgcctgctcgaagtggacctcgctgaactcgatccaaggtgcgtccgggtcttccatctgcatggtcaaggtcaggggcttgtcggcggtgatgcagcgattccagtaaccgcgccagctcggatcgatgtccgagtcctcggtcacggtgcgaatctcggcgaagcccagggcacggcgcagcgcttcgttagcggcgtcgagtgcctcctgtgcaaggcggcgggcttcctcggcgatacggatcgcgtcgagaactccgtcgagtgcgaggttcgcggtgttgatgccctcctgcacagcgtacagcaactgcttgttgttcgcgtcgatgtaccgaggcaggaacgggatgccctggctgaactgagtgtccgggacctgggcgggcgtgtcgcggaagatgcggacctcttgatccttcttcggcaccacggccaattgaatgttggtgtcgtctacccacgtatagtcggtgacgagtatcttatcgacctggacgaacacgtcctcacgccgcaggaacgggaagtcgagactgaagacagcctcgaccccatctgcaacgtggatggtctcgggattcttgaaccgagccacgttattcccctttgatggattccaacagcaacttggttgccgggaacacgttgacgaaaggcagtgcgcccgccgcgccgttgacgatatcgccagtggccgctgccgggtcgtcgccggttacgaggtctcgaacgcctcggaacacttcgttggagtgttcagccagtccgaagaccggagcagacattcgggagtggccagtgaccacaccccacatatcggcggtgaagcccaggccggcagtgtagccgatgccgtcgatggccatcttgcggatgccttcgtcagaggtgtcgaacttgccattgatcgctgccttggcacccatcatcagcgctgtgagcggatactggaatgcgaggagcgaggccacgccaagcacgccggagttctcgtaggttccccggaggagcttgttgtgcgcgaaggccacgaagctgcggaactggcccaggatttggccgaccggcgaccgggcgaagcccgagttctgaccgaccctgccgtacagcagcgagtcgtccatgatccgcagtgcggtgttcatgacggtgttcacgtctgcttggctccaggcgccccaattcatcgattgggcgttccttcctctgtatgtgacataaccgcgaacccgcgccaacactggcgtccagtccacgtccttcccgtactgctggagcacgcgaagggctgcttcatccccctgagccgcccgcgccaccttgttcaaggtgaggttggcgttcatacgggattgccagttgtggatgaacttcatgccgttgagcaccgggacagcctgcttacctgcgtgcaggaagcgatccatgaaggtatcttggctggccaggaaggtgtcgaactgccgcttccagggcttcatccggatatcgttggcgaggttcaggccgaggacggtctgcatctcgtcagcgaggtccgggtcgcgacgcatggcgcccacgaagtctcccaggcgggagttcagcatggccttcatgacgttgaagacgccttgacggtgcgccatcgtggccagctctgcgagctgatacacgcctgagaatcccagcatggtggcgctggtcaggccgctggcccgctgagcaaccgggccgagctgatgctccctcggcacgttgccggtgaagtccccgaagactccccgcagttgccccgtcagctcctgcaccttatcggtgcccaggtgggctgcctctcgctggtactcccggatgaaggcttcgatctccgagtcccccggcatgcctgcgcgggccaatgctgagcggcccgacatactgccggcgtagttctccatcagccggtccaggtctcggtcgatcaggtcctgcacccgatacacggttccgttgtggttgatctcggcggtcatgtccagcgacagccggcccttgccgtacttgacggtgccctggtcggattgcttctgctcgatcttggccatgatgctgtcgaacttggcctgggacacgttggcctcctccagcgcctgccggatgaatgccgtgtccgccacgcccatcgcgcccatgaactcggagcggattccggtggcccgatcccgcgcccgctgcacaatggcctgtgcgatggtatcggcgtcggcgcgctccagcccagggatgccacggaacacggcctcgctgatggcacggcgggccaggccaggggcggcctcgtccatctgcgccatcttcgaccagttccatgaacggtggaagtaccccggtcggggagcgaagtcctcgaagccacgcacaccggcttccctggcgcgctggcccatcagaccgtgaatctcgtctgagcggtcggccagggccttgatggtcggcggcaggttcgggtccacgcggacgctgccgtaggcggtccactcccggtcccggcgcagcagctcgcgggtgacctgctcgttgagctggtcgcggacagccatggctcggcgggagttcagcgcacgtgccgtcaggcctacaccctgctcagccattgccttggccatcatctcgtcgtaggacttcacgtagccctcgaactcgttccgatagcggcggagatagctcgctgcgttgtcgttcgtgctgaacccatcccgacgtaccgggtcgtcgataagacggctcaggagtcgccgtgcgccctctccaggctgtgccaggaggtctgcctcgctgaagaaccggttcacgaagcctgcaccctcgcgggcacgttccctggtggtccttacgatggtctccaggctggcctcctcggtcacgggagcgcccttgttggcccacttggcctgtgccttagtgtaaccgggcatggcctccataatcgtctcagaggcggccaggactcggctcagggccgtgtcagcatcggaccgcagacccagcagggtgcggatgccctccacgaagcgggaccacaggcccggcccgccgtcgctgtatcggaggcggttcagggtccgttggaagcgggtatccgtcaggccccaggccaccagttccttgacgttggccagggtgttggagttaccggccagcagcgtctcctcgaactcggacagttgccgaccggcggcccggtcctgcttcagggcgttgagcacgttaccccggacgttctccagggtctgcatggcctgagccaccttcggactcatcgcgccaggattccgcaaggcggcgttcatcacgcccacggtggcagcgtgaaccgcctcgtggagcacggtcaccgggttggtgccgactcgaccaggtgcggtactgccgcgtacctggaccaaggtgtccaggccctgggtggagtgaatccccgccgtacccggtttgaggaaggcagagctggcagtgtcaccgccctgcaccacacggaacgcggtacgctgccccaggccctccagggtcctgatggtatcagccaccttggcggcgatgccctggagcggcttaggtacctctgcgtgggtcttgaggtggtccaggacctcagacagcttccggcccgacaggctatgaagctcgtcgccgaaggcagtgtcacgtcgcggaatagccggtatctcagcctgctccacgcgggcactgacacgggatagcacagtgccctcgtccagcaggtctaccacgtcacctgccttgaagccgcgtgctgcggcctcctcggcggtcatggctacttctggcagcccgacagtaggcgccgatacttcgggcacatgcggttgcgttggggcctctgcggcaatgcgtcccgcaccagaccccagcagagcacccacgccagcgccaagagcacccgccacgatgtaggttccggcatccacgtcggcccctgcggcatccagcccagcaacatacccgacttgcccagcgccgccagcagcagccatgccagcacgaccgagccgcagagcacggccagcgccgaaagtaaccgcatcaactgccagggctgccgggtccagcataccagccgcgaagttccagtacgggttgtcccgcacgatttgttcgtcctgctcataccgttgaatcctcgataggaggtaggccgcgtcctcggcattgccggcacgggccatgatctgaaggtagttatcagtcggctggatacctgccgcctggagcgcctggaccccataggtcccagcgtcgaagttagggtccacctcgcctgtactgttcgccgcaaggtctgcgtcgagctggagcgcatcgccccagcgtccgacgagggtggactggttccagagtgcggaagcacggtcaagggccggcagttcctggtccgctacgatgcgttccagttcccgcgcattggctcgttggcccgctgccacgttccgttctccgatctcgccacccgtcagggcgtcgaaccccacggtaggcaccgcgtcgagttggccctgtacttgggcctcgtcgagctgtgcttggtcaaggggatacttgggcgtcatgcggcccttgaattgctttgccatgtcttactccgctgttgcggcgctgtaccaatcgacaccgatttgactcggtgtatcgaagtggggcgccatgcgcttgatgaatgcctcggcccggttgggcgtctgcgtgtaccacttgctgtttcgcacaccagcctcgaaggcttccttgttgcgatccttgatcgcctggaaggtgttacggaactgtcgggcacgtccttcgcccatctggaaggccataccggccaatcccaggatagaggcattgttcgtaacgcccagctcgtcggccaacctcacaccttggtcgagtgcgcggtcggtgtcctcggcgaaccactgcgcggcttgctcaggcgtgactgtagtacctgccccagcattgccactgcccaggtaatgccccaggcccacactataaccatcggcatccttatacgcctcccctcggtaagcctcgaactgagccagttccttccgccagttgaacacgtcctgcttcagcatgccggcactgttgcccccgttcatgcgaatgtccgtgccgctgaccttgacgttggcaccgtactcggcgccccgcatcgcattcagcttatccgcgttgcgcttgagcacctcgttgccgactgcctggggatcaacccgcgtgcggtccagggccacaccgttctcgtcgtactcgacggcgaggaggctgccactggtgcggtcgtactcgaaggcgactaccgacttgtagccgaggagtccttcgacatgcggcttgtgctgctcggccaggacggttccgatggtctcggtgtcgttggtcccgaatagctgctcggcagtggtcccgcgaggcaggatcagcggcgcgctatcgcggcggctgaataggtccccttccttcaggttccgaccttcgcctacctggatggtgcggttacgcacgttggcggcggcgatctccagcagggcctcgcggcccgtgtcgctggtgagcagacccgcatgcttgcggtcgctggccagccagttcgcctcgtcgatggtcgcccggcgatacatgctcaggacggcctcgttgttgctcaggtcgctctcgccggtcagcatgttccaggctcgaccgaagatgttgttcacgaacttgtcgttgacctgcttaccgaggttgtccttgaatgccttggtgttctggcctttctcgaactcgtccatctgcttcacgacttcggcgttggcgctaaactcgcgcagagcttgagctggtgcgatgcccatcttcatctgcttgagtgcccaggccacggcgccctgctcggcttccgggatgccggatagcatcacgttgccggcggatgggttgatctcctgggccgaggccacctgttcgaagatgctgttcaacgtgttgaccagctccgggtttgcctcgccttccttggcggcctggatcatgcgcaccgcgctgcctacggactcgccgtaggtcttggggaaggtccccaggcgcaggccgagctgtgtgccctgcacgagacggtcagtcaggcttgagccgttggcggcctgcatcttgtcccactgctccagcgcctcggtgacgttggtacccagcgtgtggagggcgttgatgtctccggcttccaaggccgccatgatgccctgcatgcgctgagcgttgcccaggccggtcatggccttggtcatgaacgagatggcctgagcgtcgctccagcggccctcctcgaccatgcctcgtgagtacgcctcaacctcggcaaggtctgtgatggcgccgttggccacccgctgctggaagtccgcgtcggcccgcagggtagccatcgattccttggcacgggtctgtgccttcgatttttcatagaggccgttgagcgcacgccggtcgtcaaaggacatactgtccaggaacccggcatcgcgcaggccctcatagatgccccgctggttcatgtccaggctggccgccaggaactgcatgcctaccttgtcgcgcacctccagcgggatatcctcggaggtcatgatgttggtgtagaataggccggcctcttccaagctgagctgtcgggacagttcgtcgccggtggcctgagcctgcacagccttggccaggatgctgttaccctgagtgcggaagccacgggcggcctggtcgatggaccagtccatgtacgccttagcctgcatgccgaagagctgttcctcggccttctgctgctgtgccagcgcctgtagggcatcgttggggttcataccctcggtcgagtccaggacgtgcgtagcctcctgggacaggtatttgcggaactcctcgggagtcatctcccggcccttgttggcgatgaatcgctgcatcttcaggctgaagtccgcctgggcgatacggtagtcctgcttacgccaaccacccttcacgaatggtttggccagtacgttgctgtctactgcctcctcagcctcgccggccatacgggcacgctcaccgcgcagaacttcctgctgcacgttgtgctcgaaccacttgccagcgatctgctgacctgcacccaagatgccgtcgagaatctgcgaacctacactcggcccgctgtagttgacttcggagtcgcgcaccccgcgccgggcactctggcccggctggagttgcgtctgtccgacgttgatcccaagctcttgggaagcacgttgcgattccgccatcagttgcctcctttaggcgtggcgccgaacttgaagtattgacttgcgtacagggaacccgccgacatcaggccggccactagcggggaccgttgccccgccgtggtactcttctgccccagcaggccggccttcgcctgagcctggatggagtgcgcctgctcggcgaggttccacatctggttgtccaggttgtcgtcaatctggatcagggcctccccgacctcgcgctcgatgtccagggctaccgcatccacggatgcacccttgacgccgaacgcgccggcctgagcctcggcgcttccgccggctagcatcccctggcgcttggcctccacctgcgaggccacggcttgcttgcggtagctagcggccatgactccgaggttggcgatgtcgcgggcagcggcgcccaggttgtcaaggtccgtcttcagtcgagccttgttctcggccttgatcttgttgcgctcttccttgttggccaatccctgttgaagggcggacatgccgccagcggccaatagtggtagccagaaagccatcacaccctcctgtaggtttggttggacttgaagttgtactcgacagcccgaacgttcatgtcgtacggactgtgacagctcaactcgaacttggacgtggccatatcgacccgtgccggcagcggcaccacagcgctatccaccagaggctccccggcattgagttgccggctgaacaaccgaaggggcgtcgtgtcgtaccacggctggttgggtcgagccgtgtcgctgatgcgccacaggaactcgccggtccagccgaagtttacgttgtaccgatgaagcactgcacgggtcgaggtcatgggcaggccattgtggtcccggagaaccggcggagtgaactccaccttcgaccagaactcgcagccgaccacatacaccgccccgaccacggcctcgggcacgtcgaggaacaccttcgtattcgtctcgcgcttcacgccgaggtgggtacgttccatgtaggcaccggccacgggctggagctggtatacggcagaggcatccttgatcaggtcccaatgctgcttggtcagctccagctcaccatcgacggtcgcctcgatacgccgccagtaatcgtacttcggatattgcagaccctcgcgggctggcaggctgttcaggtgcatccgacccagggcgatctcctggcccttctggatcaggaccatcaggttgtcgccggtgaagtacgcgccgatgatctgatgccgcagcgtccatcggtggaaggcgttctggactttctcgttgccctgccagaggtactggtggcagatcatctcgtccgccgtgctggtgccgaacaccaggtagccgctggaggccgccgcctggatgtactcagccggccccggcatgtagctcgggatgtggctggtaacgtcctcggcgacgtagtggctgtccgtggacggcgacggggccatctcatgcaggcccatgaaacccagggcacgctccgcagcgaagtacacactgcggccagtcacggcaggtgccgccctggtatcaaggtcgtactgcgtggtgatgctgataaccgccgtgcggggagttacaatgccgccaccggggaccacggcctgatacttcttggcgaagacgatcaagtccttgttgaaggtgaccgcgtgctcgtacggttcagtcaggctcccctgggccgcgatctcgataggatcatcgtcgttcagcgcggctgccgacttcttgaaccagcggtgcggattgttactggccgacatgcagacgtactcctgcgacaggaggacgaggcgaccctggaaggtcgtcatgccggtgatgcctcgggtgacgaagttgaacgtggggttcgtatcctcgtcgccggagccacgtcgatcatactccagctcgttcaagctgtaggtgtcggtagcctcatcccagcgcagggccagtggcatcttcttcaggacccaatcggtgccgtaggcggcccgctctgcccagcggcggttagcggaatcccactcgaagtataccggggccttggtagagccggtggccatgacagcgccgtccatgaactgcacccccacaccaggggcgccgactcccggcagcaaggccggcaggtccgccgtagcattgaggctcataccacctgacgcgatgccgtagttgttgcccatatccgtggacacttcaacgtggatatcggcgtcgccacggaacgcgatgtacccgtcctgcacgccccgttggttgaggtaaccggctatggttgccgcgttggcgtccgggtctaccttcgggtatttcttcgtggagttgggcagggtgtactccggcgccccgaagaacttgccgtagagctgccaagcgatgtagcccacgctcgtttggaacggtgcctcagcgaggttggggttcgtgctggcgttgtccggtgtcacgtaggtggccgtgtgactgtaggtggtgccggtggcgttgtccttgaccttgatggtcatggagaatgccttcgaatactggcctgccttgatgtacagccagccggccttgttggggtctacgcccttgatgtcggtgcggtcggcctcgggcttcacactcaggttggcgatgaacaggtcatcggccaccgtggcggcccgtagctgcctgtaatcgtcggccttgaggtagtcatgcaccaggggctgacccatcagcaggcgaccgtcccgctcgtcgaacaggtacagctcaccacggtgctgcgccaccagcatcgcaatgctgcggccaccgaggttcgtgtggtagaggaacggcctcggccagggctggtcggtatgcagcaggtgggccatcagctcgataccgctgcgccgccgaagtcctgacacgggatcggataccatgttgatctgctcgctgagctggcccggcaggcgctcgaagggcacctgctggctcacacccattagcagattgggatacgcggattgcttgtagctcatgctcaggtcctcaagctgcgccgccaccggctgaagctacgcttggcctgggtgttcagcggacgtgatcgggtgtgcatgcgggacagttcgttctgatacgcctgcaattcctgggcgatgacctgggcggtctcgtccggtccaatctcgtgggtgtataccgcgagcgcagcctggtgcgcaatgacgcgctgtgcgatctccgggatacggtcccactcccgagacagcaccaatcggccctcgaccgacttaccgatgcggtcgtcgccggtgttggcatctcgcactcccaggccgtcccactggaggtccggggaatccgggtagaatgccaaggtgcccttgggcaggttgatgcggcccgtggggtcaggtgtcagcttgtgcttccaccaggtgttgaaccaccagccttgggtcagcaactggatgcgttgatcttccagctccgggagggcgatggccatggttggatacgtctcatccatgctcgggattggcagctcgccgatcttgcgcaggatgacattcactgcgtcgagtagtagcatagggtttctcctaaagcgcaaaaacccacgcagggaatctgcgcgggtcgttaggctttgaagaaaccccacaccgaagtgcggggtttcgtgacatcacgcggtgatgtcgaaggcgccgatacccttcagttcgatggcaccagcggtgtccggacgacgggcaccgatgttgtacatctggaaggtatccaggacccacgagaatttctcgttgtcttcccacagcttggcctggaccggcgccacttgggcggtgatcagggtcttgctcgggaggaacagggcgatctggcgttcggactcctcggcgctcacgttgaagtgacggcccagcgggtgggctgcgattgccttggtggcgaagcgcggagtctccagcaccttgacgccgttgaggacggccacgcgggacttcacgtagtcgttggtcgcgccggttgcctggtactcgacgttcatcagcttgtcgtgctccagcagcaggctgaacacacgcggcgacatcggggtcaggccctcggagtagaccgcatcgcccaggtcgcggtcgatgaaggtctcgactacgcggcggtgcatgcggacgatcttgtcggcagcctgcttggcggtcaggccggtcaggtccagtttctccagcacgcccggcgagaacgcatcttccaggtccaccggcgcgtccatcgcggcagccttgatcacctggatcaggcaggcttggtcgaacttgcgagccagttcctggccgtccagctcggcgacttccttgcgcatgtcgaaggattgggtccactcgtcctggtggtcgaactggtggcggaggtacagcagggtgtcgacggtcaggttccacttgtcgttcacgactcggctgcgctccagctcttcaccggcgcgacggcccttggcctcgacgttacccaggcgatccaggcggaccacgttcgagccacgcaggtcgcggatgttcatcagcggtgcgaacttggaggtgtaggcgaagtgcttatcgacgatgccgaggtgctcttccaggtggatgtcaacgtccgcgttcttgccagcgtagttcggacgagtcaggtcgttcagaaagctcatgcgattctctctcttttggatgtgggtttaaggccggagtagggcagggtcgttagataccctgcgccatgcctgccttacgacgctcgcgcagcgcagccatctcggcttcggatgcgttcagcggcagcttagatacttccaagcggtactgctcagcgctcagagctgccagtgcaggtgccgcagcacccaggggttggccggtagcctgtaccacggcacccgagccttgtgcgaaggccacaatttgcttcgctgcgtactgcatggcctgggcatcgcccgagtccatcagccgaccgatggcggccttggtggccgggtcagcgtgttggttgaagacgccggcagcctgcttcaggatggcctcaccgccgacggcggcataggtctggctcaggacggccttggtctgcgcatcaacataggtcaggacgcccttggccacgttgatgacgtgctgcgcctgggccgggccgagaacttccttcagatagtgctcgtcgatgaaccgaggatcgcggttctcggcggccttgccgaaggctcggacggtatccagtttgtcagagaacgcctccagatagctgatggagggcgccaactgcgggtcgccttcgaggttccctgccaaggtgcctacgatctccccgttgggagtgaaggccggcggcggcgggacttccaggttctcgggaagaactgcacccgcagccggcggagctaccggggccggctgagcgggtgcttgcggaacaacgggttgacccacggcaggtgccgctaccggctggtagtgcggcgtcatggcgctggtcggaacgggttgcggctgctgggtcgggatggccagttgctgcggcgcacctacctggccgggctggaccggagcctgcgactggatcaccgggttcggcatcacctgcacatgactcggtgtcggcgcggcggcgggcggtacgttggcaaccaggttagcgaggcccggcggcagttgctgttcgttcggttgggtcatctatcagactcctgcgagtgcattggtcatgtcggaagcgccttccagcaaggtctcctgcgcggcctgggcctgcgcggcctgctggcgctgctgttctgcctcggcttccagttcgtcggcgctcttgtagaactgcgacgtatcgacactgaaggctgcccaaatcgtgtccatcatcttcggtagcgagatgcggggatcgagctgagcaatcggggccaggccagcgatgacttgggaagcgttgagcatgctctgcacagcggcggagcgggacagagctgggaggcccgtctcgatagccggcttgtgctgcttggtgatcaagccctggagtagcgcgtcatccacctcagataggcagacgtaggccaggggcgactggaggttctcagccaagagcgagtatgtaccacccagcgtgttctctgcctcctccgcagtgatgcggacttcctcggcagtaacgcgctcggcgtcgcgctggttggcaccatacatgaacgcctggttcaggcggacgactacggcttgcaagctctgctggatagcagccatcttgttgtagtcgccacgctcgtaagcacggacggcctccgcgccacctggcacgtagtcacccatctcggcgtcttggtagtcatcgaccaccgcacccttggcctcgtccacgaggttcaggacctccaacgactccagctcgtacaggccgagtttctcgctcaacagggacagcttggcgaagtcgccgatgtagtcctcgacgtggcctcgaccgtagtgctcgccaggggcgaggttccaggtcggcacgatgtacgggcacaggtggataggccagcggccctccttgcccacacgcacgccgtcgatctcgtggtacagctcggcgtattccatcgccgttcccttcttgcgctgtacgtgggtgtacaggtccacgctacccgaaccggacaggttgcgtcctgcgcgcatcaggtcctgcttgtactcttcatccaggtccttggacttgtagcgctgctttaggacgatatccatccagcggccagtcgcatcccggcgcaccgcataggagcggagcgaccatgcgaccaccgtagcggcggcgctgtctcggtacagcagagcattgccagtcacgatcagtagcttgatcacctgcgtcaggaccgccagggaggcgttctggaacaggcgctgtgttgctttgcgatccacccgagccaaggcagcggtcacttcggtaatgtctgtgtcccggctgtcggcctcgcggcggatcgcatcagtgagttcggatcggaagaacggaatccccgtggggaacagcgatctcgccagcttggcggcgaggttgttcaccaggagggcaccggcggactggaagtcatgctctacgactccccggctgccggacatgggatcgaccatcaggtagggaagcgtggtcttggcgaactcgatggctcgactctccacgctcccatcccgaagtttctcccacagcatagctgcggtggttttcatggcgtacctcgtcagtagttgataccgagggtttgcgatacgcctgtgcccgtctgattccggcgccgtcgcgtgccggtgccagtggcatcggccatcgctcctaggtcaacctgcgccacgttctcggcggtgaggtcaacctgctggtttcgtgcgagctggtccgcctgctgttgcattaggcggttctgctcttccatcttgcgggcatcggattgtgcgccgctcaggtcggtgcccagcaggccatcagcgagtttgccgatgatggtcttgcccagcaccttctttactttcttgcccataaggcttggctctccggtagtggatcgtgtaccggctatcgctttcacgatggctccagcacacgagggggatttgaccccagccggcctgacggtggagttcgtggatgaactcccggaccacgcctgtattgcggtagcgcggtaggacgtactgccactgtgctgtgacgcacgggccgacgtggggatcgtcctcgaacacaatgcaggcaccgccggccaactggccatcgcggaataccaacagctcggttcgatcgttgccctcgatactgtccagcatcgcattcagggcgtcgtctttcgagcggaagagggtgaattcttccaactcctgtattgccagccagcacagcccctggagttccgagggagtgccggcctttgcgtggactcgccagatggacttgttcatcacttcaactccactgcgatggcatcgcgtcggcgcaggcgtactgctcgcaccacgtctcgcctaccggcctggaactggatgtcttccatcgtggttccaggaccgatctgatgttcggggaaggtctgctctaaccactcgatctgctgagaggtgaacgtgacaggacgggccgtacccttgcctgttctcgatccttccactgtgggtgacataaccataggtcggtgggtcttcatagtagccatctatcatatctcctatgctggttagtctattctatctagaatccttcgtagtcatctagtctcatcttctactctacctctactcttcttctaccctctggtcttccctgacctctttctccctgctcccctctacgagggccttggacggatgcacttgctcctatgtgggtgacataatcccctcagcagaagaacgcccaggagtcccgtacagcctccagattcaacgatcctctccggggcggggtagcctctatcccgagctgttttgccagttctacgagcacacaggggccgctgtacatggcgatgaactgctccctgatgtggacgtgcatccgatccacgtctgccgcataggtgcccatgctgtcgtggatggcctggatcgggataccctctgccgcacaggccagggccgtcaggcccaggtggctgctgtccagcccgtggacgaagttcggagcgatgccgttggcgttgcgtaccgggtccagctcgtccttggcctcgtacagggtgacgtactcgacagcctctgcccgcagcctcacccgcacctcctcggtcttcgggtacgactggaacacctgcatgccgagtggcgtgatccagtgcaaatccttggatgcgtcaggaagggccttagcgagccgctggagccattccatggcgaagactgccgatggtactgtctcgcgaattgcgtccagtatgagcgttgccatgtagcttcccaggcggtatgacgggataccctcgggaatctccaggccggactcgtccaggtagtccaggcagtggtctaccacgcccttgaacgtggtgccgtataccagcgtcatgcagggcttcttcgtcaggcttcgggatagaccagccttatcccacaatacagcgtagccccgagcctcgccttcagcactttctctgtctcgtgccagagactctgcaacgagaccgagaactcgggagtagatgtcagctttggcaagtccaggtggtagcaggttgacgtaggctccgccgatctcgtctcggagaatggctgagtagtgctggaggccggagcaggttgcatccatgtggacgatgaacccacttcggtaagcctccggctggcctgatgcgtaggccgcccgcagctccagcagacctgcgatggcgcacaggggcgactcgtcttccgggaagagactcggatagttctccgggccttcgtcgagtgctcgctggaagtcgtcccatcgctcatcgacccaggctgcccggtcgtcgaagtacaccttgtcacatccgagggagttggcgacgtggactttgagccagtacaggccgcgcttaccgagggcacgcttttcgtggaatcgcagacacgccttggcgatgtcggacccctggggattcggtgtgccccaatagtacatgcggccacgggagtcaacgtgcatcgggaagtacactgccttgccatgatgctctcgaacaactcggtagagtgcagcaaactcgcgaagcttggcggtatgctcccgctcgccggtgtaccatcggtggacggatcgcttccagcggttgaaggcttccagctcttgttcactggcgttctccttggcccactcgtcgccgagcgggaactcaggtttgtccgggtaggtgcgctgagggatgcccagcacaccgccaccggaagtgaagacgcgctcgatgatctcgtacacgtcgtggttgatctcgtaggccactgattgcagcgcgttgaccgcctcatacaccctgggcatcttgtcccggcccaggtggcgtagctgcatctggcgcgcccgcttggtctggtgcttggtacggcgcactagcacatggtgtttctgcgccttagcgctgtagtaaccgccatcgcaccagtcgttccacggtcgcggcggtgccagcatcacgctacggcctgggcccccccaggtcatcgccgccgaagggtcttgcaggaactccttggcttccggcgacggctccaggtggacgctcgtaccgccccgacctgtgaagcggttcggctcgaacaggccgcactgtatcagcggatcaccaatgaacttgccgagtcgcaggtagtcgccatccggcaggtcgatacgtgcctcttccggcagtaccgcgtccagaagagcgtccatcgtcttctggatgtgccggacgctgcgagtcctgctggtcttgaggtagtccagcgtccggtcgtaatagggttggttgaccttgaaggccaaccgcacttcgatctctcgacagagcatcttacccatgtgggtgtaatacttcgtcgcggtgatcgttgggtagttgatgagcatcgacagcccggcccgcagtgccatgaccgcgaggtcctgggcgtcgatgatccgcagcaggtgccgcagctttgctgccggccccgccgccttcgcttcctggtgggcgaagatcgcttcggtcacgatggggagcatgcgcatcaacatgatgcgcgccctcgggatgcggtcgatggacccttgggcaatcgccttttccaaggcaatgcgggcgtcgttctgcgccgccccgaccagggcctcttcgtgggcgatctgctgctgtatcaggtccattccgtctcctatcgtttctcgatcacgcgtccgatgttctcagcaccgaactcttcctcggccagggtggccgcttgctccagggtagcggctcggtactcgcgccactccacgtcccgtcctaggcccaggacctcggccctgtaccagcgcagttcactcttagcggtcattgcctttctcccgatccatcagggcacgctcggcggcggccattgcgttgaatgcctcatgcaccaggtgcatcaggttggactcgtcatccagcggtccgtcgatcagccgcttggactcgtgccggtgttgggcggacttgaactcgcccaccgtcatcttcttccagtcgtgcggcagataccccttgacctcggcagcccattgcatcatgcgagcaagctcccgcttcagcagcgggaacccctcgactaccaggtgcatgggaagtttgccgaccttacgttcttccagactcgcacctttgcggtacggttcagtcgggatcgtcgactcgtaagagtccgggaatgctaggctcatgccacctccttagttgctcagcagggctttgcgctgttccgaggtgttgcgggtgtaccgcccccggctccagccaccacagccgccgcagtgatagtgctcgtacttgccggtctgcgtatgcacccagccttcttgcttgacatccgtgtcgccgcacttcgggcagcggatggtcggctcggcgtcattgaagtacacggccacgttgggatggccgacgaaccacggtcgcatcaggatgtacagctcttccatcgaccgtacgtcgtcgatgttgtacaggcgcatctcttcccacgcctccgggttgtcctggaggcaggccgcccacaggtcgaatccggggaacttgccgtgcagtcgcttcttgatggtgcatgccttgtgggtcatgtactccagcttgcggctggtgaacgcgaattgctgcttggcgatgatcaaggtgtcgatcaccttgaacggtcgcggcggcggcatcttgttcaggaagaaccgggcgttgatcttgggcacgtcgaagcgcttgccgttctggacgatgatgatgtcggcctcgtccaacagcttgtgcagcgcgaccagcaggtgcatgtcgtccaagggatcaccctggcagtccatgtagatcacctcgtcgctgtgcatccacttcgcacagaacgacaggatggtccagtcccgcttgatctggttgaggcccacgttctgcttccagagcgaccagacccagccctcgataggcgaggtctcgatgtccaggctcagcaccttcggaccctggcctaccacgttgcccacggcgccagggaacttgcgcactacctcggcagccttgcggcccagccagtgcatcgcgcccttcttggcgtacatgccgcgcgtcctgctgtcgtggaagcccagcttgatgcaccagttgcggaagcactggcggctcacctcgccgaagcgcgaatgctcggtcaggtgctcggcacccttcttgaggcccagctcgacatagacgtttcgcaggtactcattggtgaattgcttgcggagtttgctcatacgttcctcgcgttgtgctttgcgacggccatcgccgccttgcgtttggcggctgcctgccggcgcttggccagcttcgcttcgtgtttctcctcgtcggtcttgtgcagggggtagatcagcggatgcttcggcccctccagatacgtcaggagggcacgaaggtaggggataatgtcggaatacttcatcgacttgcatccccaggaacctgccgcattcgttatcttgccttctgcggtgttacaggaccggtgcaggacgccccgcaccagccccgtttcgtggtcgtggtccatcaccgcttcgcccttcacgctgatatcgatgggcttgccgcagagcgggcacagcttgttctgctcggcccatagcttcagggtgaaggtgcgctgttgactgcgcggtatctggtagaccttcggctcactcgtcataatcgctctccctccgcttctggagcagcgcctcgtggtaggcgtccagctcgatgatccactggcggaaggccggacgaaggtcgcggcttaacagatactgcgctgcgttgtcggtaggcgttcggcgcatccacagcacctcggcctctgccagcgggttttgcttgatcttggcgtacgcctccaggatcatgtcgatggcctcgtcctcatccgtgatcggatggaggatgtcgaaggccgtcttcataccgcagagcttaccgttgaatcgatcgatccctcggatgttgtcagcggtgtcgccgccgagccactgcgccaagaagaacttccgtccatggcccttgagcttgaactggccggaaggcgtgtacgcttccttgaggtagccgaagccgccctcgatcctgctcacacatgccgtatcgatctcccaatacgggtagatcgtcatccgcaggtctttgtcgtcggaccggatgatggccttgtcctgcatggcgtaggcgtccatcatcatgccgtcgtccgcctcgaagaacgtgtgcaggatgacatcgatcccctccggcgccccgcctcgctcatgcacgtccgccacggcccgccgcagtggctccagcagcgcgggctttgccttgcccttgcgctggccctggtacggtttcatggtcggatacgtgtcgcggtacgccttcgccccacctgctgccgtgaggtgaacccgtgtccctgtgcagtgcgctaggaactgctgctccaaaatgagcttccagaatcttcggagtgcagtgtccagggtcttagcagtggccgcagccacgtaggcgggtccgtcggcgtcacacaccaacgtcccgcctgccatgctgcggtcgaactgcgcggatagtcctgccaggaactcttccgatggcaggcgcattagacctgcggtactgccggcactaccgggaccgccgggacttcgaccgctgccggagctgccgtctgagccacctggggcacgtcaggcagcacgttctgtgcctcggcagtacctaccacaggggcggccacattcgccacctggggcacgctgggggccgtctgagccactgcctggggaacagccgggacagccggtgctgccgctacgccggcgtcggcggccacgttgggcactgccggcaggttgctgcctgcggcctgggtcgtcggcttgatgatcagatcgtcgccgccgcccaacatgatgtgcagggccgagccggggaagttggtggccgagcgaatggtctcttgcaggaagttcttggacttgccgttgtccgaggtgccttcgatgaacagggcgtcccaggtctccttggtcggcgcgtcgaagaagaagtattgcagcaggtccagcggcagttccggtacgttgtacgggctgccatcgaccgggttatagggcttcatgatgccgccccaatcgatgtcgttgcgttccttaccggcgttgttgcctttggtgatcttggtgcgcttgatcgggatgatgaacgcctggccgagcatctgagcgaagtgggtatgctgcccgctccagttcatcttgtcgaaggccagcttggtcttggacttttcgttgttgccgagggtcatctcgaaggtacggaacaggcctggcttgatcgagccgtcggcctcgtaggtgtggaacaggtcgtccgggcggctctgcgggttaccggcctgcgggttcacgtcgccccacaatgcgaagcccaggcggatttgaggcgccgggttcttgagcttgccctggaattccttggcgtggtcacccagctcgatgtagatgcagaagcggcccatggcggtgcccgccgggaagattcgaccgccgccaccgccggtggaggtttcggacatgtcgatggttgcggtctcggcagccttgttggccagggcgagtgcagcttgcagagcgttgagttgctgagtcatgcgtggtctctcttgtgtcgaaggaagatttaaggccggagtagggaagggtcgtcaggcgttcgaggcgtgcggcagcgccttgaagacgatggacacactgcgcctggacgcaggccggacgaggacgttcctgtaccccagggcctccaggatggtttcgatgcggtctaccaaggccgccgcgctcccgccgtggtggtcgtcgaatgtcatcgtcttacgtggatgggcgagggccattccgatggcttgcatggcgatacccgtggtgcggccagtacgccgctcgccgggcaggcatccggtctggtccaggaatgtcttgacgaactcgggcgtgtgcagcggatgcagttctttcactgaatcacctccatattgaacatgttcggccccatctcagccactgccgggaacggaacgtctgcgatgtcgtagcccaggcgctcgctcatgtagcgggcagcgtcggccatgatgtcgcgcacgcccttgttgacctcggcggcggtgtccttgtggcagtcggtgtacacggcatcgtgtacgttgttgatcaggaactcggtgaccatgaatcctgggcgatgcagcatccaacggaagatgcgccccacgctcacggtcatcatgaacccagcctcgccctggttccagtagttggcgatctgcgtgtccttgaagtccatgaccgtcttgcgctgttccttgtcccagcgctcctgttggcggaagctgtagcaggtgccacccggcgcttgccagaatcctcggcggtactggcgccagttgccatccggccccatctcgctgaaggcgcctgccggcatctggtcctcggccttgtacatgacgaggctggtggcctctgcactgtcgcggacgatctgccggaatgcgatggactctgggaatagggccgcctcgttgtccaggaattcctgggcctcttccacggtgcagccggtgttgaatgcgataccagccgcactcgcgccgtactgcgccgagaatgccttgggcttgatgttctttcgagcctgcatcatgcgaccgtgccacgggtggttggggtccttcttgatggccacgagctggtcgtagtcgaacccgttccagttgttgtgcttccctgccaggcggtacaagtgcatgtcagtgccggccatcagcttcgccaggaggttccgatccttcgacagggccgccaacatcaccacctccagggcggtgtagtcggtctcgccgatcatcccgtccgcgccgaagcgggacacgaacatctccttcacgcggctgccggcttccgggtcgtcctcgtccttcgacggtagctgctggaggttcgggcggctggacgacagtcgagtcgtggccgtcgcggtcgtgttcagcgagtggtggatgataccatcatcgtccacgtactgaagcatccccttcgtgtccttaatcgtcccatccttgttgtaggtatgggtgatgtagaacgaggagttgtccttgtgcagctcggccagccgtatcaacagcttggccgcctcgaatccctgtttctccagggccgtgagggcgtcgccgctggtgctgaatacgggcgacccgtccgccagggtgagggcgcactggaactccgggcgcttgcccaggaacttctcgcgcaccacctccggcaggttgttcaggtttatcaggccggggaacctgaatcgctggtcgtcatcccacttggtcgccggaatgtccgtgtcctcgcggaacaccttgacgctgcccttgttcttgccagcggagaacgtgatgaccgggccgtgcttggtcgccagctcggtgatggtgggccagtgccactcaccctggtcggtcacttcgtggatcgggacccgcaccgaggtactctcgatcggtgtcccccgcttggccgtaccgaagcgcacgaagtcggctttctccatccggccatcttcgtagggcacccgtcccttgtaccgcacttcgccgccgtagagccacgcgctcatgtgatacaggctggtatacttgaactcgaagtattccgggaagtcgggcatcagcttcttcagctcagcctcgatcccggccacctcttccagttgcttggcgtggttcaccttggcgacttcgaggtccaccttcaggccggcacactccatcgccgagaaaccgatcagggcctcgcagcgctccaggtagccagcccacatgccacgggcctgaagcttcatcaactggccatagaacacgagggcggtattctcgatgtcaccgcacgggccggacaggtactcgctcagcaggtcctggtccatctccgaggtgagcacaccctggtcccacagcatcttgatgccgtccaccttgtgggtgccaccgtacttcggagccagctcgtcgagtgccgggtacagccacgtctgatgactcaacagatactcggcctgctgggtacaccagacccggccaccgcgtcgcaggaaggccaggtactcgtcccggtagcgggtgaagaaccagttcgattcgaacatggcgttgtgagctacgatcacgtccacgccgtcgaggttgaaccagcggttgttcgggtcttcggcttcggcccggctgcggaagcgatgctctaccttctggcctaccttgccgtcaacatcgtcacgccagccggccatgacgatgtagttgcgggggtcaaagggcgacgccttgcgccccttgtgctcgtagctctcggtttcgaggtcgaggattcgtatcgtcgtcatagggaataccagttcttggtgacgaattcctgggccttcttgagcatgccttccagcacctgccgggggatgacctccatcaggtacttgatgatgctgtctcggttatcggccagtacgtgttcgggcaccgactgcatgtaccgcaggtggcccagcttcgggtggttgtagtccacctggaagcgtagctcccagtacccaccacaccccctgtacatgccgagcggaacctcttccacgcgcatctggattccggggaacagcaggttcagcggaccgtggatgtcctggagtaagcagcgcaggatgcgctcgtgttcagttggtactcgcacggcgtttagcctcctgtcgcatcatgcggtggagtcggcggcgagctgcgcccagggatgggcacaggtacgcattcccctggcaatgggccatgaacccgccggtgtggtatttgaagacggcacctccgaagaacgtgctccaggcattcgccggcatgggcgccccgcgtttaacggagcgggccgtcacgtggtacagcatatcgtcgccgaagaaacagctccggtgggttcgaataactctcataccttgtcccccttatagggcagaatgtcgcggaagcgactgaacttcggatggcgcagggtgtgcgccgagcgctccatcgcagtgacctcgaccacacggcccaggtctggcatatcaggatggtcggccccgcccagcagttcggcctcggcagtcagcaggtcaatccggtctcgggtcaggcccgtagccgacacgattccggtaccgtcttcgaggttcaccttgtagccgaccaccttaccgacgttcgccccggtcttgcccatgacgaagcccacgacgcggccctcgacggcaatactcggcttcatcttccagcaaccggagactttgccgttgcggtagggcaggctcgggtccttgaccatggcgccttcgaagcccatgctgcggtactgctggtagatgtgctcgacctcttccaggcaagtcgcagtgcggttgttgatcaggaacaacggcccggtagctgcgcccagggcagtgcctgccagggcacggcgctctgcgttgtccatgtgggacttgcgcttacgcagcagcacgtccacatgggttgcgtcgaatactgcgaaccgcaggttggcatactcgctggcgctcagcggctccttcgactggaggcgcccacaggactcttcgaaggtcatgccggtcaggtacatctcggtatccaggacgatcccggcctgagtgacgtggtggttcaggtggttgatgatcttgtcgtccaggccggtcagcgcagggaacgcccgacccgagcgggatatgatcccgtgctcacccacgacggcacgacagccgtcgatcttcggttcgacggtgacgaagccgtgcttcttacctgccttctcgatggcggcggggttgttgtccacgccgcgccatacgcccttctcgatatccagtatcacgtcacgcttggtgctcattacttgttctcccatccgtaatacgcggccttggcccgcatcttctcgcatcgttccggcagacgtgagccggtgccgacttccttgttcacgccccaggtaacgtccttgtgcaggtacgcacccagtcgcgggccgccctcggggtccggccagttgtacgcgatgcccacttggttgatggtgaagtcgaacgactccatcacccgaccgaggctgtcggcatcgtagtagttaaagtccaagtccatgccacccaacccacggcagcccacgagggacatcacgcccttgaagataccgccatcgccgccatcggcgtagtccgagcgccagccaccgtcccggacgaagatagggtccaggaccgggagtgccttctggatcaggtgctctgcacgcccccaggtcatgctatacagggcaacatccacgtccttgggagtggcgccgtgcatcaagtcgcgagggaacccaccggccaaggcgacgccctcctcgtgagtcgcgtcggagtacaggcacaacagcaggcccgagacgctgcccagtaacagctcgatgccacccatcggaatttctttggtgccttcgagcacccggctatgtttagcttgcatgatctacactctcgaagaaacgacaccgtgcggcgtcgaagttaatcatagcctccacgttcgaaggcttcccgtccatctggaatttgttcttcggcagggacaggccgcgcatgacctgttgatccgcaccattgagacggcccaggtggatttgcacgtccacagcaccctgtaccgccgtcttcgaatccttgaggcaggactgcggtgggaacaactggtcgtgaccgtcgttgctgatctgccacgtcatgaagctgatgaagtcgtgacgcaccgccatctcgcggacctcggccaccttgtactccatctcgtcggtgcggttctggtccttgcgctggccacctttgacgtgggccatcatgtcccaaaacaccaccgccggcttcatcgcgtcaatgacctgctcggcctgggccagggacccaccatggaagtccttgatgcggatcagctcagagtcgccgccgattttctcggcgtacatcctgcgaacctcctccgggtccagagcaagaatctcgcccacggtcatgcccaaggctgccgagtacaggcgcggcttgatccgccggcccttgccctcgttgttgagccacaggatgggccgtcctgggtcgaagtaccgctttagctgcggcgcgatatggacagcgatccaggccatgaacgaggtcttgcccgcatcaggcggcgctgccaccaacaccgaggccccggcgtggaggcccttcatgtacgccggcagtaccagccccggcagcttgatgccgtggtcaccctgttcctcggccaggatgtcgaacacgtcgtccgtcacgtagtcggtcggcgtgctcaccccctcccggcgcaaggcctcgtcgctcaggcggcgcagctcatacgcgaggtcaatgtcctcgccctggttgtactgcgccaggagggcatccacccgcccggagaagtccagctcgttgagctgtgacaccaccccttgcagcgagtccgggtccaccggcttgtccagttggttgacgaggttcagcaccaccgccaactgctccggctggtaaccgccgcgcagcttgataagctcgcgcaacgcctgcgggtctaccttctgatgtgccgggtagaccttccaatactgctcgatccagtcgatgacgaagcacgtctctggccccatcatcccttcaggcaccacactccgcagcgtgcggaagcggtccttgtcactcagtgcgtgtagcgtcaatacgtccaattactaggctccttatctgctcgcgggtcaggtccttggggtcgaacccgtccggcgtgggtattacttggccttcaataagcagggaccggagccggcgcatcacgcctgcactaccacggacacctgccgggtcgccatccaagaagatgaaggcgcgcttgcaggtctgctgcaacatgatcgccgccagcctgtctcgcagccttgtaccgttcagaccgacagcaaagacttcgggacaggcccaccgcaccttcagcgccgacaagtagtcttccgtcagcacccatggcctgcccattgataattcctggggccatccatggtagtccggcgcaggatacccgtagcccacccacttgggattttggtcggcagtagcgcgcccaatccagcccgcgttggtagggaagataagccgatgctgcctttcgctgtacagcagcggcagccctggggtcatcacgttgtagtcgatgcccttggacagcagcaaaccatagagcgactgatagcagtcggcccgcgtccagtccgaggcatcctcgggccagggcataaagcgttcttgatccgcgcattgcaccctccgcacatgcgttttctcgaccacgccaccttcctggcaggagtagcaatacgccacccaacggtcaggcagattcttgacggtcatgttggtcccgccccggctcatgctcttgcatcccaggacgtgccggaccctgccagtctggcctacggcgagcgcctgcgcctgcttcagccaggagtcgcggcgcagtgccattgataccactcctcccacaggggacgcagcccgcctcgggcctcgaacatgtcctggaggtgccaggtcatgcgggtgctgtaggcgggccgccgttgtcctgcgttatcagaacgcccagggccaccagactgaaggcggctccgatgaccagcggtttgttcgcgataagccatgtcatcacctcatgcgtcataaccgggcgccctcatgtgcagcacgtccggctcaccttcagtccagtttgcctcgcggcgctcggtgcgccagcccaatccggcgtagaacggttccaggaactcgaagcagctcaggcgctcggcacctgccagctcggcagcgcgcaccagctcagcgccgataccctgccccttgtaccggtcgtccacgcacagggcgcgcagttcgttgtccaccacgaggcaggagccaagcatctcgccggcgaggctgaaggcaccgagggccagcacgccgcccttgttgcgccagatgtccctatctcgacagccattccggcggaggcggtggacatactcggcgatactcgcactcagctcccccgccgtgtccaggctgtcgcggagcgggtggtacttccgctgccacaggaaccactgccaccagttcggttcgtccttcgacgcctggatgctgaatacatggatcgtcttgatctggatcaggccgggattcaggttcagcgggtacagattcgtcttgctcatcttcaagctccctcaatttgcgctggccgaagtcgatcaggtcctgcgccatgtaatgcacaaggctgccggcacacgccgccaccttgtcccaggttgcccgcttgccgtcgatgcacgggaagacagcctcatcctccagctcgacaccgaagcggtatccgttgtaatgcgtgaagtggtattgcatgttcgtgatcctccagactcacacgagagggcgctctaggaacgccctcggatttgacccctgagtaggccctggtcgcttagacgagcaggtacgtcagcacgctacccacgacgccgccggcaatggtggctgcgaaggttgctgcctgccaggtgtccttagccgccgccttcgcccgctcacgagcctcggcctcagccttcgccacggaagcgcggaaggtataccgcacgccggtcagcttgctgatgagctgacagacggccttggtcggggccaccgtcagcaatcgctgagtctccgcgccgtcccaatacaggccggcccgttgacctacctccaccagccgggtcaagccctgcttgaggccgaacagttcagcgcccatctcgttattccggtccgcaagcttccgtacccggctgcgcagcggtccgtccatctctattccggcatcgcgtagggcacggtttaccgccagcttggtcgtgtgcaggtcgagcaggcgtatctcgaagtccttggcggacagcgggccggccttcttcgataccagcgggaataccttcagcagcagcttttcgtactcgtcggcgcgcttcgcgtcggcctggcataagctggccgctacccgcgcctccagctcggcatagtcacaggcgctgacgcgctccacgttatccaggcgcacctccaccttaccaccgtcacaggtgacgccgctcacacgggcggtgtaagtcccgcccgaagcctttttcttgggcgtgtaggcgtgagcgaatgcccggctcttggccacgcggcgcatctccggggtcacctgggagcacggtacgctgaacatgtccgatgcgaggttcgtgtaaaggtctttgcactgcatggtcagactcctgccagcttcagggtgacggccaaacctgcggtcagcaggcatacccaggccatgatggttgccttgcgagcgcggcgctcttgtgcctcgtgggcatcatgcgcagcgttcagatcgttttgcaacaggcggatggtcgcctggtggttgcgaatctcgtcgatctcccagcgacgtgcgcgctcggcggcctggagccgtcggctcaacaggtcgatgtcctctgcacgctgctggcacacggccagggcagcctccagacgatcctccagttcctgggtggctgcggacttctggacgctgacactgcgcacagtgccgttgatgtgctcggggttgcgcttgctcatggtgattcctcctatggtatggctagctcgcaataggcccggagggccgggcctattacgtgcgggccttactcgccttcggcgatagcttcgtcgagggttgcagcctgggctgccgacgattggacggcgcggatggcgctggccttcacgtccagcagcttggccggtgcgctgtcgctgaagcggaccagcacctgatagacgccggcgaccacgctgatgacttcgccgctcagcacctcggctttctcgcccttgccgtggtcgaaggtgatcacgtcgccggcgacgaggctggacaggcgctcggcggtgtgcagggcagcgaccgcctcgttgtaggtctcggtcagcttggccagagcggtgtgatgaaagaccacgttgttgcggaagtcttctacggtagccggcttcttgatgagcttggcgcccagggcggcagcggcggtggtctcggtggtggtgttgacgttggtcatgttgtagctcctcagttgagttggttcgcggcaaggaatggccacggtggaaggctggcgcgccagccttcgccttggtcactcggcggtgatcgtcacttgggtgcccttgtcgacgagtaccatgcgccaggtatcattgcgcagcacagtgggactcggggtggacaggttgccctcgacttcatcgtggatgactacaggcaccgtcgtgcggacgccccggtcggtcgtgctccccacgccgagcaccagcgtgcctcgacgggactcgggctgcaccacacggtacagctcacctgcctccaattcggtgtgccgatacaggcgggtcggtacgaggttggcattgtgggtatgggtacggatcattccgtcatctcctgtagttacttgatgttcaggtggcgcttcagcccggccaggaggccccggtacacggcgcgcagcgccaggaatattccggcgatgatcacgagtggccagacgcacccgattacgcatgcgtcctggaactgcacttccgtcgggttctcgaacggtggcgccactgcgatgcagtagcaggcacctgccagcaggccgaggcagcagtacaggccgagtacgaacagggcagcgatcattggtcggcctccccttgaacgagcttgatgtactcgccggcacccaggcggcggcaccgccagtctgtgtttagtatggccgtgcccaccgcgtactgcgcggggttcatgctgtgcagtacgatgactgcctgagccagggcaggcgtctgcttggtcgccagcacaacggcgccctctgccgagctaggcgtcaccaccttgtagagttcacctggtgccaggcgtcctacggacaagactggtggcgccgggtcttcaggcttgacatacacggtcttgacggtcattactcgccctccttcacgaggtcagtgcgatgcacctcttgtacttcacaggccgggtagatagcgaccgcgccaccgaggaaccagagttcgacgaaggcgtggccggtgacgatgctgtcggcggccacctggcgggtggttccgtccttgagacggacgacgtaagtaggattcatatgcgcttgctccagttcacgatgaggaaccggcttccaagcaaggccgtgcggcgatgcttgcgaagccagcgtttagctgccttgcgtgagtagaatcgcaagggacgcaccggtcgcttgcgactccacacgaaggcgcaaccgcccgacgggctgacagcaatgatgagccacgtcatttgcgggtaggtagctgtctgatgaaccgcacgttacgggcctcggcctcgataaggcgcagggtccgctcacagcgcacgtggtagatcgtcatacagcgggacggtcgggttatggcttcgatagtgcccttggtgcctgccgcgtcggcacccaggtagcggtcgctgtagttcaccagccccacgcggtggccgatgcggtagggatcacgcgaggacatggtaagaggttcctgcaatgtcgaagatcgggcgcccgttcgcgcagcccttgcggtattcggcgttgatccatccgtacgcctggcaggtgacacgcccggacagcgggctgccctggaccaacaacacgtcgaagccttcggagtcgaggttccggctcatacgatacgcttcgtcatagcggttcacagtcacgccggcgcccactaccacgaaccctcctggggtcaggacgtgcgcggtattcaggtcacccatgcggaatccgtgggcgcacagcaccttgtcggcggcgtgcatgcctgcggtcgggtccttggggattgcaatcaacagggtattcaaagcttgcatggtttagttctcgcttgtgatgagtccagcgatggccccggagtaggcgagggtcgcccgccagggccatgacttgagtcaccgcttcaggaggtggatgaagaatatcgtcaggccgctgaaccacaacatgcgcagttcatcctcgccgaggttgaggccgagttcgaggaagggaagggcgatccagaagtccatggtcactcccccttcgctggacggcttgctcgccatacgggaactgagccgggcggctgtactgtgccagggcgatttgacgttgcaggcgttgtttgaagctcatcgtgtttctccagttgtcattgattccagcggaacgcccgcttagcaggcgttcgacttgagtcaatgggcggcagcacgcttgctctgctcagcgatgggtgcagccttggcggccagagcttccagatcacccaggagttccataccaacgatcaccttgcccttggtctgcgcctggagcacctgctttttgatcgtggccagggcagcggccaggttaaactcctggtccagtgctttctcaggcttgaagctgtaccacgggctgttggtggcgccgacgagatcggtcttgccaaacttgttgtacaggaagggcaggtccttgttcgatttcttgtcggtgttaacctgtaccttgccgtgcagcaccagccactcgaccagcgcattgcggcggctgcccttcggcatggcttcatacagcgccttgactacggtcacgtcgccgcactggtcgatatggtggatgatcgacaggccggtcagttggatggcttcgtccagttccttgccacggacacggatggcgtcgatagcgcggttgatctcttcggtgccacggaatgcgattacggttttggagattgcgttggtcatggtatgtacctcagatggatttgttcaggtaagcagcggcggccaggtagccagcactgcggggagtggtcagggtatcgacgcggggctgcttagcttgcgcctgctcagccttgcggaagatcgggcagtcggcgcctttcggcatcctgtgcgctagatcaatccggcgtgccttgtcgcggcgagccttggcggccttgcgttgacgcggcgtcagttcattcacacgtggcattacaaacccttcccttgcgacttcttagcgttccatcccttcaggatgttccgcgccttgccttcgctacccttcacgaaagccttctgttcagggttgtggtagcgtcctggcgctggctccgggtcggtagcgtagcgcacgtcacgcatcttgcgaagctctttgcgcccttcgacgttatcctgtgcgatgagcttagtacgtttggcttcccagtcccgccagtacgctacctgagcagcaaagggtgacttgggagccttagccttgaagtgtgccatcggcaatcctcactaggtctgtctcttgaatcccctcggtggaagggcctcaagggacaaaccttggcattggcatagtccctgtagtatcagcggttctggcttgtcctgcgcatactcttcgggatcgtcagcactcttcccccgtaccctttgcgctatctgcctggccttgttcaatcggcccgccgatactacccagcatactgtcagtcgcgattaaccgaggtttctagttctcgatcccactgacactctgttcgttcccaccggcactaacgtgcctttgcttaaccgtggacggggaggcttcccgctcagactcttttgggtgagtcttcagcacccgacaggtattccctgggaccctgcctaaccagttgcagcttcggtcaacctaccgcaccagtccatgtaccgctggtgaagcttcgaacctctaccgccagatggctgagccatcctttcgtcttgctgcgcatgttagagacttgcgcttgtcttgtcaaccggcctgtctgtatttacgtggtaggccaatcctatcggctggagtcacagctttgcggtcaggttataaacaaggcgtcctatccgcatcgccccggaccatcacgtccgctatgggtgcccatcgtaccgactgagccttgcagtgtcaagcggtgccggtcatctgtttgaccgcgccgtaatcccttcacagtgtgtacatcgggaccacttgacgccgcacatcttacagcattgtgttaccttgtcaatccctgcgatgatgcctgccggccttacacatcgttggtcatgccctaagagtttgccgtgtcccttgcgcctatggcttgtgccgcgcttggaaggttgcaatctcccgtcgttctggctgcgcatcctaccgatgtcctggcagggtgtcaacccctgtctccaggctgcctgtagaggcgttgttgcgtgaagacagggcgaactctacagacctactacccacgtgtcaatacctcgccagggcgctccctggagccttcccacgcgtatagagacccacgcgtgcgaggcttagtctggctagccaggattatcgttcccaggtaacgcaaatccaccacccagggagcagccacccagccaggaccaccaccctgaaacccgcgtggcactaaggctgcggttatgtcacacacaatggacaaataggcgtccatcagcgccgcaggtgcgaccgagcaggcgagggagtggcgaggcaagaccgcaggaccagcgcagcgcccacaggcagagccagggagatagaccagcacccagggagcgacagggagcagacccagggagcaggactagacaggacaggtggaggcgagtagagtacgtggcctagagggagtggacaggcagacccagggaatacccagggcagcgccagggaggcgcagaggcaaggctagccactcccgcaccaccacccgacaggaccacagaccaccacaggaggcacagaggatgctgagcagacaggacagaggcgagcgagcctggcaccagcgcgacgcggcatggcagaggaagctagccaggtgggcgacagaggatgagcagcacagcccgtacccagcggccagggccagagccagggaagaccgtaggctggcgctggtggcgcaccgcagggcgctgagtatgagccgatggacagccacgccaccgcagggttgacaccggcggcggaccgcgtagaatgggcggcaagagggcagggaagcccagggccaccgcagggatcgcagggcagggccagcggagctggaagctcccagggacacacgagggttgcaccgcagggcgaagggcctacgggggaagggtgggctgatcagagtcgggagggttctcacacgacgataccaaaattagacccggagtaactacccccgcccacaccagccaacccagcccacacacaccctcaataaaaaattccagtagttccagtggagcacccgactatgcaggtgctcggcttgaactactacgcgtagaccttggccttggcagtctcgacagcagccatcagctcgtcgaggtgtgcgaccagctcagctcgcagcttggtctcgttgtagccagaacccagggccgcttcttccagcggacggatcaggttctcgatggtgccggcgaaggcgcggaggtctttctgagttgcagcggcgaaggttgccatggttcagttccttgtgttatggatggagtcaggttggacgggctgtagctcagcccgccggtgcggtgtatacgaccttggtgatagcaccgttggctacggtcaccttcacggaaccaccgccgtccacgggcagggtgtcaccgttcttcaccttgtaggcggtgagcgggtccggtggagtagcgccaccctcgccgcccagggcggtggctgctgcgatcacagcggtggccttggccttgacatcggcctcgtccatgtcgtgcagggcgatgcggttgtcggtgccgggctggcagacctggtagaaggtcagaccggtgttacggccagcgaggtattgctcacgggtgttcgccatgtcaatctccttgattcaaggcgttgcataggtccagggcgtcctgataggccgctacagcgcggattaggccagcctgggtggtagggtcaattagtgggtgttcgcacagcacagcgggcgccggggcggttgcacaggctgtcaacgacagcatcaggcacaggccggtcagcccacgggcggttctggtccagggcacggtccacctcctggcgctgggtgttggtcttggcagcgacctccttgacgtggcgctgcaaggtggcgtaccgcacctccagggcctccgcacgggccgtctgccgcttgatctcctcctgggcgatacccaaggcccggtagctctggacgaagccgtacgaggctcccagggctaccacagcaaggacgagtattgcgacgatggttcgaggcattgtttgatctccgcgttgcggcgattcacgaggcccttggatacgaccttctggccgttgatcgtgaccttgttccacatggccagggcttggcagccctcagtggcgcggccttggttgaagcgcttgaacgctgtgctggttgtacagactggacccacgttgtagcagaagaacgtcagggcggtctgctcgttgacgttcagcggcaccttgatggcgtccaggacaatgcgctcgaagcgctgatagtccttgagcgtcatctggtagcactgctccggtgtggctttgtcgcccatcttgaccccggcagtggtgccagagcagatggtgggtacgccggcgatgtctcggtaggcagtggtctcgctaccttccagggcgacaaggccggcgagggcagccgcaagggctgcgccgcgcaggggcttgttcacttcttgaacctccggcgaagctccgcgatgctatcgagcatcttcgggagcagggtgatgagctgggcgcccacgtagagcgcggtgagtaccgcagcacagaggctggcgatctcatagggcgagtaaacggcgatccccacgccggtgacggcgagggtgcctttgcccgcctcggtggcggtatcgagcatcataatcttcgtccttttgggcggcccttgcgacgctcccggcccatgccgagagaccgaaggacagacttagtgtaacccatcgggttgttcagccattccttcttggcagcctcttcacgagcgcgggttgcggcttcgtcgtcctttacgagcgtgggtgctagctcgcggacaaggccctcaagggcatcgatccggtcgtccttcggcagtgagcctcggtcggtggtgatgttgtgaatctggtggaacacggagcgctcattgcgcttgtccgctgggtactgctgacaggccacgtggtcggaatccatcgccgatacgtggaagatcagacggtgccgctgcatgatgggccgcagggtgtcgatgatacgacgctctttctgtccggacttctggcggtcttctacgccgatcccctcatagcggggcttgttggtgtccgggtcgatggatcgcatgtggttgcggaagagctggccaactgcaccagcgccgaggtttttctcgacatagatcaccttgacgccataacgcgcagccagggcaatacatttctccaggttctcctcggcaaagccacccttccagccgccgatgctcacgacgtggatgtacgggccaagagtcccgcccacagcatacgacagctcgtcgccaccgtcgccggcagggtccacgaacatcgtcatctgctggagcggtgcccagccgccagccatcagcgccggcaggtacagctcaggtttgatgaccgggaatcggtgggcgtcgaacttgagcttgaatcgctcatcggcagcccaggccacttgctctggcacgctctcatgcgtggcgtcgatgaac

SEQ ID NO: 29 - DNA, 42678 bp, unidentified
  source 1..42678: mol_type = genomic DNA
ttgcttgtcgtccttgccggtgttgtacatcgccaggacgtgctcttcgatcttggtgaagttggccggattcgggttgggcgtcacctcgatgtcgggcatgccgaaggctacacccagcgcacgatgtttgcacactttgcgctgaggttccacgtggtccaccaccgcgtccacgcgcaccttgccgtcacaggtaacgccgctcacacgggcggtgtaagtcccgcccgaagcctgtttcttgggcgtataggcgtgggcgaatgcccggctcttggccacacggcgcatctccggggtcacctgggagcacggtacgctgaacatgtccgatgcgaggttcgtgtaaaggtctttgcactgcatgatcagactcctgccagcttcagggtgacggccaaacctgcggtcagcaagcatacccaggccatgatggttgccttgcgagcgcggcgctcttgtgcctcatgggcatcgtgcgcagcgttcaggtcgttctgcaacaggcggatggtcgcctggtggttgcgaatctcgtcgatctcccagcgacgtgcgcgctcggctgcctggagacggcggctcagcaggtcgatgtcctctgcccgctgctggcacacggccagggcagccgccagacgatcctccagttcctgggtgaccgctggcgatgagacgctgacactacgcacggtgccgttgatgtgctcgggattgcgcttgctcatggtgactcctcctatggtatggctagctcgcaataggcccggagggccgggcctattacgtgcgggccttactcgccctgggctatggcttcgtcgagggttgcagcttgggctgccgacgactggacggcgcggatggcgctggccttcacgtccagaagcctggccggtgcgctgtcgctgaagcggaccagcacctgatagacgccggcgaccacactgatgacttcgccgctcagcacttcggctttctcgcccttgccgtggtcgaaggtgatcacgtcaccggcgacaaggctggacaggcgctcggcggtttgcagggcggcgaccgcttcgttgtagacctcggtcagcttggtcagggcgctatggtggaagaccacgttgttgcggaagtcctcgacggtggccggcttcttgatcagcttggcacccaggacagcagcggtggtggtttcggtggtggtgttgacgttggtcatgttgtagctcctcagttgagttggatcgcggcaaggaatggccacggtggaaggctggctcgccagccttcgccttggtcactcggcggtgatcgtcacttgggtgcccttgtcgacgagtaccatgcgccaggtatcattgcgcagcacagtgggactcggggtggacaggttgccctcgacttcatcgtggatgactacaggcaccgtcgtgcggacgccccggtcggtcgtgctccccacgccgagcaccagcgtgcctcgacgggactcgggctgcatcacacgatacagctcacctgcctccaattcggtgtgccgatataggcgggtcggtacgaggttggcattgtgggtatgggtacggatcattccgtcatctcctgtagttacttgatgttcaggtggcgcttcagcccggccaggaggccccggtacacggcgcgcagcgccaggaatattccggcgatgatcacgagtggccagacgcacccgattacgcatgcgtcctggaactgcacttccgtcgggttctcgaacggtggcgccactgcgatgcagtagcaggcacctgccagcaggccgaggcagcagtacaggccgagtacgaacagggcagcgatcattggtcggcctccccttgaacgagcttgatgtactcgccggcacccaggcggcggcaccgccagtctgtgtttagtatggccgtgcccaccgcgtactgcgcggggttcatgctgtgcagtacgatgactgcctgagcgagggcaggcgtctgcttggtcgccagcacaacggcgccctctgccgagctaggcgtcaccaccttgtagagttcacctggtgccaggcgtcctacggacaagactggtggcgccgggtcttcaggcttgacatacacggtcttgacggtcattactcgccctccttcacgaggtcagtgcgatgcacctcttgtacttcacaggccgggtagatagcgaccgcgccaccgaggaaccagagttcgacgaaggcgtggccggtgacgatgctgtcggcggccacctggcgggtggttccgtccttgagacggacgacgtaggtaggattcatatgcgcttgctccagttcacgatgaggaaccggctcccaagcaaggccgatcggcgatgcttgcgaagccagcgtttggccgccttgcgtgagtagaatcgcaatggacgcacaggtcgcttgcgactccacacgaaggcacagcctcctgatgggctgacggctatgatgagccacttcatttacgggtcggtagctgtctgatgaaccgcacgttacgggcctcggcctcgataaggcgcagggtccgctcacagcgtacatgatagaccgtcatacagcgggacggtcgggttatggcttcaatgatgcccttggtgcctgccgcgtcggcacccaggtagcggtcgctgtagttcaccagccccacgcggtggccgatacggtagggatcacgcgaggacatggtacgaggttcctgcaatgtcgaagatcggacgcccgttcgcgcagcccttgtggtattcagcgttgatccatccgtacgcctggcaggtgacacgcccggacagcgggctgccctggaccagcagcacgtcgaagccttcggagtcgaggttgcggctcatgcgatacgcttcgtcgtagcggttgacggtcacgccggcgcctaccacgatgaacccgccggggtcaggacgtgggcgcggttcaggtcacccatacggaagccatgggcgcatagtaccttgtcggctgcgttgaatcggcctgccgggtccttggggattgcaatcaacagggtattcaaagcttgcatggtttagttctcgcttgtgatgagtccagcgatggccccggagtaggcgagggccgcccgccagggccatgacttgagtcaccgcttcaggaggtggatgaagaataccgtcaggccgctgaaccacaacatgcgcagttcatcctcgccgaggttgaggccgagttcgaggaagggaagggcgatccagaagtccatggtcactcccccttcgcctggacggcttgctcgccgtacgggaactgagccgggcggctgtactgagccagggcgatttggcgttgcagacgttgcttgaagctcatcgtgtttctccagttgtcattgattccagcggaacgcccgcttagcaggcgttcgacttgagtcaatgggcagcagcgcgcttgctctgctcagcgataggtgcagccttggcggccagcgcttccaggtcacccagcagttccatgccgacgatcaccttgcccttggtctgagcctggagcacctgctttttgatcgtggccagggcagcagccaggttgaactcctggtccagcgctttctcaggcttgaagctgtaccacgggctgttggtggcgccgacgagatcggtcttgccgaacttgttgtacaggaagggtaggtccttgttcgatttcttgtcagtgttaacctgtaccttgccgtgcagcaccaaccactcgaccagcgcattgcggcggctgcccttcggcatggcttcatacagcgccttgactacggtcacgtcgccgcactggtcgatgtggtggatgatcgacaggccggtcagttggatggcttcgtccagttccttgccacggacacggatggcgtcgatagcgcggttgatctcttcggtgccacggaatgcgattacggttttggagattgcgttggtcatggtatgtacctcagatggatttgttcaggtaagcagcggcggccaggtagccagcactgcggggagtggtcagggtatcgacgcggggctgcttagcttgcgcctgctcagccttgcggaagatcgggcagtcggcgcctttcggcatcctgtgcgctagatcaatccggcgtgccttgtctcggcgagccttggcggccttgcgttgacgcggcgtcagttcattcacacgtggcattacaaacccttcccttgcgacttcttagcgttccatcccttcaggatgttccgcgccttgccttcgctacccttcacgaaagccttctgttcagggttgtggtagcgtcctggcgctggctccgggtcggtagcgtagcgcacgtcacgcatcttgcgaagctctttgcgcccttcgacgttatcctgtgcgatgagcttagtacgtttggcttcccagtcccgccagtacgctgcctgagcagcaaagggcgacttgggagccttagccttgaagtgtgccatcggcaatcctcactaggtctgtctcttgaatcccctcggtggaagggcctcaagggacaaaccttggcattggcatagtccctgtagtatcagcggttctggcttgtcctgcgcatactcttcgggatcgtcagcactcatcccccgtaccctttgcgctatctgcctggccttgttcaatcggcccgccgatactacccagcatactgtcagtcgcgattaaccgaggtttctagttctcgatcccactgacactctgttcgttcccaccggcactaacgtgcctttgcttaaccgtggacggggaggcttcccgctcagactcttttgggtgagtcttcagcacccgacaggtattccctggaaccctgcctaaccagttgcagcttcggtcaacctaccgcaccagtccatgtaccgctggtgaagcttcgaacctctaccgccagatggctgagccatcctttcgtcttgctgcgcatgttagagacttgcgcttgtcttgtcaatcctctgtcggggattagttcgtccagttctctggcataggcccttttgctgagtggccatcagtggtgcgaactgtaccgcgtgtcctgcaccgtgtcaatcccctaagtgatgcctgccggccttacacactgcggttcctgccctaagagtttgccgtgtcccttgcgcctatggcttgtgccgcgcttggaaggttgcaatctcccgtcgttctggctgcgcactctaccgatgccctggcagtgtgtcaaccccctgtctccaggctgcctgtgaaggcggtattgcgtgaagacagggcgaactctacagacctactacccacgtgtcaatacctcgccagggcgctccctggagccttcccacgcgtatagagacccacgcgtgcgaggcttagtctggctagccaggattatcgttcccaggtaacgcaaatccaccacccagggagcagccacccagccaggaccaccaccctgaaacccgcgtggcactaaggctgcggttatgtcacacacaatggacaaataggcgtccatcagcgccgcaggtgcgaccgagcaggcgagggagcggcgaggcaagacagcaggaccagcgcagcgccccaggcagagccagggaggtagaccagcacccagggagcgacagggagcaggactagacagggcaggtggaggcgagtagagtacgtggcctagagggagtggccaggtaggccccaggcagggccaggaccacccaggcaacgccaggtagagccaggtacagccaagaggcaaggccagccactcccgcaccaccacccgacaggaccacaggaccaccacaggaggcacagaggatgctgagcagacaggacagaggcgagcgagcctggcaccagcgcgacgcggcatggcagaggaagctagccaggtgggcgacagaggatgagcagcacagcccgtacccagcagccagggccagggccaaggatgaccgaaggctggcgctggtagcccaccgcagggcgctgagtatgagccgatggaccgccaccccgccaggggcttgacactcccgccaggatgcgtagaatgggcggcgacagggcaggaagcccaccaccacccggcgaagccggaagctcccaggaggctaggcagcaccacccaggcaatgcgagggacggcccaccagacggagggcctacgggggaaggatgggcgtgtcggagtcgggagggttctcacacgacgataccaaaattagacccggagtaactactcccgcccacaccagccaacccagcccacacacaccctcaataaaaaattccagtagttccagtggagcacccgactatgcaggtgctcggcttgaactactacgcgtagaccttggccttggcagtctcgacagcagccatcagctcgtcgaggtgtgcgaccagctcagctcgcagcttggtctcgttgtagccagaacccagggccgcttcttccagcggacggatcaggttctcgatggtgccggcgaaggcgcggaggtctttctgagttgcagcggcgaaggttgccatggttcagttccttgtgttatggatggagtcaggttggacgggctgtagctcagcccgccggtgcggtgtatacgaccttggtgatagcaccgttggctacggtcaccttcacggaaccaccgccgtccacgggcagggtgtcaccgttcttcaccttgtaggcggtgagcgggtccggtggagtagcgccaccctcgccgcccagggcggtggctgctgcgatcacagcagtggccttggccttgacatcggcctcgtccatgtcgtgcagggcgatgcggttgtcggtgccgggctggcagacctggtagaaggtcaggccggtgttacggccagcgaggtattgctcacgggtgttcgccatgtcaatctccttgattcaaggcgttgcataggtccagggcgtcctgataggccgctacagcgcggattaggccagcctgggtggtagggtcaattagtgggtgttcgcacagcacagcgggcgccggggcggttgcacaggctgtcaacgacagcagcaggcacaggccggtcagcccacgggcggttctggtccagggcacggtccacctcctggcgctgggtgttggtcttggcagcgacctccttgacgtggcgctgcaaggtggcgtaccgcacctccagggcctccgcacgggccgtctgccgcttgatctcctcctgggcgatacccaaggcccggtagctctggacgaagccgtacgaggctcccagggctaccacagcaaggacgagtattgcgacgatggttcgaggcattgtttgatctccgcgttgcggcgattcacgaggcccttggatacgaccttctggccgttgatcgtgaccttgttccacatggccagggcttggcagccctcagtggcgcggccttggttgaagcgcttgaacgctgtgctggttgtacagactggacccacgttgtagcagaagaacgtcagggcggtttgctcgttgacgttcagcggcaccttgatggcgtccaggacaatgcgctcgaagcgctgatagtccttgagcgtcatctggtagcactgctccggtgtggctttgtcgcccatcttgaccccggcagtggtgcctgagcagatggtgggtacgccggctatgtctcggtaggcagtggtctcgctaccttccagggcgacaaggccggcgagggcagccgcaagggctgcgccgcgcaggggcttgttcacttcttgaacctccggcgaagctccgcgatgctatcgagcatcttcgggagcagggtgatgagctgggcgcccacgtagagcgcggtgagtaccgcagcacagaggctggcgatctcatagggcgagtaaacggcgatccccacgccggtgacggcgagggtgcctttgcccgcctcggtggcggtatcgagcatcatagtcttcgtccttttgggcggcccttgcgacgctcccggcccatgccgagagaccgaaggacagacttagtgtaacccatcgggttgttcagccattccttcttggcagcctcttcacgagcgcgggttgcggcttcgtcgtcctttacgagcgtgggtgctagctcgcggacaaggccctcaagggcatcgatccggtcgtccttcggcagtgagcctcggtcggtggtgatgttgtgaatctggtggaacacggagcgctcattgcgcttgtccgctgggtactgctgacaggccacgtggtcggaatccatcgccgatacgtggaagatcagacggtgccgctgcatgatgggccgcagggtgtcgatgatacgacgctctttctgtccggacttctggcggtcttctacgccgatcccctcatagcggggcttgttggtgtccgggtcgatggatcgcatgtggttgcggaagagctgaccaactgcaccagcgccgaggtttttctcgacatagatcaccttgacgccataacgcgcagccagggcaatacatttctccaggttctcctcggcaaagccacccttccagccgccgatgctcacgacgtggatgtacgggccaagagtcccgcccacagcatacgacagctcgtcaccgccgtcgccggcaggatcgacgaacatcgtcatttgctggaggggtgcccagccgccagccatcagcgccggcaggtacagctcgggcttgatgatggggaaccggtgggcatcgaacttgagcttgaagcgctcgtcggctgcccaggccacctgctccggcacgctctcgtgcgtcgcgtcgatgaacagcaggtcgcgcagcttgagctgcatacgctgctcgtcggcgaggctggtgtcgagcatgtactggagctggaagccctcggcgccctggtccagctctttgtcgatcaggtcctcttcgttgtaccgctgcgggtcggcggcccagccacgggtgccgtccaggcccttgcccgtgcgggggttatgccccttctcttccaggcgggcgatgcgatctacaatggagggagccagccattcaccatagcgtgcctgctcgtccagggtcgggaaccgccccggccagatgcgcatcaggaagccccgtgcgggtaggccgttgtatatcgattcacgactctgcggcgtgcccaggtagagaatcttaccgtgggtacagatagaggtgaactcctgcgactgccgcgtcagcttggcccgctcggtggcggtgaggccgttcttcgtggtctcgatgtcgtcagggatcaggatgtcagcccggtagccctggagggcagcggtgatcccgatgcagttgatggaggccgatttctcgacgcccttcaatgcccagttcacgtcgaagctggtggccgaggtacggtcacccatgcgggcctcggggcgcaggtacgccagcaggtcccagtgcatgatcagcttcgtgatcaactggccgttctcctcggccttgtcaccggagccggataccaacatggctcgggtagccgggttctgagtgatgcaccagaccacgtagatacaggcgatggtggacttggcctcgccacgctgtgcagcgaccatcgccttgttgggcgagtcctgcatgaagtcggcgatgtcgagctgcatccacgtcatcttgaagccgaggaacagcatggcgtccaggcagaagtcccggaagcgcgggtacatgtcccgcacttcgtgggctatctggaatcgttcttgcggcgtcatgctgcctccttagtgggtgtacaggcgttccatctcgtcgtcggtctcgccggcgatgaagccttccagcgctatccggcgattctccttctgagcctgacgcatctcctcgcggagccgatcgatgttgatcgtgtccgacggatcgcaggtgatctcgttgtccttgaggaacttggtggcggctgcgatatccgatgcggggatcgggatgtcgttgtccatgtaccacttgaagttgcgctcgatggcggtgcagaccagctcgtgaagcaggcccagccgctcagcactcgcggtctgctttttgctcattacatgtgccctctgaattggacttggaagcgtaggttggttcccataccgcacttgaccagaggtcggaacaccttgccggtgtctacctccaggtgctcctgggtgtagttctcgttctgcgtgcgaacgtacatgttaccgcctcgggtgtagggtacgatgacctgcgcccacgcagttgcgcctgggcgcttgtcgtcgagggctaccttggcatagtccacttggcccagctcaactacgatacgacggccctgctgcacgttgaagtacgatagggcgccggtcttgtctgcgcggacgaacacaaagacgtagttcatattactgtcgaagtccaaggatatcgtcgagatacccgcgtcgatgccatcgccaatgcgcacttcgttggtgccgtcctcccagccgaggtaggtgccgtcgttccgcagcatggtgcgccatacccggacgaatagcccctcggaggggtcctggatggcgacccctccgtcgcagaagtcgagcacgtcgctgatgtcacgacgtgccctggcccctacaaacttcgacttggccttgggatcgaggtcttcgttgaagtcatagatcagcgccatggttatgccctcgccaccgagaactccattgtaatggagaactcctgagtgttgttcttgactactggagggtcgatggtgagtgcgtagttccgcccattgtaaatctttaggtccttacagccggtgataccccctggcatgttgccgttatctacggcggcccgtagcataagctgacccttgtaggtgccgcgagtatatcgcgggtacagcttcacccactgaccgtcttggacatcagcaccggacgcattcttgccgtcgatccgtggactctcgttgtagaagatgtagcgctcaccgtagaggttacgacggttagcgaagggcagcggggtgaggcggatggtacgctcaaccccggagatcacgaacttggcctcggccatcgccacagccttgctgcgcagctcatactgtacgtcgagaatctcgtcagcctgaactaccagggtggtgggttggccggcggcgtctttgatccgggtgtaggatagtggagtacctgccggaatcttcgcgccggtgttactctcaaaccccacctcggattgagctacgatgcccacggtggccagtacctgaccggccagggtgcctattgggaagcgccaccgcttgtgccagtaaatccactccccgtccaggcccgaggtcacgtcgccgttaggggcatacgaggtggtgcgccgaacttcttccggcagggagggcgcggcggggttagggtccgctgtgctggtgctcacggccagtgcctgggagaacaggtctgaggtgtccatggcgcaaatccaatcgagacctgcgttagtgatgaggttgtcgaaggtgtactgcgccaggacctcgcccgtggctttcagatgggtcacggtgtagcgacccttaacgcgtgtcttaaacattggtcagttccgcctgtttaattgctgtagcggtggcgaaggcataaggctcgacgatgtattcggaatatacaacgacgaccttcagctcagcacctaccactgcggtctgtgacaggaacgcgtatggttccgcgttgtagcccttaaccgtgtcgcgcagcagtgctgcgtggatggcaggtccagtcaagaacccatctccgccgccatacccgagctgagtcagcgacctcagcagcacttcgaccacgccggcagacgcctggtaggtgtcctcaccaggttggttcacaacctcgtgcagggtgtcccgtgtcagagccgccactatgttaacctggcaggaccatgtgtcgtccgtggctaggatggggtacggataggtggccaggatgggcttgggccgtcggatttgagaggccatgatgcccgcgataatgccgcgcattattcgtcctccatggctccgaacacgatccagtggttaggcccgagacgcttgagggtacacacgccattctcgccgtagagctgcatggtggtgttctgcaaccggttgatggtcacgccggggccggccacgatgttgaggtcgcgcacacccgcctgttcgaagtgaacctcgctgaactcgatccagggtgcatccgggtcttccatctgcatggtcagggtcagcggcttatcagcggtgatgcagcggttccagtaaccacgccagctcgggtcgatgtccgagtcttccgtaacggtgcgaatctcggcgaagcccagggcgcggcgcagcgcttcgttagcggcgtcgagtgcttcctgtgcgaggcgacgggcttcctcggcgatacggatcgcgtcgagaactccgtctagggcgaggtttgcggtgttgatgccctcctgcacagcgtacagcaactgcttgttgttcgcgtcgatgtaccgaggcaggaacgggatgccctggctgaactgagtgtccgggacctgggcgggcgtgtcgcggaagatgcggacctcttgatccttcttcggcaccacggccaattgaatgttggtgtcgtctacccacgtatagtcggtgacgagtatcttatcgacctggacgaacacgtcctcacgccgcaggaacgggaagtcgagactgaagacagcctcgaccccatccgcaacgtggatggtctcgggattcttgaaccgagccacgttattcccctttgatggattccaacagcaacttggttgccgggaacacgttgacgaaaggcagtgcgcccgccgcgccgttgacgatatcgccagtggccgctgccgggtcgtcgccggttacgaggtctcgaacgcctcggaacacttcgttggagtgttcagccagtccgaagaccggagcagacattctggagtggccagtgaccacaccccacatatcggcggtgaagcccaggccggcagtgtagccgatgccgtcgatggccatcttgcggatgccttcgtcagaggtgtcgaacttgccattgatcgctgccttggcacccatcatcagcgctgtgagcggatactggaatgcgaggagcgaggccacgccaagcacgccggagttctcgtaggttccccggaggagcttgttgtgcgcgaaggccacgaagctgcggaactggcccaggatttggccgaccggcgaccgggcgaagcccgagttctgaccgaccctgccgtacagcagcgagtcgtccatgatccgcagtgcggtgttcatgacggtgttcacgtctgcttggctccaggcgccccaattcatcgattgggcgttccttcctctgtatgtgacataaccgcgaacccgcgccaacactggcgtccagtccacgtccttcccgtactgctggagcacgcgaagggctgcttcatccccctgagccgcccgcgccaccttgttcaaggtgaggttggcgttcatacgggattgccagttgtgaatgaacttcatgccgttgagcaccgggacagcctgcttacctgcgtgcaggaagcgatccatgaaggtatcttggctggccaggaaggtgtcgaactgccgcttccagggcttcatccggatatcgttggcgaggttcaggccgaggacggtctgcatctcgtcagcgaggtccgggtcgcgacgcatggcgcccacgaagtctcccaggcgggagttcagcatggccttcatgacgttgaagacgccttgacggtgcgccatcgtggccagctcggcgagctgatacacgcctgagaatcccagcatggtggcgctggtcaagccgctggcccgctgagcaaccgggccgagctgatgctccctcggaacgttgccggtgaagtccccgaagactccccgcagttgccccgtcagctcctgcaccttatcggtgcccaggtgggctgcctctctctggtactcccggatgaaggcttcgatctccgagtcccccggcatgcctgcgcgggccaatgctgagcggcccgacatactgccggcgtagttctccatcagccggtccaggtctcggtcgatcaggtcctgcacccgatacacggtgccgttgtggttgatctcggcggtcatgtccagcgacagccggcccttgccgtacttgacggtgccctggtcggactgcttctgctcgatcttggccatgatgctgtcgaacttggcctgggacacgttggcctcctccagcgcctgccggatgaatgccgtgtccgccacgcccatcgcgcccatgaactcggagcggattccggtggcccgatcccgcgcccgctgcacaatggcctgtgcgatggtatcggcgtcggcgcgctccagcccagggatgccacggaacactgcctcgctgatggcacggcgggccaggccaggggcggcctcgtccatctgcgccatcttcgaccagttccatgaacggtggaagtaccccggtcgggaagcgaagtcctcgaagccacgcacaccggcttccctggcgcgctggcccatcagaccgtgaatctcgtctgagcggtcggccagggccttgatggtcggcggcaggttcgggtctacacggacgctaccataggcggtccactcccggtcccggcgcagcagctcgcgggagacctgctcgttgagctggtcccggactgccatggcgcggcgggagttcagcgcacgtgccgtcaggcccacaccctgctcagccattgccttggccatcatttcgtcgtaggacttcacgtagccctcgaactcgttccgatagcggcggagatagctcgctgcgttgtcgttcgtgctgaacccatcccgacgtaccgggtcgtcgataagacggctcagaagtcgccgtgcgccctctccaggctgtgccaggaggtctgcctcgctgaagaaccggttcacgaagcctgcaccctcgcgggcacgttccctggtggtccttacgatggtctccaggctggcctcctcggttaccggagcgcccttgttggcccacttggcctgcgccttagtgtaaccgggcatggcctccataatcgtctcagaggcggccaggacgcggctcagggccgtgtcagcatcggaccgcagacccagcagggtgcggatgccctccacgaagcgggaccacaggcccggcccgccgtcgctgtatcggaggcggttcagggtccgttggaagcgggtatccgtcaggccccaggccaccagttccttgacgttggccagggtgttggagttgccggccagcagcgtctcctcgaactcggacagttgccgaccggcggcccggtcctgcttcagggcgttgagtacgttaccccggacgttctccagggtctgcatggcctgcgccacctttggactcatcgcgccaggattccgcaaggcggcgttcatcacgcccacggtggcagcgtgaaccgcctcgtggagcacggtcaccgggttggtgccgactcgaccaggtgcggtgctgccgcgtacctggaccaaggtgtcgaggccctgggtggagtgaatccccgccgtacccggtttgaggaaggcagagctggcagtgtcaccgccctgcaccacacggaacgcggtacgctgccccaggccctccagggtcctgatggtatcagccaccttggcggcgatgccctggagcggcttgggcacctctgcgtgggtcttgaggtgatccaggacctcagacagcttccggcccgacaggctatgcagctcgtcgccgaaggccgtgtcacgtcgcgggatggccggtatctcggcctgttccaccttggcgctgacacgggacagcacggtaccctcgtccagcaggtctaccacgtcaccggccttgaatccgcgtgcggcggcctcctcggcggtcatggctacttctggcagcccgacagtaggcgccgatacttcgggcacatgcggctgcgttggggcttctgcggcaatacgtcccgcacccgaccccagcagagcacccacgccagcgccaagagcacccgccacgatgtaggttccgacatccacgtcggcccctgcggcatccagcccagcaacatacccgacttgcccagcgccgccagcagcagccatgccagcacgaccgagccgcagagcacggccagcgccgaaagtaaccgcatcaactgccagagcggcagggtccagcatgccagccgcgaagttccagtacgggttgtcccgcacgatttgctcgtcctgctcataccgttgaatcctcgacaggaggtaggccgcgtcctcggcattgccggcacgggccatgatctggagatagttgtcagtcggctggatacctgccgcctggagcgcctggaccccataggtcccagcgtcgaagttagggtccacctcgcctgtactgttcgccgcaaggtctgcgtcgagctggagcgcatcgccccagcgtccgacgagggtggactggttccagagtgcggaagcacggtcaagggccggcagttcctggtccgctacgatgcgttccagttcccgcgcattggctcgttggcccgctgccacgttccgttctccgatctcgccacccgtcagggcgtcgaaccccacggtaggcaccgcgtcgagttggccctgtacttgggcctcgtcgagctgtgcttggtcaaggggatacttgggcgtcatgcggcccttgaattgctttgccatgtcttactccgctgttgcggcgctgtaccaatcgacaccgatttgactcggtgtatcgaagtggggcgccatgcgcttgatgaatgcctcggcccggttgggcgtctgcgtgtaccacttgctgtttcgcacaccagcctcgaaggcttccttgttgcgatccttgatcgcctggaaggtgttacggaactgccgggcacgtccttcgcccatctggaaggccataccggccaatcccaggatagaggcattgttcgtaacgcccagctcgtcggccaacctcacaccctggtcgagtgcgcggtcggtgtcctcggcgaaccactgcgcggcttgctcaggcgtgactgtagtgcctgccccagcattgccactgcccaggtaatgccccaggcccacactataaccatcggcatccttatacgcctcccctcggtaagcctcgaactgagccagttccttccgccagttgaacacgtcctgcttcagcatgccggcactgttgcccccgttcatgcgaatgtccgtgccgctgaccttgacgttggcaccgtactcggcgccccgcatcgcattcagcttatccgcgttgcgcttgagcacctcgttgccgactgcctggggatcaacccgcgtgcggtccagggccacaccgttctcgtcgtactcgacggcgaggaggctgccactggtgcggtcgtactcgaaggcgactaccgacttgtagccgaggagtccttcgacatgcggcttgtgctgctcggccaggacggttccgatggtctcggtgtcgttggtcccgaatagctgctcggcggtggtgccgcgaggcaggatcagcggcgcgctatcgcggcggctgaataggtccccttccttcaggttccgaccttcgcctacctggatggtgcggttacgcacgttggcggcggcgatctccagcagggcctcgcggcccgtgtcgctggtgagcagacccgcatgcttgcggtcgctggccagccagttcgcctcgtcgatggtcgcccggcgatacatgctcaggacggcctcgttgttgctcaggtcgctctcgccggtcagcatgttccaggctcgaccgaagatgttgttcacgaacttgtcgttgacctgcttaccgaggttgtccttgaatgccttggtgttctggcctttctcgaactcgtccatctgcttcacgacttcggcgttggcgctaaactcgcgcagagcttgagctggtgcgatgcccatcttcatctgcttgagtgcccaggccacggcgccctgctcggcttccgggatgccggatagcatcacgttgccggcggatgggttgatctcctgggctgaggccacctgttcgaagatgctgttcagcgtgttgaccagctccgggtttgcctcgccttccttggcggcctggatcatgcgcaccgcgctgcccacggactcgccgtaggtcttggggaaggtccccaggcgcaggccgagctgtgtgccctgcacgagacggtcagtcaggcttgagccgttggcggcctgcatcttgtcccactgctccagcgcctcggtgacgttggtacccagcgtgtggagggcgttgatgtctccggcttccaaggccgccatgatgccctgcatgcgctgagcgttgcccaggccggtcatggccttggtcatgaacgagatggcctgagcgtcgctccagcggccctcctcgaccatgccccgtgagtacgcctcaacctcggcaaggtctgtgatggcgccgttggccacccgctgctggaagtccgcgtcggcccgcagggtagccatcgattccttggcacgggtctgtgccttcgatttttcatagaggccgttgagcgcacgccggtcgtcaaaggacatactgtccaggaacccggcatcgcgcaggccctcatagatgccccgctggttcatgtccaggctggccgccaggaactgcatgcctaccttgtcgcgcacctccagcgggatatcctcggaggtcatgatgttggtatagaacaggcctgcctcttccaggctgagctgccgggacagttcgtcgccggtggcctgagcctgcacagccttggccaggatgctgttaccctgggtgcggaagccacgggcggcctggtcgatggaccagtccatgtacgccttagcctgcatgccgaagagctgttcctcggccttctgctgctgcgccagcgcctgtaaggcatcgttggggttcatgccctcggtcgaatccaggacgtgcgtagcctcctgggacaggtacttgcggaactcctcgggagtcatctcccggcccttgttggcgatgaatcgctgcatcttcaggctgaagtccgcctgggcgatacggtagtcctgcttacgccaaccacccttcacgaatggtttggccagtacgttgctgtctactgcctcctcagcctcgccggccatacgggcacgctcaccgcgcaggacttcctgctgcacgttgtgctcgaaccatttgccagcgatctgctgaccggcacccaggatgccgtcgagaatctgcgagcctacgctcgggccgctgtagttgatctcggagtcgcgcactccgcgccgggcactctggcccggctggagttgcgtctgcccgacgttgatcccaagctcttgggaagcacgttgcgattccgccatcagttgcctcctttaggcgtggcgccgaacttgaagtattgacttgcgtacagggaacccgccgacatcagaccggccaccagcggggaccgttgccccgccgtggtactcttctgacccagcaggccggccttagcctgagcctggatggagtgcgcctgctcggcgaggttccacatctgattttccaggttgtcgtcaatctggatcagggcctcgccgacctcccgctcgatatccagggccaccgcatcgacggatgcacccttgacgccaaacgccccggcctgagcctcggcgcttccgccggctagcatcccctggcgcttggcctccacctgcgaggccacggcttgcttgcggtagctagcggccatgactccgaggttggcgatgtcgcgggcagcggcgcccaggttatcgaggtccgtcttcagtcgagccttgttctcggccttgatcttgttgcgctcttccttgttggccaatccctgttgaagggcggacatgccgccagcggccaatagtggtagccagaaagccatcacaccctcctgtaggtttggttggacttgaagttgtattcgacagcccgaacgttcatgtcgtacggactgtgacagctcagctcgaacttggacgtggccatatcgacccgtgccggcagcggcaccacagcgctatccaccagaggctccccggcattgagttgccggctgaacaaccgaaggggcgtcgtgtcgtaccacggctggttgggtcgagccgtgtcgctgatgcgccacaggaactcgccggtccagccgaagtttacgttgtaccgatgaagcactgcacgggtcgaggtcatgggcaggccattgtggtctcggagaaccggcggagtgaactccaccttcgaccagaactcgcagccgaccacatacaccgccccaaccacggcctcgggcacgtcgaggaacaccttcgtactcgtctcgcgtttcacgccgagatgggtacgctccatgtaggcgccggccacaggctgtagctggtacacggcagaggcatccttgatcaggtcccaatgctgcttggtcagctccagctcaccatcgacggtcgcctcgatacgccgccagtagtcgtatttagggtattgcagaccctcacgggctggcaggctgttcaggtgcatacgtcccagggcgatctcctggcccttctgaatcaggaccatcaggttgtcgccagtgaagtaggcgccgattatctgatgtcgcaacgtccagcgatgaaacgcgttctgcactttctcgttgccctgccagaggtactggtggcagatcatctcgtccgccgtgctggtgccgaacaccaggtagccgctggaggccgccgcctggatgtactcagcaggccccggcatgtagctcgggatgtggctggtaacgtcttcggcgacgtagtggctgtccgtggacggcgacggggccatctcatgcaggcccatgaaacccagggcacgctccgcagcgaagtatacactgcgaccagtcacggcaggtgccgccctggtatcgaggtcgtactgcgtggtgatgctgataaccgccgtccggggagttacaatgccgccaccggggaccacggcctgatacttcttggcgaagacgatcaagtccttgttgaaggtgaccgcgtgctcgtacggctcagtcaggctcccctgggctgcgatctcgataggatcgtcgtcgttcagcgcggccgccgacttcttgaaccagcggtgcggattgttactggccgacatgcagacgtactcctgcgacaggaggacgaggcgaccctggaaggtcgtcatgccggtgatgcctcgggtgacgaagttgaacgtggggttcgtatcctcgtcgccggagccacgtcgatcatactccagctcgttcaagctgtaggtgtcggtagcctcatcccagcgcagggccagtggcatcttcttcaggacccaatcggtgccgtaggcggcccgctctgcccagcggcggttagcggaatcccactcgaagtataccggggccttggtagagccggtggccatgacagcgccgtccatgaactgcacccccacaccaggggcgccgactcccggcagcaaggccggcaggtccgccgtagcattgaggctcataccacctgacgcgatgccgtagttgttgcccatatccgtggacacttcaacgtggatatcggcgtcgccacggaacgcgatgtacccgtcctgcacgccccgttggttgaggtaaccggctatggttgccgcgttggcgtccgggtctaccttcgggtatttcttcgtggagttgggcagggtgtactccggcgccccgaagaacttgccgtagagctgccaagcgatgtagcccacgctcgtttggaacggtgcctcagcgaggttggggttcgtgctggcgttgtccggtgtcacgtaggtggccgtgtgactgtaggtggtgcccgtggcgttgtccttgaccttgatggtcagggagaatgccttcgaatactgccctgccttgatgtacagccagccagtcttgttggggtccacacccttgacatcggtgcggtcggcttcaggcttcacgctcaggttggcgatgaacaagtcatcagccaccgtggcggcgcgaagctgccggtagtcggcggctttgaggtagtcatgcaccaggggctgacccatcagcaggcgaccgtcccgctcgtcgaacaggtacagctcaccacggtgctgcgccaccagcatcgcaatgctgcggccaccgaggttcgtgtggtagaggaacggcctcggccagggctggtcggtatgcagcaggtgggccatcagctcgataccgctgcgccgccgaagtcctgacacgggatcggataccatgttgatctgctcgctgagctggcccggcaggcgctcgaagggcacctgctggctcacacccatcagcagattgggatacgcggattgcttgtagctcatgctcaggtcctcaagctgcgccgccaccggctgaagctacgcttggcctgggtgttcagcggacgtgatcgggtgtgcatgcgggacagttcgttctgatacgcctgcaattcctgggcgatgacctgggcggtctcgtccggtccaatctcgtgggtgtataccgcgagcgcagcctggtgcgcaatgacgcgctgtgcgatctccgggatacggtcccactcccgagacagcaccaatcggccctcgaccgacttaccgatgcggtcgtcgccggtgttggcatctcgcactcccaggccgtcccactggaggtccggggaatccgggtagaatgccaaggtgcccttgggcaggttgatgcggcccgtgggatcaggtgtaagcttgtgcttccaccaggtgttgaaccaccagccttgggtcagcaactggatgcgttgatcttccagctccgggagggcgatggccatggttggatacgtctcatccatgctcgggatcggcagctcgccgatcttgcgcaggatgacattcactgcgtcgagtagtagcatagggtttctcctaaagcgcaaaaacccacgcagggaatctgcgcgggtcgttaggctttgaagaaaccccacaccgaagtgcggggttccgtggcatcacgcggtgatgtcgaaggcgccgatacccttcagttcgatggcaccagcggtgtccggacgacgggcaccgatgttgtacatctggaaggtatccaggacccacgagaatttctcgttgtcttcccacagcttggcctggaccggcgccacttgggcggtgatcagggtcttgctcgggaggaacagggcgatctggcgctcggactcctcggcgctcacgttgaagtgacggcccagcgggtgggctgcgattgccttggtggcgaagcgcggagtctccagcaccttgacgccgttgaggatggccacgcgggacttcacgtagtcgttggtcgcgccggttgcctggtactcgacgttcatcagcttgtcgtgctccagcagcaggctgaacacacgcggcgacatcggggtcaggccctcggagtagaccgcatcgcccaggtcgcggtcgatgaaggtctcgactacgcggcggtgcatgcggacgatcttgtcggcagcctgcttggcggtcaggccggtcaggtccagtttctccagcacgcccggcgagaacgcatcttccaggtccactggcgcgtccatcgcggcagccttgatcacctggatcaggcaggcttggtcgaacttgcgagccagttcctggccgtccagctcggcgacttccttgcgcatgtcgaaggattgggtccactcgtcctggtggtcgaactggtggcggaggtacagcagggtgtcgacggtcaggttccacttgtcgttcacgactcggctgcgctccagctcttcaccggcgcggcggcccttggcctcgacgttacccaggcgatccaggcggaccacgttcgagccacgcaggtcgcggatgttcatcagcggtgcgaacttggaggtgtaggcgaagtgcttatcgacgatgccgaggtgctcttccaggtggatgtcaacgtccgcgttcttgccagcgtagttcggacgggtcaggtcgttcaaaaagctcatacgatgctctctcttttggatgtgggtttaaggccggagtagggcagggtcgttagataccctgcgccatgcctgccttacgacgctcgcgcagcgcagccatctcggcttcggatgcgttcagcggcagcttagatacttccaagcggtactgctcagcgctcagagctgccagtgcaggtgccgcagcacccaggggttggccggtagcctgtaccacggcaccggagccttgtgcgaaggccacaatctgcttcgcggcgtattgcatggcctgggcatcgcccgagtccatcagccgaccgatggcggccttggtggccgggtcagcgtgttggttgaagactccggcagcctgcttcaggatggcctcaccgccgacggcggcataggtctggctcaggacggccttggtctgcgcatcaacataggtcaggacgcccttggccacgttgatgacgtgctgcgcctgggccgggccgagaacttccttcagatagtgctcgtcgatgaaccggggatcgcggttctcggcggccttgccgaaggctcggacggtatccagtttgtcagagaacgcctccagatagctgatggagggcgccaactgcgggtcgccttcgaggttccctgccaaggtgcccacgatctccccgttgggagtgaaggccggcggcggcgggacttccaggttctcgggaagaactgcacccgcagccggcggagctaccggggccggctgagcgggtgcttgcggaacaactggttgacccacggcaggtgccgctaccggctggtagtgcggcgtcatggcgctggtcggaacgggttgcggctgctgggtcggaatggccagttgctgcggcgcacctacctggccgggctggaccggagcctgcggctggatcaccgggttcggtatcacctgcacatgactcggtgtcggcgcggcggcgggcggtacgttggcaaccaggttagcgaggcccggcggcagttgctgttcgttcggttgggacatctatcagactcctgcgagtgcgttggtcatatcggaagcgccttccagcaaggtctcctgggctgcctgggcctgtgcggcctgctggcgctgctgctctgcctcggcctgtagctctgcctcgctcttgtagaactgcgaggtatcgacgctgaaggctgcccaaatcgtgtccatcatcttcggtagcgagatgcgtggatcgagctgagcaatcggggccaagccagcaatgacctgggaagcgttgagcatgctctgcacagcggcggagcgggacagggcgggaaggcccgtctcgatagccggcttgtgctgcttggtgatcaagccctggagtagcgcatcgtccacctcagacaggcagacgtaggccaggggcgactgaaggttctcggccaggagcgaatacgtgccgcccagcgtgttctccgcctcctccgcagtgatgcggacttcctcggcggtgacgcgctcggcgtcgcgctggttggcaccatacatgaacgcctggttcaggcggacgactacggcttgcaagctctgctggatagcagccatcttgttgtagtcgccacgctcgtaagcacggacggcctccgcgccacctggcacgtagtcacccatctcggcgtcttggtagtcatcgaccaccgcacccttggcctcgtccacgaggttcaggacctccaacgactccagctcgtacaggccgagtttctcgctcaacagggacagcttggcgaagtcgccgatgtagtcctcgacgtggcctcgaccgtagtgctcgccgggggcgaggttccaggtcggcacgatgtacgggcacaggtggataggccagcggccctccttgcccacacgcacgccgtcgatctcgtggtacagctcggcgtattccatcgccgtgcccctcttgcgctgtacgtgggtgtacaggtccacgctacctgaaccggacaggttgcgtcctgcgcgcatcaggtcctgcttgtactcttcatccaggtccttggacttgtagcgctgctttaggacgatatccatccagcggccagtcgcatcccggcgcaccgcataggagcggagcgaccatgcgaccaccgtagcggcggcgctgtctcggtacagcagagcattgccagtcacgatcagtagcttgatcacctgcgtcaggaccgccagggaggcgttctggaacaggcgctgtgttgctttgcgatccacccgagccaaggcagcggtcacttcggtaatgtctgtgtcccggctgtcggcctcgcggcggatcgcatcagtgagttcggatcggaagaacggaatccccgtggggaacagcgatctcgccagcttggcggcgaggttgttcaccaggagggcaccggcggactggaagtcatgctctacgactccccggctgccggacatgggatcgaccatcaggtagggaagcgtggtcttggcgaactcgatggctcgactctccacgctcccatcccgaagtttctcccacagcatagctgcggtggttttcatggcgtacctcgtcagtagttgataccgagggtttgcgatacgcctgtgcccgcctgattccggcgccgtcgcgtgccggtgccagtggcatcggccatcgctcctaggtcaacctgcgccacgttctcggcggtgaggtcaacctgctggtttcgtgcgagctggtccgcctgctgttgcattaggcggttctgctcttccatcttgcgggcatcggattgtgcgccgctcaggtcggtgcccagcaggccatcagcgagtttgccgatgatggtcttgcccagcaccttctttactttcttgcccataaggcttggctctccggtagtggatcgtgtaccggctatcgctttcacgatggctccagcacacgagggggatttgaccccagccggcctgacggtggagttcgcggatgaactcccggaccacgcctgtattgcggtagcgcggtaggacgtactgccactgtgctgtgacgcacgggccgacgtggggatcgtcctcgaacacaatgcaggcaccgccggccaactggccatcgcggaataccaacagctcggttcgatcgttgccctcgatactgtccagcatcgcattcagggcgtcgtctttcgagcggaagagggtgaattcttccaactcctgtattgccagccagcacagcccctggagttccgagggagtgccggcctttgcgtggactcgccagatggacttgttcatcacttcaactccactgcgatggcatcgcgtcggcgcaggcgtactgctcgcaccacgtctcgcctaccggcctggaactggatgtcttccatcgtggttccaggaccgatctgatgttcggggaaggtctgctctaaccactcgatctgctgagaggtgaacgtgacaggacgggccgtacccttgcctgttctcgatccttccactgtgggtgacataaccataggtcggtgggtcttcatagtagccatctatcatatctcctatgctggttagtctattctatctagaatccttcgtagtcatctagtctcatcttctactctacctctactcttcttctaccctctggtcttccctgacctctttctccctgctcccctctacgagggccttggacggatgcacttgctcctatgtgggtgacataatcccctcagcagaagaacgcccaggagtcccgtacagcctccagattcaacgatcctctccggggcggggtagcctctatcccgagctgttttgccagttctacgagcacacaggggccgctgtacatggcgatgaactgctccctgatgtggacgtgcatccgatccacgtctgccgcataggtgcccatgctgtcgtggatggcctggatcgggataccctctgccgcacaggccagggccgtcaggcccaggtggctgctgtccagcccgtggacgaagttcggagcgatgccgttggcgttgcgtaccgggtccagctcgtccttggcctcgtacagggtgacgtactcgacagcctctgcccgcagcctcacccgcacctcctcggtcttcgggtacgactggaacacctgcatgccgagtggcgtgatccagtgcaaatccttggatgcatcaggaagggccttagcgagccgctggagccattccatggcgaagactgccgatggtactgtctcgcggattgcgtccagtatgagcgttgccatgtagcttcccaggcggtatgacgggataccctcgggaatctccaggccggactcgtccaggtagtccaggcagtggtctaccacgcccttgaacgtggtgccgtataccagcgtcatgcagggcttcttcgtcaggcttcgggatagaccagccttatcccacaatacagcgtagccccgagcctcgccttcagcactttctctgtctcgtgccagagactctgcaacgagaccgagaactcgggagtagatgtcagctttggcaagtccaggtggcagcaggttgacgtaggctccgccgatctcgtctcggagaatggctgagtagtgctggaggccggagcaggttgcatccatgtggacgatgaacccacttcggtaagcctccggctggcctgatgcgtaggccgcccgcagctccagcagacctgcgatggcgcacaggggcgactcgtcttccgggaagagactcggatagttctccggaccttcgttgagtgctcgctggaagtcgtcccatcgctcatcgacccaggctgcccggtcgtcgaagtacaccttgtcacatccgagggagttggcgacgtggactttgagccagtacaggccgcgcttaccgagggcacgcttttcgtggaatcgcagacacgccttggcgatgtcggacccctggggattcggtgtgccccaatagtacatgcggccacgggagtcaacgtgcatcgggaagtacactgccttgccatgatgctctcgaacaactcggtagagtgcagcaaattcgcgaagcttggcggtatgctctcgctccccggtgtaccaccggtggacggagcgtttccaacggttgaaggcctccagctcttgctcactggcattctccttggcccactcgtcgccgagcgggaactcaggtttgtccgggtaggtgcgctgggggatgcccagcacgccgccaccggaggtgaagacgcgctcgatgatctcgtacacgtcgtggttgatctcgtaggccaccgattgcagcgcgttgaccgcctcgtacaccttgggcatcttgtcccggcccaggtggcggagctgcatctggcgtgcccgcttggtctggtgcttggtacggcgcactagcacatggtgcttctgcgccttagcgctgtagtaaccgccatcacaccagtcgttccatggtcgcggcggtgccagcatcacgctacggcctgggcctccccaggtcatcgccgccgaagggtcttgcaggaactccttggcttccggcgacggctccaggtggacgctcgtacctccacgacctgtgaagcggttcggctcgaacaggccgcactgtatcagcggatcacctatgaacttgccgaggcgcaggtagtcgccatccggcaggtcgatacgtgcctcctccggcagtaccgcgtccagaagagcgtccatcgtcttctggatgtgccggacgctgcgagtcctgctggtcttgaggtagtccagcgtccggtcgtaatagggttggttgaccttgaaggccaaccgcacttcgatctctcgacagagcatcttacccatgtgggtgtaatacttcgtcgcggtgatcgttgggtagttgatgagcatcgacagcccggcccgcagtgccatgaccgcgaggtcctgggcgtcgatgatcctcagcaggtgccgcagctttgctgccggccccgccgccttcgcttcctggtgcgcgaagatcgcttcggtcacgatggggagcatgcgcatcaacatgatgcgcgccctcgggatgcggtcgatggacccttgggcaatcgccttttccaaggcaatgcgggcgtcgttctgcgccgccccgaccagggcctcttcgtgggcgatctgctgctgtatcaggtccattccgtctcctatcgtttctcgatcacgcgtccgatgttctcagcaccgaactcttcctcggccagggtggccgcttgctccagggtagcggctcggtactcgcgccactccacgtcccgtcctaggcccaggacctcggccctgtaccagcgcagttcactcttagcggtcattgcctttctcccgatccatcagggcacgctcggcggcggccattgcgttgaatgcctcatgcaccaggtgcatcaggttggactcgtcatccagcggtccgtcgatcagccgcttggactcgtgccggtgttgggcggacttgaactcgcccaccgtcatcttcttccagtcgtgcggcagataccccttgacctcggcagcccattgcatcatgcgagcaagctcccgcttcagcagcgggaacccctcgactaccaggtgcatgggaagtttgccgaccttacgttcttccagactcgcacctttgcggtacggttcagtcgtgatcgtcgactcgtaagagtccgggaatgctaggctcatgctacctccttagttgctcagcagggctttgcgctgttccgaggtgttgcgggtgtaccgcccccggctccagccaccgcagccgccgcagtgatagtgctcgtacttgccggtctgcgtatgcacccagccctcttgcttgacatccgtgtcgccgcacttcgggcagcggatggtcggctcggcgtcattgaagtacacggccacgttgggatggccgacgaaccacgggcgcatcaggatgtacagctcctccatcgatcgtacgtcgtcgatgttgtacaggcgcatctcctcccaggcttccgggttgtcctggaggcaggctgcccacaggtcgaatccggggaacttgccgtgtaggcgcttcttgatggtgcatgccttgtgggtcatgtactccagcttacggctggtgaacgcgaattgctgcttggcgatgatcaaggtatcgatcaccttgaacggtcgtggcggcggcatcttgttcaggaagaaccgggcgttgatcttgggcacgtcgaagcgcttgccgttctggacgatgatgatgtcggcctcgtccagcagcttatgcagggcgaccagcaggtgcatgtcgtccagggggtcaccctggcagtccatgtagatcacctcgtcgctgtgcatccacttcgcacagaacgacaggatggtccagtcccgcttgatctggttgaggcccacgttctgcttccagagcgaccagacccagccctcgataggcgaggtctcgatgtccaggctcagcaccttcggaccctggcctaccacgttgcccacggcgccagggaacttgcgcactacctcggcagccttgcggcccagccagtgcatcgcgcccttcttggcgtacatgccgcgcgtcctgctgtcgtggaagcccagcttgatgcaccagttgcggaagcactggcggctcacctcgccgaagcgcgaatgctcggtcaggtgctcggcacccttcttgaggcccagctcgacatagacgtttcgcaggtactcattggtgaattgcttgcggagtttgctcatacgttcctcgcgttgtgctttgcgacggccatcgccgccttgcgtttggcggctgcctgccggcgcttggccagcttcgcttcgtgtttctcctcgtcggtcttgtgcagggggtagatcagcggatgcttcggcccctccagatacgtcaggagggcacgaaggtaggggataatgtcggaatacttcatcgacttgcatccccaggaacctgccgcattcgttatcttgccttctgcggtgttacaggaccggtgcaggacgccccgcaccagccccgtttcgtggtcgtggtccatcaccgcttcgcccttcacgctgatatcgatgggcttgccgcagagcgggcacagcttgttctgctcggcccatagcttcagggtgaaggtgcgctgttgactgcgcggtatctggtagaccttcggctcactcgtcataatcgctctccctccgcttctggagcagcgcctcgtggtaggcgtccagctcgatgatccactggcggaaggccggacgaaggtcgcggcttaacaggtactgcgctgcgttgtcggtaggcgttcggcgcatccacagcacctcggcctctgccagcgggttttgcttgatcttggcgtacgcctccaggatcatgtcgatggcctcgtcctcatccgtgatcggatggaggatgtcgaaggccgtcttcataccgcagagcttaccgttgaatcgatcgatccctcggatgttgtcagcggtgtcgccgccgagccactgcgccaagaagaacttccgtccatggcccttgagcttgaactggccggaaggcgtgtacgcttccttgaggtagccgaagccgccttcgatcctgctcacacacgccgtatcgatctcccaatacgggtagatcgtcatccgcaggtctttgtcgtcggaccggatgatggccttgtcctgcatggcgtaggcgtccatcatcatgccgtcgtccgcctcgaagaacgtgtgcaggatgacatcgatcccctccggcgccccgcctcgctcatgcacgtccgccacggcccgccgcagtggctccagcagcgcgggctttgccttgcccttgcgctggccctggtacggtttcatggtcggatacgtgtcgcggtacgccttcgccccacctgctgccgtgaggtgaacccgtgtccctgtgcagtgcgctaggaactgctgctccaaaatgagcttccagaatcttcggagtgcagtgtccagggtcttagcagtggccgcagccacgtaggcgggtccgtcggcgtcacacaccaacgtcccgcctgccatgctgcggtcgaactgcgcggatagtcctgccaggaactcttccgatggcaggcgcattagacctgcggtactgccggcactaccgggaccgccgggacttcgaccgctgccggagccgccgtctgagccacctggggcacgtcaggcagcacgttctgtgcctcggcagtacctaccacaggggcggccacattcgccacctggggcacgctgggggccgtctgagccactgcctggggaacagccgggacagccggtgctgccgctacgccggcgtcggcggccacgttgggcactgccggcaggttgctgcctgcggcctgggtcgtcggcttgatgatcagatcatcgccgccgcccaacatgatgtgcagggccgagccggggaagttggtggccgagcgaatggtctcttgcaggaagttcttggacttgccgttgtccgaggtgccttcgatgaacagggcgtcccaggtctccttggtcggcgcgtcgaagaagaaatactgcaacaggtccatcggcagttccggcacgttatacgggctgccatcgaccgggttatagggcttcatgatgccgccccaatcgatgtcgttgcgttccttaccggcgttgttgcccttggtgatcttggtgcgcttgatcgggatgatgaacgcctggccgagcatctgagcgaagtgggtatgctgcccgctccagttcatcttgtcgaaggccagcttggtcttggacttttcgttgttgccgagggtcatctcgaaggtacggaacaggccgggcttgatcgagccgtcggcctcgtaggtgtggaacaggtcgtccgggcggctctgcgggttaccggcctgcgggttcacgtcgccccacaatgcgaagcccaggcggatttgaggcgccggattcttgagcttgccctggaattccttggcgtggtcacccagctcgatgtagatgcagaagcggcccatggcggtgcccgccgggaagatgcgaccgccgccaccgccggtggaggtttcggacatgtcgatggttgcggtctcggcagccttgttggccagggcgagggcggcttgcagagcgttgagttgttgagtcatgcgtggtctctctcgtgtcgaatgaagatttaaggccggagtaggctagggtcggcctagtcccggatcacgtccatgttgaacatgttgggtcccatctcggccaccgccgggaagggaacgtccgcgatgtcgtagcccaatcgctcgctcatgtagcgggcagcgtcggccatgatgtcgcgcacgccacggttgacctcggcggcggtgtccttgtggcagtcggtgtacacggcatcgtgtacgttgttgatgagaaattcggtgaccatgaagccttcgcggtgcagcatccagcggaagattcgcccgacactcacggtcatcatgaacccagcttcgccctggttccagtagttggcgatctgcgtgtccttgaagtccatgaccgtcttacgctgctccttgtcccagcgctcctgctggcggaagctgtagcaggtgccacccggcgcttgccagaagcctcggcggtactggcgccagttaccgtccggccccatctcgctgaaagcgcctgccggcatctggtcctcggccttgtacattacgaggctggtggcctcggcgctgtcgcggacgatttgccggaatgcgatggactcggggaacagtgccgcctcgttgtccaggaattcctgggcctcttccacggtgcagccggtgttgaaggcaatgcctgctgcgctggcaccgtactgcgccgagaacgccttcggcttgatcttcttgcgggcctgcatcacgcggccatgccactcgtggttggggtccttcttgatcgccacgagctggtcgtagtcgaagccgttccagttgttgtgcttcccggccaagcggtacaagtgcatatccgtaccggccatcagcttctccagcaggttcctgtccttcgacagggctgccagcatcaccacctccagggcagtgtagtcggtctccccgagcataccgtccgcgccgaagcgggacacgaacatctccttcacgcggctgcccgcttccggatcgtcctcgtccttcgacgggagctgctggaggttcgggcggctggaggacaggcgggtcgtggccgtcgcggtcgtattcagcgagtggtggatgataccatcgtcgtccacgtactgaagcatccctttcgtgtccttaatcgtcccatccttgttgtaggtatgggtgatgtagaacgaggagttgtccttgtgcagctcggccaggcgcatcaacagcttggccgcctcgaagccctgtttctccagagccttgagggcgtcgccgctggtgctgaacacgggcgacccatccgccagggtgagggcgcactggaactccgggcgtttgcccaggaatttctcacgcactacttccggaaggttggtcaggttgatcaggccggggaaccggaatcgctggtcatcatcccacttggtcgccgggatgtccgtatcctcccggaacaccttgacgctgcccttgttcttgccagcggagaacgtgatgaccgggccgtgcttggtcgccagctcggtgatggtgggccagtgccactcaccctggtcggtcacttcgtggatcgggacccgcaccgaggtactctcgatcggtgtccctcgcttggccgtaccgaagcgcacgaagtcggctttctccatccggccatcttcgtagggcacccgtcccttgtaccgcacttcgccgccgtagagccacgcgctcatgtgatacaggctggtatacttgaactcgaagtattccgggaagtcgggcatcagcttcttcagctcagcctcgatcccggccacctcttccagttgcttggcgtggttcaccttggcgacttcgaggtccaccttcaggccggcacactccatcgccgagaaaccgatcagggcctcgcagcgctccaggtagccagcccacatgccacgggcctgaagcttcatcaactggccatagaacacgagggcggtattctcgatgtcaccgcacgggccggacaggtactcgctcagcaggtcctggtccatctccgaggtgagcacaccctggtcccacagcatcttgatgccgtccaccttgtgggtgccgccgtacttcggagccagctcgtcgagtgccgggtacagccacgtctgatgactcaacagatactcggcctgctgggtacaccagacccggccaccgcgtcgcaggaaggccaggtactcgtcccggtagcgggtgaagaaccagttcgattcgaacatggcgttgtgagctacgatcacgtccacgccgtcgaggttgaaccagcggttgttcgggtcttcggcttcggcccggctgcggaagcgatgctctaccttctggcctaccttgccgtcaacatcgtcacgccagccggccatgacgatgtagttgcgggggtcaaagggcgacgccttgcgccccttgtgctcgtagctctcggtttcgaggtcgaggattcggatagtcgtcatttgctgtaccagttgctttgactgtactgctgcgccttgaccagcagaccttccagcacacggcggggaatctcctgcatcaggtagcggaccattccttcacgtccccatatggtcagttggtacagggagaccgcgtggcagaatcccatacggcccagcttcgcatggtcgtagtcaattcgaatcgacagctcttccgcttgagggtccatatgggccttggtgcggaggccggggaacagcaggtccaggggttcgtggatatccgccagcaagcagcggatcatgcgttcttcttcggtgggcattctcatactttgactcctacctgtcgcagattgcgacgcagacgtcgcatgacccggtgcaacttacggcgaccggcgccgagggattggatgtcccgcgcatgatgccgaacttcggacccaacgtggtcccaagtccctgccatgacgcagatgcggaatgttccgtcctggctgatgaacacggaacccatgacgtacttcggatacagcagcgaatcccggttggtggcgtggtataccatatcttccgggtagttgcggttatgggactttcgaatcttcataccttcactccagggttactggccaggtcgcggaagcgactgaagcttggatggcggagggtgttggctgagcgttccatcgcggagacctcggcgatgcgtccatagtttggcatggtctcgtcgatgcagccgttgaggtgggcgcaggtcaggagctgtatgtgctcctcactcaggccggtggcgccaacggtgccggaaccatcttccagctccacacggtagcccacgacgcggcccacgttcttgccagtcttgcccatcacgtacccgacgatacgcccgtccacggtgatctccggcttgcgcttgtagcagccagcaaccttgccgttgcggtaggtcaggctcgggtctttctccatcgacccctcgaagcccatggcgcggtggtagccgtaccagcgtagtaccgcctccatagaacggcaggattgtgcggctacctggaagaagtacggggtgtcgccccgccggcaatcttccatgaggctgcggaccatggcgcggcgctcatcgtatatgaggtgggacttgcgcgatttgcggagcacgccgatatgggtggcgtcgaataccgcgaagtgcaggcacttcagctcggcctcggtcagcggggtcttgcgggccatgcgcccggtcgcctcactgaagggcatgccttccaggtacatctcacagtccaacaccagaccggagtccaggccgggctgggacagtttcgcgatgatgcgatcctccaggccgtccagggcagggaagcggcggccgctgcgggataccacgccgtgcgcacccacgatggcacggcacccgtcgatcttaggctcgacgatcacgtacccgtgcttcttgatgatggcctcgacggccttgtcgttctgatctacgccgcgccagatgcctttctcgatatccaataccacgtcgcgcttgctcatcacacgttctcccatccgtagtacgcggccttggcccgcatcttttcgcatcgctccggcagtcgcgagccggaaccaacttccttgttcacgccccaggtaacgtccttgtgcaggtacacacccagtcgcgggccgccctcggggtccggccagttgtacgcgatgcccacttggttgatggtgaagtcgaacgactccatcacccgaccgaggctgtcggcatcgtagtagttgaagtccacgtccatgccttccaggccacggcagcccaccagggatatcacgcccttgaagataccgccctcacctgcgtcggcgtactcggtactccagccaccgtcccggacgaagcgcgggtccagggtaggaagcacgctgttgatgagcacttcagcctgatactgcgtcatgccgtacagggcgatgtccacgtcctttggagtggcgccatgcatgaggtcgcgagggaacccaccggccagggcgacgccctcgttgggccgtgcatcagagtacaggcgcagcaacagggccttgaccccggtcggcagtgcaatggaacccagtggaatttctttggtgccttcgagcacccggctatgcttagcttgcatggtctacactctcaaagaagcgacaccgtgcggcgtcgaagttaatcatggcctccacgttcgaaggcttcccgtccatctggaatttgttcttcggcagggacaggccgcgcatgacctgttgatccgcaccgttgagacggcccaggtggatttgcacgtccacagcaccctgtaccgccgtcttcgaatccttgaggcaggactgcggtgggaacaactggtcgtgaccgtcgttgctaatctgccacgtcatgaagctgatgaagtcgtggcgcaccgccatctcgcggacctcggccaccttgtactccatctcgtcggtgcggttctggtccttgcgctgaccacccttgacgtgggccatcatgtcccaaaacaccaccgccggtttcatcgcgtcaatgacctgctcggcctgggccagggacccgccgtggaagtccttgatacggatcagctcggagtcgccaccgattttctcggcgtacatcctgcgaacctcctccgggtccagggcaagaatctcgcccacggtcatgcccagggctgccgagtacaggcgcggcttgatccgccggcccttgccctcgttgttcagccacaggatgggccgcccagggtcgaagtaccgcttgagctgcggcgcgatatggacagcgatccaggccatgaacgaggtcttgcccgcatctggcggcgcagccaccagcaccgaggccccggcgtgtagacccttcatgtacgcgggcagcaccagccccggcagcttgatgccgtggtcaccctgctcttccgccaggatatcaaacacgtcgtccgtcacgtagtcggtcggcgtgctgaccccttcgcggcgcagggcctcgtcgctcaggcgtcgcagctcatacgccaggtcgatgtcttcgccctggttgtactgcgccaggagggcatccaccctgcctgaaaaatccagttcgttgagctgggacacgacgccctgtagcgagtccgggtctaccggcttgtccagttggttgactaggttcaggactaccgccagttgttccggttggtagccacctcgcagcttgatcagctcgcgcagcgcctgcgggtctaccttctgatgcgctgggtagaccttccagtattgctcgatccagtcgatgacaaagcacgtctccggccccatcatcccttcgggcaccacactccgcaacgtgcggaagcggtcccggtcactcagtgcgtgaagcgtcaatacgtccaattactaggctccttatctgctcgcgggtcaggtccttggggtcgaacccgtccggcgttggtattacttggccttcgataagcagggaccggagccggcgcatcacgcctgcactaccacggacacctgccgggtcgccatccaagaagatgaaggcgcgcttgcaggtctgctgcaacatgatcgccgccagcctgtcgcgcagccttgtaccgttcagaccgacagcaaagacttcgggacaggcccaccgcaccttcagcgccgacaagtagtcttccgtcagcacccatggcctgcccattgataattcctggggccatccatggtaatccggggcaggatacccgtagcccacccacttgggattttggtcggcagtagcgcgcccaatccagcccgcgtcggtagggaagataagccgatgctgcctttcgctgtacagcagcggcagccctggcgtcatcacgttgtagtcgatgcccttggacagcagcaaaccatagagcgattgatagcagtcggcttgcgtccagtccgaggcatcctcgggccagggcatgaagcgttcttgatccgcgcattgtaccctccgcacatgcgttttctcgaccacgccaccctcctgacaggagtagcagtacgccacccagcggtcaggcaggttcttgcaggtcatgttggtcccgccccggctcatgctcttgcatcctaggacgtgtcggaaccggcctacctgcccaaccgccagggattgcgcttgctttagccaggagtcacggcgcagtgccattggtaccattcctcccacaaaggccgcagcccacctcgtgcctcgaacatgtcctggaggtgccaggtcatgcgggcgccgtaggcgggccgccgttgttctgtgtgagcagcacgcccagggccaccagactgaaggcgactccgatgaccagcggtttgttctcgataagccatgtcatcacctcatacgtcatgaccgggcgccctcatgtgcagcacgtccggctcaccttcagtccagtttgcctcgcggcgctcggtgcgccagcccaagccggcgtagaacggttccaggaactcgaagcagctcaggcgctcggcacccgccagctcggcagcgcgcaccagctcagcaccgataccttgccccttgtgccggtcatccacgcacagggcgcgcagttcgttgtccactacgaggcaagagccgatcatctcgccggcgaggctgaaggcacccagggccagtacgccgcccttgttgcgccagatgtccctatctcgacagccattccggcggaggcggtggacatactcggcgatactcgcactcagttcccccgccgtgtccaggctgtcgcggagtgggtgatacttccgctgccacaggaaccactgccaccagttcggctcgtccttcgacgcctggatgctgaatacgtggatcgtcttgatctgtatcaggccgggattcaggttcagcgggtacagactcgtcttgctcatcttcaagctccctcaatttgcgctggccgaagtcgatcaggtcctgcgccatgtaatgcacaaggctgccggcacacgccgccaccttgtcccaggttacccgcttaccgtcgatgcacgggaagacagcctcgtcctccagctcgacgccgaagcggtatccgttgtaatgcgtgaagtggtattgcatgctcgtgatcctccagactcacacgagagggcgctctaggaacgccctcagatttgaccccggagtaggccctagcctgcgaagattacgccgaggagcccacctaccgccagtccgatcatgcctgctgcgaacgcggcgtggtttactgcggcgcgtgccttacgcttagcctcggcaacttggtcggcagcttccgcctttaccttgctcgaatgactggcgcagatgaagcgcctgccacggatagcatcctgcaatgcctccagtcgggtagccgggtcgtggtcgtcgaagccgatgccccagggtagtccaaccatctggcccacatctcgcagcttactcgcggccatggtcgcctggtgcagtcttttggatactgcttccaggtccgtgcgcgcacgccgcaactgctcaccacgccacttcgcgttgtctgctatctcagccagccgggttactcggctggcgagggagccggctggaatgccgcgacctcgcacggccttacgaaccgctacctgtgaattgaccatggctcgcagcgcgttatcgaagtcgctcgccatcagaggccgaccgaattcccgccggcattcacgcacgcctgggaatgccttgagcagcaaggcctcgtactcgtcggcgcg

SEQ ID NO: 30 - DNA, 175361 bp, unidentified
  source 1..175361: mol_type = genomic DNA
accggcactattgcaaagtttggtactcaacaccggtttgatttacaagaaggatttccggcagtaactaccaagcgtcttgcgtggaaagcgtgtattgcagaactgatttggttcatgcgtgggtctactaatgtgcatgaattacgtcttattcagcatggctcattactagaaggtaaaactgtctgggacgacaactatgaaaaccaggcaaaagacatggggtattccggaggtgaactgggacctgtgtatggtaagcaatggcgagatttcatgggtgttgaccaactgaaattgatcattgatcgtatcaagcaacttccatatgaccgtcgtcagattgtgactgcatggaacccggttgatttggataagatggcattgccaccatgtcatttgctgtatcaatttaacgttcgtcaggggcatcttgacctccaatggtatcagcgttctgtagatgtattccttggcctccccttcaacattgcgtcatatgcagcactagttcatatcattgctaaaatgacaaatcttaaacctgggcatttggtattcactggtggtaatactcatatttacctgaaccatattgagcaatgtaaagaaattcttcgtcgagaaccgaaagaactttgtgagcttgaaattgcattcccagatacgtatgaaacttggcagactagttctcaggttcgttggttagaacaatttgcacgtcctcatcattttgaactagttgggtataaatctcacccaacaattacaggaaagatggcgatatgaatattcgatttgttcgtaaaggacaccagtctaaaacagtattaggcgagatgtgtgatgcattctctagtgatttgcctgaagttaatgacaagatagtttttgatgggaccgaacaaagggttctgtctattgttaaatcatatgaatggtctataggcaaaacacaattaatctgttggtttgaagttgatataacatgaagatatgtcgggtggttaataaataccattccgacttcgatgtaaatatccaacgtggtacgatgtggggtaattacatcggtaaagattgcgataatcgtcctgatgctattgcagcgtttaaggacgattttattgctaagattcggaacggagaaataaagcgagagcacttagaaactttaagaggaatgagattaggatgcacctgcaaaccgcttccttgccatggtgatataatagctcttgtagtgaataaactttttaaagatacatttgaattagaggacttatgcaagtaactaagagctcaggtgttagtcaagaatttgacatgcagaaaatcattaaagtcctcgaatgggcgtgcgaaggaactaaagtagacccatacgagttgtatgaaattattaaatctcatctgcgtgatggtatgagcactgcggggtgatagtcttaattcaattaacgaagctgctgcatcaattacgaaatacatcagtaagcgtgcaggtattggtattaatgctggcatgattcgcgcagagggttcaaaaattggattcggtgaagtcaaacatactggagttattcctttctggaaacacttccaaacagcagttaaatcctgctcccaaggtggagttcgtggcggtgcggcgacactgtactatccaatctggcacttggaagttgaaaacctcctcgtacttaagaacaacaaaggtgtagatgaaaaccgtattcgtcatctggattatggtgttcagattaataacctgatgattgaacgtttgattaagaatgattacatcactctgtttagtcccgatgtgtgtcttggtactttgtacacagaatacttccgtgatgctcaagcgttccgtacattatacgaagaactggaaaagaacccagatataagaaagaaacgtattaaagctcgtgaactgtttgagttgttccttactgaacgtgctggtactgctcgaatttacccgtacatggtagataacgttggtgaatatggtccttttattcgtgatgtggctacggttaagcaatcaaacctctgcctcgaaattgcgttaccaacttcggatgttggccaagaagatggcgaaatcgcgctatgcacactcgcagcattcgtactcgacaacttcaactggcaagaccaagaagaagttaacgaaatcgcagaagtaatggtaagggctttggataaccttttggattaccaagactatcctgtagacaaagcgttaaaagctaaagaccgtcgagcactaggtgttggcattactaactatgcagcttggttagcaagcaactttgcttcatacgcagatgctaatgatattactcacgaaatgatggaacgtattcaatatgcactcatcaaagcctctgttaaacttgctagcgaaaaaggtccatgcacgctttacaaagaaacacgatacggacgtggtgaactgcctattgactggtacaacgaaagaattgaccaactcgcagctccaaactatgtctgtgactgggaactcctgcgagaagacctcaagcgatacggtatccgaaattcaacgttatctgcgcttatgccatgcgaatcgtctagccaggtatcaaactctaccaacggtattgaaccaccacgtggaccagtgtcagttaaagaatcaaaagaaggaagcttcaaccaagtcgttccaaatgttgaacacaatgcttccctttatgattatgcctggcagctcgcgaaacagggtaataagccttatctgaaccaggttctgattatgcagaaatttgtagaccaaagcatctctgctaatacttattacgacccggcgaatttccctaaaggcaaagttgaaatgtcggtaatgatggacgacttgctttatttctggtactttggtggtaagactctttactatcataacacccgtgatggttccggtaacgatgatatgattcaagattctgctgactgcgcggcctgtaagctttaataaaagggaattataattagaccacggatggttaacaccacagaataggaaatagaatgagtacagtttttaataccaagcaagtagatatcatgaccgaaccaatgttctttggttctggtctaggaattgcacgctatgatattcagcgtcataaagtattcgaggaactcattgagaagcaattgagcttcttttggcgtcctgaagaagttaacgttatgatggaccgtggtcagtttgaaaaactcccagaacatcagcgtaatatcttcactgataacttgaagtaccaatctcttcttgattcaattcaaggacgggctccagcagcagttttatctgcgcttatttctgacccaagcctagatacttggaaccagacttggacgttcagtgaaactattcacagccgttcatacacgcatatcatgcgtaacctatatgtagacccagctaaaatctttgatgaaatcgttcttgacgaagcaatcatgaaacgcgctgagtcaattggtgtttactatgatgatgttatagcgaagactcgcgcatgggaaaatgccaaaaatcgctgctttaatcaagataatatcgaaattaaagaagctaaacgtgatttaatgaaatctctttatctttgcttacatgttattaacgcattagaagctattcgtttctatgttagttttgcgtgtaccttcaacttccataaaaatatggaaatcatggaaggtaatgctaaaatcatgaagttcattgctcgtgatgaacaacttcatttgaagggcacgcagtacattctgcgtcaacttcaaactggcactgatggcgaagaatgggttgagattgctaaagagtgtgaacaagaagcaattaaaatcttcatggaagttaaccgccaagaaaaagattgggctatccatcttttccgcaacggtggtcttccgggtctgaacgttaaaattcttcatgacttcattgactatctgactgtatctcgcatgcgtagctgtggtctgccgtgcccaatcacggatgcaccaactcgtcatcctattccttggattcgcgaatatcttaactctgatgcagtccaatctgctccgcaggaagttgagataagttcttatctggtagctcagattgacaatgatgtcactgatgatgttctaattggatttaaaaagtacttataaggaaaggggcttcggcccctctttattatgaatgatattgctaacgagttttcttttataaaatatgttcaacttgagttagaaccagattttaccatcaaaccaattttgatagcaaacaagttgaatgtagtttatgccatcgcagttgatgatgagcttgtttacattggtaagacaaaaaatcttcgtaaacgtataaattattatagaactgctattaatcggaaagaccaaacctctgattcggctaaatctgccaagatttttgaagcactaatggctggcaaaaaagtagagttctatgctcgtcagtgttttaatcttttgattaataatgaacttggcgagatgtcaatatccactatggacttggaagaacctcttctaattaaaaagttcaatcctccatggaacacccaacatactaacaaagctaaatgaactatgttaaagtatatgataacctaatagcaaagggtaaattacgaggcaatgataaaggaaaattaaactattatactgaagctcatcatatcattccaaaatcattaggaggaaatgacgatgtttctaatttagttttattgactggacgtgaacatttcattgcccatttgctattatcaaagatacataataattctaaaatgaattatgctctttggatgatgtgtaattcttctggaaagaattttaaagttcattccagattttatgaaagctctagaataaagcattctaattatacatctaacttattctctggaaagaaacgaacggaagaacatagaaagaatttatctaaagcactgaaaggcagagtaagtcccactcaaggaaagactcatgccaaagaaacacgcgaaaagatatcaaaatctttaaccggtaaaacacaatctgaagaaactaaactcaagcggtcagaaagccaaaaaggaaagaaaaagcctttgtacagtccatgcccgcattgtggtataataacttcaaaggccattgctatcagatggcactacgataattgcaaacataaggtaaagaaatgttagagctatataaaaatttaatgaatctgtgtgaaagctcagaagttgcaaaattcttttataaagattttaccggtcctatggatggtaagttcagagtgttttcataccactacgcaagttacagtgagtggttaaaacccgatgctcttgagtgccgcggtatcatgtttgagatggatggcgataccccaattcgaattgcttcgcgtccgatggaaaaattcttcaatttgaatgaaaacccactaacgatgggaattgatattagcgatgtagaatacattatggataaggctgatggctctctagtatcatcttatgttgatgatgggtatctataccttaaatcaaaaacctctctttacagtgaccaggcaagacaagcttcagctttgcttaacagtgaagaatattcttcgcttcatcaggttattcttgagctagcgctagatggttatacggtaaacatggaatttgtttcacctaataatcgtgttgttttagcatatcaggagccacagctgtttgtgttaaacgtccgtaataacgcaactggcgagtatattaaatatgatgatttgtacgctaatgctaagattcgtccttatttaattaatgcttacggaatttctgaccccaaaacctgggttgaaggtgttcgtgaacttgaaggcgtagaagggtacattgcagttctaaacactggacagagatttaaggttaagaccgaatggtattctgctcttcatcacactaaagactcaataacgtcaaatgaaagactgtttgcgtctgtcgtatctgcaaattccgacgatttgcgttctctttttgctggagatgaatacgcaattaagaaaatttctgcgtttgaacaagcttatctagattacctcggaaagtcacttgagctatgtcagtcgttctacgatgaatacagaggtcgtgctcgtaaagattatgctattgctgctcagaaagcaacggttaatcagcgccatctttttggtgttatcatgaacatgtacgaaggaactgtagatgtggataaactgcttaaagacctcgaaagggtgttcttgaagtactgggcaggatatgttccaaaagagtacgaaaaagaaattgaaatttctgaagaatagttgtttacatcctcatcagagtgtgatactatagacttacacaaactgatgaggatattgaaatggatatgcaagcaattactttagatatggttgttaacaaatatggtactcattccgatggaatttttgtgtggaatggcaccaagaaggtggggttcgtcactgacctacggacgcacatggcgcgcaaggaagctgctcgtaagaagcaaaaagagtacactaatcgtgtgaacgagcagcgtgccgaagcccttcctgaagccgtagatgaaatgattgatttcctagataatcatctcgcgaagtatggtgcagaggtgttcaagaacatcacccagccaaacgttcatgctaacggatgcaaatgctatgtaatcgttgacccgatttatggcaagcatcgtcttggcattatgcatcgcgagctgaattattctgagatggcagaatatgtagaagcttgcttcaagtgttctccttcggaaagttctgatcgtcacatcctcatttcgggattatcccgtgatgatatcgtagaggttatccttaaactatgctcaaaataaacacaacttggctgttgattggtgtgttagcgttatccgccggtggattgaaatatctttcgtggcgggtagaaaatcttaaagctgacctcaaagtcgtccaagacgaatctgatcgacaagcaaaagaaatagaaaatatcggtgtttctataaaaaatctgcagacaacatataaaggctatcaggaaaaccgagcagctcgtgatacttctaacgctaagatgaataaagattctaagcgtggaaacgtagttgcagctaagcctggattagttgaaaaacagattaatgcaagcttcaataagtttgcagaagatatccaggaggctaccagatgaaacgaagtctattagccatgggtattatcagcttacttgttggatgctcttctagtgcaccagatgtcccggttttacatcctgagtggccagacccaattcaaaaatgggaaggacattgggaagtaaaagtaattgacggtaaagcctgggttggcatgccgtttgaagagtcgcaagagtatcgcatctggatgaatgatattttacgttatactaaagatgctaacggaatgatatgttattatcgttctgaacttaaagaacctcgttgcgttaagtaaactaaataagaggaaaatattatggaaccgtcacaccttcattcttacttcgtaaaagacgcatcacatcttttatcgattaaaaagacacaccttaggaatatgctagctgttgggtcgtgtcagttaactcctcttgttaagaaagctattgctgtaccagaaaatatttctaatggatatgtttatacagtccgtgttagtgtgcctggagctttaaaagaaagagtgtttgagcttaatgaccaaacacgaatttcatttgatgtgtggtttaaactattcatggcagaatttatgtatcccgattttttggagtttgttcagcgtaaagaggcactgaaggaagcaatttctgaattggaagatgcctcaattgaattcggtaaggcactccaatttgtagaaagtggcggtgtagagcaagatgaagttaacaattttttgaagaaacatggaaagcgtcgctcattggcgcatcgcaatctttctaaaatggtgatgtagtgaaccaagaacagtatgaaacacttaaagggttaattgctgaaaatgaattagcgtgcatcgtgtttggacgcgcagctgaaaattatgacaaaaatgatatactgtcaatgaataagccattgcgagcaattaaagaaaaatatcgtgcaaattggggtgaaaagtctaaggctcttcatgattttattgatactcttaaggatgtataatgaaaaaattggttttgacacaaggggctccaggctctggtaaaacaacctgggctaacgaatacgtagcagctaatccaggttggtatgttttgtctcgcgatgatttgcgtgaaggcatctttggccttaataaacgtaatgattacaaatattctaagcttcgcgagaagtcagtatctgtatgccagttttctatggcgaagactctgcttgagatggaaaccactaaaggtgtcatcattgctgatactaaccttaatccaacgactatcaagaagtggcaagagctggcatatgaaattgatggtgtcaagtgggaaattaaacgctttgacgttccttggactgaattgcttaatcgtaacctctatcgtggcgcgaatgctgttcctattgaagtgcttcgtagcttctattctaagatgcacccatatgatttgtatattccagacgaatcattgccaaaagcagttatctttgaccttgacggcacgttagcagataacaatcatcgttctccttatgacttggccaaatgtggtaaagaccatccaaaggaaatggtaattgaatttcttaaaatgcttcgtaacaaaggatataaaattcttactgtttccggcagagagtctggtactaaagaagaccctactgtttatcaacgcattacgaagaaatggttgttggaccatgttggcgaaacaggcgaacacttccaacgtaagcaaggcgattcacgcaaagacgatgtggtaaaagaagaaatcttctgggaccgaattgctgatcgttataatgtaaaacttgcagtagatgacagggcgcaggtggttgaaatgtggcgtcgtatcggtgttgaatgctggcaagtagcccacggtgatttttagaggaaagtataatgtttccaaagtattccgaagtagtaaaagtatcatttacgcaagttgttgctaatcatttaacagatgagtttactccggctgaagtagccaaaatgcatgcagagtttttatctgcaatgaatgcacttattccaaacggcgaagttattaaattttctattgaccggtcaggcggttcatctgaagttaaaatttcttgtggcgaaggtgaacacgattggtttatcgttggaattattgctaattttgaaacccaacaggttatgacttatgttgtctgacgctaaattttcacatgatgaatttatttcgaaggttaaaatcttcgcacaggaagtagcaaaccgggttcctggaagtaaagtgactctccgacgagagtcatcctttaactatgttgatgcttatatcattacagttaataatggaaagagcaatcaacacactcaattggctttaaccggaacaggccaagttgaaatgactaacattttaggacatatctaatgactttacgtgaggctgtagaagctcttttaattgaacatgctcgtggaattagggcagaaattagccaaaatggtattcgtctaattaatgctgttattggttctgaccaaggcgtttggtcaattccgcgcgaagaatatgatgctattttgtacagtaacgttgatgttaaggaaggccaacctctttatggttatgtcttttccgatgttcttgaacgaggaaatcatccgtttccagatggtacaggcattcgtacttctcgagtagagagttttgcttctcctaccgacgagttaaaattggttaaaacaaataacacaacttatctggtgatttaaatgaaagcgtcgacggtactacaaattgcgtatctcgtatctcaagagtcaaaatgctgctcgtggaaagtcggcgcagtaattgaaaagaacggacgaattatttctactggctataacggttcaccttctggcggcgtgaactgttgtgaccatgcagcagaacaaggttggattggtgaaattccttacaaatctacgggattgcgtcaagacggatttcaagtcaaaaaagtcggattgctcaaagaacatcgagcagcccactctgcatggtctaaagtcaatgaaatccatgctgagcttaatgctattctttttgctgcccggaacggcagtagtattgatggagcaacaatgtatgtcacactgtctccatgtccagattgtgcaaaagccatcgctcagtctggtattaaaaaattagtatactgcgaaacatacgacaagaacgaacccggctgggacgatattcttcgttctgctggaatcgaggtgttcaatgttccaaaacgtaatttggataagttgaattggtataacattaaagaattctgtggaattgaataatgaaacttagaattgttgaaattaataaacttaacctaagcggtgatgttgttatatcatactcagtagaacgccggtattggtttaaatggaaaccattagcaacatttaaatttgaagatcaagcagttcgattattaaaagaattatccaagcgcaaatctgtaattatcaaaactattaaagagacatcaaaatgaaactgactactgaacaaaacatccatattcgtgaaactctgaaggctgtgctgagcatgggcgaatcccagattgtgtttgaaaaagctgatggcactattcgtactctgcgctgtactcgtgataaagatgttattccatctgatttggtagaaagcactactaaatctgctcgagcagaaagcactacttcacttccagtatatgataccgagaaagaaggttggcgctcatttgcctttgataaactgatctcggtaaatggtatgaaagttgagcatctgctgcagatgatcggtaagtaatttgctttaaactgaccatgttaatataactacatggtcaaacaataaaggtaacacatggaacttccaattaaagctctaggcgagtatgtaattctcgtatctgaacctgcacagcaaggtgatgaaattgtttctccttccggtattattcttggaaaagaagaacaaggacaactgccggatatgtgtgaaatctattctatcggtgatgatgtaccgaaaggatttgttgaagtcggtgatttgactccactgcctgttggtaatatcagaaatgtacctcatccgttagtagcagcaggtgtgaagaaacctaaagaaattcggcagaagtttgtgacttgtcattataagtcccttgcatgcgtatataaataataatatgaattgggcgtcggacaattagttacccgagcaattctacgcggtggatgcccgagctaaacctcggttaccgtccaccaaattttaacctcatttgaggaacgattcaatgaacaaacaacttactaaagctctggaactccaacgtaatgcatggaattccggtcacgaaaactacggtgcttcaatcgatatctatgcagaagcactggaagttctgaaaggttttaaacatctgaacccagctcaagctgaatttcgtgatactttagaagcgatggatgaactgaagtatgctaagcatcttggttctgctgctcgcaaagctgttcgccactttgtggtaacgctgaagtaatttgtacgcccaccatgtgtacgcatgggtaacgtatgatgtggacgttgttggttatccccacgtaaaacatccgaaaccatcggtgatttgctaccaaagtgcagctagaaaataaacggcaagtgcatgctaccccgaggcgatggccaatcgggagtacgcctcaaggcctatacatccatcggtgtatatcttatccccgagaaatcggacccggaacctttaagctaacggtgtgcaacagataagagtttaaacgtaccctttgagggcttgcgggagctacaaccgaaagaactgtcgaaagaagttgaacctcggaagaacgtgctcccatgtatttctccaaaatggaagatgataaaatggctaaacaagctaaagcaaaaactgcagtaaaagaagttgttggtacctctaaacgcgctggctacaagcgtgggtcgaacaagcgtatcaatcagacggttgagaaaatcatgcgtcgggctcgtgcggttcttcgcgatgatgcttctcgttttggtaagccgaaagcataagttcagggactccttcgggagtcccttttttattttccgcagaatgaaaaaagttgtttacttctaggctcaacaaggttactatagacctgtaccacccaaacagatacaacggagaataaaatgaataccatcaacctgaatgcaactatcaagactaaagaccatgacggttataaagctcagactgtccacgagaaaatgtggattttgtctaaagttcaaggtgatatcgttccatgcatgacaccggacggtccatcagatgatttctgctggcatatcacgctaaccaattggttcacaggttctgtatatgttctgaacactccagttgttggtcgtattcgttctgaaacttacacagatgaagaagacggttactcagaagatgtaacctggtatgaaaatggtcgtaatcgtgccgatgctttaattgagcaaatgaaaaaggtcggtaaattaaacatggataattggactaaacagtaatcttgactggggcttcggccccatctttgaggatatcaaaatgaattacagcaaaaaccgagtatattgcatttccccagaaacttaccgtagatggaaagacgctaagaacacaattaactatctcattgccaccgttgtcggagttcaaggctggacgccgttagaacttgattcgctgggacgggtcgttaagattaaaaccgaaaccggtaaaatcatttcggcaaaaaccataggagatgaatatgaccggtctctgtcatgtttattttcttctcacgagttagaagaaggacgtgttgtgcaaataggagcgtttgaaaatcaaagctctgatgaccgctatgcagtttttgaaatcccatcaacgttcgttaaacctactccagtggttaaagatgggcgtagcgtcttcactttaaaagaagcaaaagaaatcatccttgaactaaccgatatcgtccccgaaactaccaagtatgaactgtttaaaagcaccggatttgcagaagtaaaaactgttaaaactgtagaggttaaaaatgtctgaagtttttgaataaaagttgtttacttcttgggtggtctgggttactatagacctgtaccacccaaacagataaacaaactacggagaataaaaatgaacttcactaacttcaaccgcaaatacgtacagaacaatgcttgggacgtttctactactttgctgtgggaacacaacaatggcacagtagctcaaatcgatatgtactgggaagataactacgtattcttcagctttgaaaatggtcctactctggatattcagttcaacggttctgaaatcaaagttggattccatgatgaagttcgtaaacgtgatttatcttcacatccgtcttggaacacaaatcgtcagctgcttgttaaaatttatctgcgccacatcctcggtcgtaaaacaaccgaagaacaacgtgaagcaatctgggatatcgtttcaaacgaaatcaagttttaactaactcggggcttcggccccactattgaggaaatgataatggaaaaaggtaaattctataagcttaaaaagactccaatcttgtctccaggcgctcttatcaagggtgtttttgagcaaatcggtaataatccgattaaaattaccagaacctttaaatatgcggaaaataccggattagttgaatttgaaatcattaagccagatggagaatgcaaacgcgttagtgtagatgaagttcgcttttcccatatgtggtgtattcttactaatcaagagtttcagcattattttgaagaaaccatctacaaagaacctgaaccgaagaccgacgatgatggaagcaatgattggggtgtttggacatcaaataaaggaaatgatacctacaatggcggattaacaaaggaagaagctgttaatcttgcaaaagtacaacgcctgaatgcaactaaagacacaaaagttgtaatcatgcaaccttttgctgtccctgtggttcacgttaatattcgcccgttttaagaggaaattgaaatgattgtatcagctttctatgattcacgaaagaaaaaagttgaaaccattatcagcgatactcgcgatggtacacctgctaataaaaatggcgtgaaagcatacattgataagtattgccctcctgaatttcgtatggttgatggtgtagattctctgagcattaatgttataaatgctaaaattgaattcattaatgcaactatgccaattgggtattctgacagtgatggctcaaatgccaaaatgccgaaagaaaaattcataactaaattttgaggaaatcaacatgattgtatccgtgcctaaacctaaagctggtattttttcttgcagtttgaaaaaccacccaatggttgatatcatgtcagctgatgttaaacaacacaccgttgagtatgaaattgatgctccggatttctttgaattgcccgaatgggcagtgagacttgatgcatgaaatatcatatcttcagtacagtaagattagcaaatggaattcctggagttgtatgtgatacggctccagcaattaaagcctacttggttgaaccttggtatgaagttaattgggttgatggcaatcgttcaatccatgcagaatccgagctttatccaattactcaattaagggctgctaacgacgatgtctattaatcctcacttcggtcatatggttgcccgacgtatcaccagggaaatgctaaagactgttgagtattataatatagaattaattgatatagaaccctcggacactccagggttaatctggttcaatttcaccggtgccgcaaatagcgtcgccaaatttaaacaagcattgaggaatttccccgaatgtcaaaacctgtaattgcgaccgatgttgatggaatcatcgttaaatggcaaagtggtctgccttactttgcccagaaatataaccttcctgtagagcatatccttgatatgatgactactgaaaaattcattaaacccgctgagctgtttgattgtgaagaagaactagctgttaagctgcttctgaagtacaacaacagtgattttattcgttatcttgctccgtatgctgatgctttagctacagttaataagctcaaagaaaaatacgattttgtcgctatcacggctcttggcaactcagtagatgctaaccttaatcgtcgtttcaatctgaatgctttgttccctgatgcatttacagaaatcatggtctgcgattatgatgaatctaaagatgctttactggaaaaggctaaagtaaaatacggcgatcgcatcgtttgctatgtagatgatttgcctaaacacattgctgcagctagcaaagtctttgaagacactgaaacccgtgtgttttatatgcctcgtggtgagcgagaaggttcagtgactgctcctggaattatggttgaagattggcatcaaattgtaacttgcctggaatctctgaaattcgttaagaaaccgcagaagtctctttctggattgtgggaagaagctatcaaagaccaaattcgtaaagagcaacatccttttaattggcctccacgacaagttccaggagattggtggaaacaacctatcattccgtttagtcctggtccgcatgttcctcctggaaacgactggtggaataatggtcgtattacatgtgataatcaccaaattaattgctaacactctgggtatggtataattgccataccctaggaggaaatatgtttgtagttcatactaaggttggtaaacgctggttatcatgtgattatggccatgttaatcagttttatcgttggaatccaatttggcgtgaagcaaagtcgtgcccgatttggaatgaatgcatcaataacgggtttgtttatatcgatggattaacttatcatcgtagcgtaagcgaactttcaaaagaattaggtgaataatgatttttgatatcatcaaagcaattgaagatgctaagggttctaaagccaaaacccaaattctcattgacaataaagataacgttgatttaaagcgagcttatctgctggcgtattccgggcgatttaaattttttattaagaaagttccagaatatactcccgttaaatatccaaatgttccttcaaagacgttttcagatggtctagattacctccaagacattctggcagcacgagtacttactggtaatatggcaatccaggggctagtagatttgctctctaagatgaatgagggtgatgctagtgtactggtacgggttcttcttaaagatatgcgttgcggcgcttcaggttctattgctaataaggtatggaagaaattaattcctgagatgccacagatgttagcatcagcctactctgagaaagcgctgtcatatattaagttccctgcattcgcacaacttaaagctgatggagcccgatgcttcgctgaaatccgcggagatgatttagatgatgtgactcttcttactcgttccggtaatgaatacctgggtctagataaacttaagcgtcaacttatcgagatgaccaaagaagcccgagaacgccatcctaacggtgtgatgattgacggcgagttggtatatcatgtcgaagtgaaagaagaagaaaacgacctgtttgatatgtttaaagagcctgagcttcctgagttaagtaaagctaaggaattccaacagacggctcgcacggaatcaaacggattggctaataaggctattaaaggaacaatatctgccgaagaagcggaaggtatgagattccaagtttgggattatgttccgcttgatgtagtatattccgaaggtaaagttcctggatttgcttatgatgtacgcttccgtgcattggaaatgatgagcaaaggctatgacaaggttattctaattgaaaaccatgtcgtacataacatccatgaagctcgggctatctataagacatacgtagaccaaggtctcgaaggtattatccttaagaatatcggtgcttattgggaagataagcgttctaagaacctcgttaaatttaaagaggttatcactgtagatttgaaatgtgtcggttcgtacgagcatagaaaacaacctggtaaaatgggcggcttaatgttcgtatcagaatgtggtcgtattcgtgttaacgctgggtcaggtcttaaagataagcccgaagaattacatgaacttgatcgtactcatctatggaaaaacagagattctcttccaggaactatctgggaacttgaatgtaatggttgggtaactgctgaaggtcgtgatgatggtacagtaggattattcttacctatcattaaacagcgtagatatgataaagaagtggctaatacattcgaagccgcgtttggtgttaactttactgaggcaacaggaataaaatgaaagctttatacgaagtgattgctaaatctcttgacggacgtggtggtatttctgttcacacagaagttattgagtttaataacattaacacattaagaaacttcaaagaaaacattgaagagtatgagtctgtaaatggactacaagtttggcgtacagtaacaataattaattaaggccttcgggccttttttcgtataaatagaataaacaaacgaggatatgtcatggaacttttaaatgaagttttcgatgaagagaatagtaaaatctatcccgtcgagaacgttaagccaaaacttaaggtaccacaggtctttttgattaaggtgccgggtaataacaatttaatgattcggttagtacaagggtcaggtcaaggtgatgcagttaagaacatcaagatgggtgataaattcatccaggtctatgttttctctgtgtcggaaaaaggtaacatcggggcgcttaaaggtggtttaggccaagacccgattggtgctatcaataccatttttgagaccgtcaacaaagtagttaagcaaattaaagctgatgcggtaatgttccgctttaatccgaagaaaatgcaaggacaggataaagccattcaacgcattcttgctcggttgattactactcgcaccggcggtcgtttcaatctaatgaaagatatggcttactacaaaggtaagtatgcttattctattatggttcgtaaaggtaagaaacttgaagagattgaaggaattcctgaaatttcagaagaactttacaccaaagtagattccaaagtaggcgaagtttatgtgtctaaagaaaccggcgaaaacgttaccaaagccgaagcattggctaattccattggcgaaaaagaagacaagaaatctgaactcgctgtaatgagtaaaatgaaagtgtctcgaaaagatttaatccgagcacagtacggcaaatttgtttcatatgttgatgaagattggccagaaaataaacgcgaacgttggtacgaattaactactaacacaccggttcttagcgcagaaggcgatacggtagacctccaaaaagatatcaaagccggattagaaaaatcaattcctttttatgttgatgatatcaagcactatcgtgttcgtggcggatatggaagtaattttggcgatgcagttgagagattatttgtaggccaaatgtcgagaatgcatgatgactggaaggttttcattccttcggggtcagacaaaatgaaaatcgctgaacaacgaatttcagacgttgctgacgttattgctcaagctaaaaatcctgcatctatggaaacaatgcgtaaaatcgttgaagtagctactcgtggatttgatatgcctccagctgacgatttcggagctttacgtcaataccaaaatcttgttaattatatgatatccgcttatgtgtcaattgttggcgattctatatccaaagcaattgaatataaccgtgaaatgcaatctcgtttaagcgaagaagaaagagatgcaatacatcattactgtggttctggttattcatttgttaataactatcttattggtatggaaagcttaggcgatccgattattgacaagaaaattcgtccgctcgattctgcctttgaaaaaggtttgcgtcttgaaccaggcactcttttgtatcgtggtcagcgaggaaaatatgaagactttaaagataacattgagtctaaaatgttttatttccagaactatgtttctacttcgttaagtccaattatctttggtgcttattcaaatgctggtgattcattaatgccagatgcgcctagttctgatttagaaaacaaagaaacaactatcgatgcagtatcttctgttattggaacagacaacttggaaagagttgatagaggcgaggaagttgcctatggtgatgagtttaagtttgggttcattattcacggtgctgataaaattaaggtagttatcccaggtgtcttgtcaagctttagcgatgaggctgaagttattcttcctcgcgggttggcaatgaaagtcaacaaagtatggggaactccttttagaaatggagttggtgtagcgaataacaagacattcatggtagaaatgacggtagttccgccagagcaaatcgatgaatcggttcatctctatgatggtgacatcttgatggaacagggcaaagtggaacctcttgaagaaagcaagttcaaaggctttttaaatgagatttacttttcgccagaccgttctacagataaggttagctacacgcgtaccatggagctactggctggtgctatcaacctggatggtatcccagaaaaacttgcataaagttgtttacttatcacaaggacgtgatactatagacttacacaaaccaatgaggaaattgatatgaaacacgtatttcgctttaacggtattgaatggtctgctgatgttaaagatgcagagaagttcaatgaagaagttcttatcatgcttgaagggtttaacgaaggtactccgacggttcttattcaagatatcttccgtaagccaacagagccatcgtttgtagaagccgttcttaatggaaaggcagaaggtatcattcctgttaaagtagtttggaccacaaacgaaatgaaacttcttcgcactgagccagggtttattggctgcattgcataaaacaaaggggccttacggcccctaaattattctacttgttgtagtagtgatattagaaattccaccaccagccccgcctaaacgagacaatcttgaagcagacgcactcaagccctgatttggattaatcgtctcaattttctgaatagccttatcttccaaccaatccatagcagcttgttttccaaccgaacccgtttgcatgctacggtaagcaaacgtgacatcaaacactgctatcgtgttttctccatcatatgtaaattcgggagctccacacgctacaggcatagcccctgagaacaagcatacagtatgtggtaatccatttctagcatgaaggttaacttggatatcacattctacgtcttgtggcaatcctcgcagaccagtcactgggtcttcaacagcatttacccaatcttgcattgcccggtagttgcttgcttctgggtccatcctaaatgaaagaaccagcggttccatatctcttcctgtgatttttatattaggagcgttatggaacttatccatttcatatgataatctgttctctggtattttagcagaataaaccatcaatcctgctgttggaaatgccatattaaagaaatcgagcagataagtacctaccgtaaattctcctaataatgactgcaccacacgttgagtcattgcgccaatcataaatgtattcacacctgatttacgaacaacttgccgagttccttgtgtcactatagttgttataccctgattgaattcacctggggtcaatccaagccaatttccatctaaacccatattattatacagctctccaccaaagtcgtttagaagagcctgggttttactagagggtacagtagcgaatacaacagagaacatattagttctctggaaatcgatatcagccgcttgactcttaaattcttcgagagtaaacattattcaatacctccgatataaacgttacctctattaagagtaagtatttcacgcatagtaatttcaagcgtaaatgtgcttggaaggttaggagcaattgctaaaccattgaaatgtccgttcggcgttttatcaaagcggatactctgaatttggcatggaccaaatatatcctctctaccatccattgatgtagaatatccaaaattacgaacagtccaaatcgttgggttagaaactacaataacattgcttaaaaacgatgttatttgctcaaacaccgtgttttctactttagccccatctggagctgcggatttaagagttcctttataccattcatcaatagcagctttaacttcttttgcgtatgatgaatttccagtcacaccgtaagaatagtagttaaaaatttcatagatgcgaataatttgtataaggtcatctgcagacctaggagttaaatcccaagtaaacactttcgttctattatcaggtccggcatacatactacgggcagtgttataaatttgttcaccattatcggccattaatccctgcgttaaagactctatcgacccaaacaccgcagtagaagccacgttgcttaatacaccagtagcagtaccgccgccacgtgtaacaagagaatccccaacatcattaaatttatggctaactgaatcaacgtctgacttagaccgcggtaatagaatattagctactggtgcagtactagtggtagaacttgatgaattagccaatgctgacattggtgaatcgaatacagacgataacattacatctcgtctaaatgaacgcaaatcaggagtagttcttcctttaaaatcatatgctgtgaataataacccattgcgatataagtcatgtactctcatatcttgggcggaatcattcccagctgaacgttcagctgggaactgcgccaccttagtggttggcgcattcgtcagtttagatttaccttgggaaattcgagttcctgattttttgatgttttcaaggccatcggccagttcttcaaaaatcattatttttccttaagaggttttcatagcgccttgcattccaggagcagctgtcgaagtctgtggaggcattctataaacatgtgtgctattcttatttacagcagtattaacctggataggttgtgactgtgtattagattcacgtgtacgagcagcttcacgactatccgcggcggctttaatagaagcagactgtttaacctcaggttgttctgctgcaggtatagcttcggcagttggagcaggttctgatattttagaatcaagaagcttttgcaattggtctaattcaacctttaaatcttttgcaacttctggagataatttctccaattctttatatctggtggttgtgctttgtactgcatccttagcagagtctaatcgagtggaatcagatgcgtcagttttttctacatacgcttttgttctcttcatttctgcttcagcattattacgagctgtgatgattttgaggcgttcgtcttctggcaagtctgcatacgctgactgctttttctctccgctcagcagtttgttatattcatcgtcatcaatctgcccggtgaatttttggaacttagcagaaagctttcttttccattcaggttgttcgtcatattctctttcttgacggtcaacatattttgctctcattttagcatcttcttcatcgagttctgctccagtaacagtttgaaatctgtctaaagcagcgccttcaatgttatctgccgaatcgttaaatcctaatgcgcgtaacattccagcaagaagcttactcattccgagcataatggtttctccgagcttatcaattacatcaaccaaacccgagccaatggcttttgctaatccgccccaatctcctttgacgaatgattttactatttcattcgacatctcgcttattgcagttaatagcggaccccattctttagcctgcttgttaaattcaacaaagttcttttcgaataatttagtccaataattaaaatgaactttaattaaatctataagcattatcacacccaaaaccatggcggcagttttcgccatttgggccaaagcgctaacagtataactaaacagcatactgctaattttatctgttaatgaaatagtttttccaaaaccagatttaacgcttttaattaattctccaaattttaggtcaagaaactttttattcttgtcctcagtttcctttttaggctcagctttttcctcttgctcttctgtgctaggaaagaaatccgcgtcaggacgtctgccatcctgaggaggaataagtctttcgagtaattcctctagcggctgctgagtaggagcatccgggacttgttctgttatcgtttctaatgatgttccagtaccagtcttttggacatcttgctgaacatcatgctttttagataacaagtcggcaagtttcgtgagcttatcattaattaatgatgcagtatcattaagttttgatactgcatcagttgtgcgctcagaagcttctgcggtcaattcgacaccagctgaaacatcttctactgatttgataatttcgtttgatttagtttctattacatccgaaattaaatcagtagatgcttgttggtcgtctaaacgacgaccaatatcttctagcgtattaatttgagcatcagcttgagactcagcctttttctgtggagccgagtcagcaataactcttctacgcattgaattcatttctgatttcttagtcattcaaatatttccattacgttaagcatgcctttgattggtccttcaggtccatcaatggctatagtgtttactaagtcatcagcccactttgtcacaaaagctggaagcttcataaagtttatatccattggttttccatctactgattcaagaaattcgctcaaaattgaatctactgaacctagtttggaataacgaggaggagctctgaatttgaattctttaccatctaacctttgagttaatcgctggcaaatgtaaaccttattcaaatcgtaggtaaaatcatctttaacaacagtttcttttattctgttgttaaatgctaataaatgtaatacaacaatatcagattcggctgctgttaatcctggacaaattgaatccaaaagaagattcatgttttcatctggacccttaacatctttcatcagattatggtgctttaaccccagttttggaattgatatcgtcttttcatttattactattttcttaataggaagaatcacgtttaagttcatttttcaccttaatcaaatctacaggttcaagggcagagccatttgtgaacatatataagttagttatagatgtgttatttgatatttcatggataacttcatctatataaaagtcagttctgaactggtcctttaaatcaacaaagttgattttcattcctggagttagttcaaaattaccgtaacacttagtttgagcatacccgtcatattgagccatcgtagaaatgcgtagtgcttcttcatagccattcctaaaaatcatgtcagaatatcctcctgacctattaatgaatacgctgttttggccttctccattaataattcgggtaacatctttgtccacaaacgagtgtgcataaaatgttgcgtttttcatgggatttctattatatctgtttgatttaacaagccattcaaaatcccatgctaatggatattttaatcctgcagcaaactgacctattgtttgaggagccccgaacatgaatacatttggatcctgggatatcattgattcataatccatcatgttaattccggtgatatcttcccacgcaaaaataaattgatcgttgtctgtagaaatgcctacatttctaacatatcgtaagtaatctttgagggtactagtccagggaacccgtgggacgtaagcgttaattccgttgataggaggagcaatcaatggttggtcaacatacattgcacctatcatttcttttatagtttcatacgcagaactaaaaaacgctctgctgaacttgagattcattatgtcatgcagtgttccaagctgaagggtgataatgctatcgcctttatcatcaacaccaactgtaaagtgtttaatcccataaattcgggtttgtgttctcgatgtgttactgtttgcaacagatatttgaactagttcatcaccgttcatacgcgtgtgcatatttttcgagtcataaaactgaagtaggccttcgttagtcccgcgtaatgaatctctcattgttaatgtaataaatgtagctgctaattcaacgaatctattagctagccacgcatcatatccagaatataattttatgcttatattaggatatcctaatctttgtgttgtcatgatttaaggtccttttcaataagcgataaggttatgccacgctcaataggcagcatcttcattatagaattcaagtcatatttaccttgagaaaccaatctatggttaatttggtaaaatgtgaaaatctcgtcaggatgtagcaatagcttaaagatatcaacaatgttatcatattttaatactgtcgtggtatcacagcatgacgtctttaattcaaaattaaagggcttcatctgcgataaaatcttttccaaggtttcaacatctatagcatcgataacggtcaatttattgctatcgcttaattcattccacgcgtattccccagatgaatccttcacagatataatgttgtctaaaatcattttacctgtatcatcaattatttctataggttttttgaacttaagcgttaatcctgcaacctctactttcggatttgtcaacggaggctgattaagattaaaaagatactgcttgtattttccgcattttgggcacttcattctgactggtattttagttttaccaatacttgacaaaaatactttaagaaatatataaggacgatactcgacaggatggtcatgaaaataatcatccattaattctgctataagctgtttttggtcttcttcagacttggtgttcatgtcgtttctaaccaataaaaggtctctataatcttctacggtaaatggcttaaaacgttggacaccatctggtaattcgcatctaactatgttggccataaggtaatcctctttatactatttataaataattgaataagaggagtggatatgaacatcacatataaatttgaaacaagaataaatggcaagaatatccagtgccgagcttttacactagaagaatacgctaatttaattgcagcgaagaaaaacggtacaatcgatgaatgtgttaaagcattgctcagagaatgcaccaatgctactgggttaaacaaacaagaatcggaattacttatagttatactttgggcgcatagtataggcgaggttaatcatgaggtgacctggaattgcacctgtgggcgtaaaattcctgtgccattaaattatacacatgcgcaaatcgatcctccagaagacctctggtatgacttaaagggattcaagataaagtttaagtatcctaatctttttgacgattccgacattccaatgatgatatcaaaatgcatagattatatcgtggttggaaatgagcagatttactttaatgatttaaacgatgcagaaatcgatgatttatattctgctattacaaccgaagatgtagttaacatcaaaaatatgctattgaagccacaggttcaattggcagttcccattacttgtgaatgcggaatttctcacattcatgtaattaaggggcttaaagaattctttaagattatgtcatgagcaatattgataaactatattctgaccttgacccagagatgcggcttgcttgggataccgatgtgtcaaaaacagtaggagctcgatcagttaaaaatagccttcttggaataataaccacaagaaaggggtctcggccatttgacccagcgtttggttgtgatatcacaaacgaattatttgaaaacatgactccgttaactggtgatacgataaagcgtaatatagtctctgccgtgcgtaattatgagcctaggattaatcgtctatcggttgatgtgcttccgttatatgacgataacgctataattgtcaccgtgcagttttctatagtagacgaccctgatacgctagaacgtatacgcatacagatgcgtagtaatgctaactctagcagtagagtataatgggactagtccttcccaagaaacagtagagtggagatagaatgagattagaagaattacaggatgaattggataatgatttgattatcgaccagactaaactacagtatgaagcggctaataaccccgttctgtatggtaaatgggtgcgtaagcactcgacttgtcgaaaagagatgttaagattagatgccctcaaaaagcaaaatcttaaagcacgattggattattacactggccgtggcgaggttggtggtgaagtatgcatggatgtatatgaaaaatcagaaatgaaaactgttttaagcgctgataaagaaatcttgggtgtagatactaaattgcaatattggggaattctactggagttctgtagcgatgcgatggatgctatcaagtcacgaggttttagcattaagcacattattgaccttcgtcagtttgaagctggcgcgtaataaataaacttgtaaactaaggagacaatcatgtcgaatacggtatgtgtcgtctgtaaaggaccaatcgatgaagcattggttgtccacacagacaaaggcccggttcatcccggagcttgctataattatgcgattgaattgcctgtcactgaagacacagaagagcaattacaagaaacgcagcttttaatttagtctagtgttgatgtagccaattggctttgccccttcctttcggttggggcttttttatatcagaagtcttcgtcatcttcatcttcagaatcggcttcaagagcctgtctacgccccgccaaagcatcacgcacaatgatgtcatcagaatcagcaagagtagtttctttagagcgcttatcgtaatacttctcgagttcttccagaccatctaaggtctggcaagcattaattttactcatgaagttatcgatagtagcctcacgaattgtggcttcataaatatcttcaaatttaatcatagatttaccgttttcattacgtagttaaatttttcatcagcatatcgttgaatacgctctaatgcatgttttaagcaatagtttaaatgtgtgtatttctttttagcattggctgatttcggctttacacccaggtcatcaatgatatcccacactgtagccaaagatttatctttatgcttacgaagaacacgaccaattgtttggagaacgataatcttcgatttaactggatgagctaaaattacatgatgcaggttttttacagaaatacctgtagagaatacaccgtaacttgcgacgataataattccctttccgttttctgccatagcctttaaagcattacgtgtttcggtattaacttcgcctgacacataatagacatgctcatgaccagtagctttaatcatctcgaatagctctttaccatgagctacatgtttaaacatcacaaaggcattttcgtcacgcgatgctagcttagcagctagattagcaacccaacggtttcttttcttaacactggtgatgaatttaatttcttcttgatacgtttttccttttaaagcatttgcggctgcatctggatatcttaagaagattgtattaattttaagctcagttacttgtccgtcttccattaacttagaagttgataccggacggaagatttcaccaaacatgccaacatattgcatgatattagctttgccgtctttaagagaaccagacagtccgtacttaaacatgcaattggtgagacccgcaatgattgttgaaattgacttacccgttgcaagatggcattcatcgttcatcatcatgccgaattgagaaaaccattctttaggctgcttaacagcggtctgccaggtagatacataaactaatgcattcgaatcacgagcagtaccacctcgaatacccagcatagcattgcgaggaaataaacgataatcacaaaaatcatcaatcatctggtcaactaacgctgtagtaggaacgatgataagaattttgccttcgtaattttctacataatatcgagcaagtaatgcctggataagagacttaccggcagacgttggaagattaagaattctacgacgattaactagaccttcatatacagcatctttctgataccaatgaggttcaatcttagttaatcctgaatagatttctttagatgctaaccacgtgtcaaaatcctcccgtgaaagagtttcttgctcgaatatagctggatcgaaataagctttatatccgaattggtcagcgaattttctaatttggccaacaagaccaaacggtaagagacgattataatctagcagacgaattcgtccatcccaatgcccataacgatatttcgggttgaatctgtatccatcggcttcgaagctaaaatagtctctgagttcatagaaaattgagtcatcacactcaatatgaacatgactaaaatctttaaatttgacttggatgtcgtgcactgtactatcctcagtttataaatacaatcatatttatacattacatgaggcacacccaatgctagataaagactatattaaagaaattcaggcactcgataaaaaagaagctaaagacaagctcgacgaatatgccaaaacattcggtattaaactgaagaagacccgctcatttgacaatatggttgctgatttggaaaaagaactggctaaattggccgatgagcctatgccagaagacaacgatggtctatcaattgctgatttaatccaagcagatgatgaaattgaaggaaaagcacttttcaatgatgaagcgtctgatgaagcaaaactactgtttgatgctccagtaagtgcaagtgttaaaattcatgatattgacccagatttttataaagaaacacctaaagtaaatgaccctggatttgaagtaaaaactccttctatcaatgataaaggattttatgctgaagctcctattggagatagcattatccatatcgatgatgaaggaaaacttacaaacattccaattagtactacggaccctgaagaattctccaaagcaatggacaaagtagttaaaattattaaaaccgatgaaatcattgagcttcctgaaaactttagtccaaacatgcaattgctaggtaagaacccaggatatattactcttccatggtggatttaccaatggattaaagataacccggactggaaatctcggccaacgtcgtttgaacacccatcagcacaccagacactgtttagtttaatctattacatcaaaagaaacgggtctgttatgattcgtgaaacacgtaattcttcatttgtaactttaaaataaggaacacctatggcttatagcgtatctattgctcctttggctgcttcggcagtcattggagcaacaaccaattttactgcaacaacttctggagccacagctgaaggcacagaaacgtttgtatggacagtaaatggtgtaaaacaatcttctgttaccgcagctatgaattatgttgctgcaggacctgcaggtagtaagaccgttaaagtagttgctactgttaccccagcagagggtgaggcagaaactgctgaggcagaaacaactctgactgttcagaacaaaactatgcctgcgattactttaactttgagcccggcttctgtttctaaagaaattggccaatctcaagtagtaacagctgatgttactggtgccccgtcaggagcaagcattgcttatgtttggaaacgtggctcttctgttatttctggccaaacgggtaaaacaattaccttaaccgagtcaacagaaactagctacacgttgaattgtgaagtaacggtttctgctccagactataataatggaactgcaactaaaggtattgctgttgcttttactaaaaagaccatgagcggtgtttctgttactttgacgcctagttcaattaccgctgaaaaaggagccacggcgtcttttacagctgctgttactggagcgccggccggagcgtctgtagcttattcatggaccaaggacgggtctcctgttgatggctcaacgagtactttagaagttgatacatctactatcgggtcgcaggtaattgaggtttcggctgttgtttctgctccggattataaacctgtcacagttactaaaaccggtaatgtaactattactaaaaagactatgagcggtgtttctgttactttgactcctgagtctattacgaccgaacaagggtctgaagcatcttttaaagccaacgttatcggtgctccagaaggtgcaactggggtttattcttggactaaagacggttcacctgtagaaggctcaacaagcacgttagtgattgacacgtctgatatagggtctcaagtgattggggtttctgttgaggtttccgcagaagattacactccgattacagtcactacaaccggcgatgtaaccattactaaaagggtagcccctgagccagacggagaacttccatatattcatcctctaccgttccgtggaacagcctatatctggtgtggatggtgggtaatggatgaaatccagcgaatgactgttgagggcaaagattggaaactcgacgaccctgacagcgattattacctacaccggtatactctagctaaaatgctagatgattatccagaagtcgatgtacaagaatctagaaatggatacattgttcatcgtactgcgcttgaagcaggtattatctatccgtaatatttgggagccttcgggctccctttttgctattcacggattggtttattatgtcctcgtcacatagatgaggttattatgaaagcattacaagctcacttgatgcatgaaagcggaaaggattttcaagaaattgcaagggcgttagatatcactccagccgaagccgctaagctgtgggtctctgttgagaaagcacatgagcggtttaaacaaaaagagaaagttgtatatcgaaaacgcttaacaaacgttggtataaaatctcgtcataagaaacttgttaaacacatgaggactttatgatgtctaaagtagataaaagagtagtagagaaatttgagatgttcctagagcgtaagtatgctcctgctgcaaacagtattaatgattggcgctctgcttcgagatttgttgataacatgatggctcgaatatttgatagcacttattataaaaatggcgctcgcaaaatctcggatttgattaaagaacggtatggaaaaattgattggatgctaatggatgtaaatgttccgttagtattagaagttggacctaaaaaccagtttgaaatcatgcgaaataaacatgacaaattaatgtatcgctttgttccaagcggatattaattgctttaaaaatcgatgtggtataatgggctcaggggaaatcctctgataccattaccattgtccaagatagatggactcctggttttattttatttattgagagaaaaattatgaaccttgccgatagaatggctaatactgctattaacgtagccacagaagaattatcagcagcaaaggaagaagtattaactcaaattgagaaaaccgctttagcgggtaagcgtgagctaattatgtatccgagtagtctagttaagaaacacattacaagtgttcttaattatttgcatgatgaaggatttgttacaaattataccagttcccagcgtaacggtgatactgactttatgaaaatcacattctaaggaaattataatgtttgcaaaatattctagtcttgagaatcattacaacggtaagttcatcgagaagattcgtggtgctggttttgatatgcatactgttgagtgggtagctcgtgagaagattcatggcactaacttcagtgtgattattactcctaccgaaatcgttccggctaagcgtactggtcctattttagaaggtgaaagcttcttcggtcatgagattatcatgaagaagtacaaggattctttcgttaagatgcagaacatgctgaacgccatggatttagtatctgttcaaatctttggcgaatttgctggcggtggtattcagaagggcgtagattatggtgagaaagatttctacgtgtttgatattctgtcagattctggtaatgaaaaagtttattgggacgactacgtagtagaatcgtttgctactggtcttggtcttaaattggctccacttcttggtcgaggttcatttgccgagctatctcagtatgtaaatgactttaaatctattgtcaattactataatgagcttgttgacacgactgaccttgaacatgcaaataaacatgtgttcggtccgcaggcttcttctgaaactggcgtagctgaaggctatgttcttaagccggttcatcctaagttcttcaataatggtacccgtgtagctattaagtgtaagaattctaagttcagcgagaaagctaaatctgataagcctattaaagcgaaggttgaactcaccgagaatgataagcgtgttctggaaatcttttccgaatatgtaacctggaaccgggtaagtaacgttctgtctcatattggtactgtaactgctaaagatttcggtcgtgttatgggtctgactatgaaagatatcattaacgaagcagcacgtgaaggtcatgacatgctattcgctgataatccttctgctgttaagaaagaaatcactactttaattcaaaacactattcgtagtaaatggcatgaggttttagaataatgaggctggcgctgattggttcaagagaagcgccacgcagagttctgagtctaatgactataatcggtcaacgcctctcggaagaggggcatttttcatattcaggtggagctccgggttcagatgaagcgtggttggcgaaatacgataggtcaaattcttgtaggattattccttattctggcttttgtggccatgttcctggtacaggtgttgttgtatggtctgaattatcaaacgaggccaaaatcaaaagcatcattaaggcgagagaagttacgtcgtactgggacgaatgctcgaagatagtgcagactttattcgcacggaattctatgcaggtattgggcctagaatgcactgagcctgtagataaggtattatattgggcgcctgaaaaaagatgcgggagtgtatctggagggacgagagtagctgttgatatagctcgtaggcatggtatagaatgtgttaatctatacgataagaaagtgtttaaatccctcgaggaggaatactccccgaggtttgacatatttagtttatagcaaaagggagcccgaaggctccccacaaattagtccgcaataagcttaggtaacttaacaccaagcataacagacatcttacttcttcctgccatcttatccatatccgcagcattaatcacacgagcttcgtcctcgtccaatcctacagtatatgggttaactgacaatgcataacgaaccagtaaagcaacagaaggctgcaagctagctgggtcaacaataactttaaatgcaccaacatgctcagggtcgtctaaatcaagaccttcggtatacggcgcatagaataatgaacctacagtttccttcccaccaaattctgccttaacaccaacaataacgtaatcaactgggctgttagtatcgcaataaagaggtaaaccattattcagcataccgtatgcgttttctggaatacttccatcattcttctgcgttaaccaaccggaagctgccagcaccgcagcacaacgagtagatgctactgcataagtaccagaataagaagtattacgttgaactgctgaattcatttcacaaatgaaacggtacagagtacgaccttgttccggagcagaatcctgcttagttaaatctaatacacccttatcggatacaccagctactttaaaccgagaagaaaccgtaatcaatgattgcaagatgtctttattaatgtcttctgccatttcagtagcaagtaaatcatcaataagttctggagcatcgaacccattagcttctaaatcttgggctaattctacagttaaatccgttttaagcttacgtgatttaacctgggtctgccatttatcaattttaaaactggcttcggtgattgggtctgaatcgggtccttcaaatttttcagtgactgcagcatccgacagcatacgaacattattagctgctacagcttcagatacaagtccaaattcatcggtttctgctgtatcagtaaacgggctatctttaagtactttaaagaccacattctgatatttgaacatatcgtctttattgaatgagtctttatttgccatagtgagttcttcaattgactcacgttccggggcaccgatttgacctgcataagttgcacccgtattaaacgtcaggtcaccattagggttaagatatttgataccatatagcgctgctacaggctgtttagtacgctgtgtagcaacaagatcggtatagattaatttagtagttgcgcgcgttaatgcaacgagattagggcgaccaattaagttgctactcgttgtagttgactcgcgcagaagttcgttgattttagccattgcgctttcctctgtggatttataagtttatttatatccattaaaacaactaaagggagcccgaaggctcccttattggtattagatacctttaacccatacacgacggaagtaagcattcttaccaacagagttgacgatagaaggcataccagaggtaatacgacctttcggctgttgagcagcagaatcggcgaacgggttaataccgataccgtaacgggttttgaaccccatgaccggttggaagttcttcggatcggaaccacgcagcggggtcagtgcaacatacggagcatagtagataccagcatccatttcgttagcacctttataaccgatggtgaagtaatcctgacgagcatactggtcgatgtatacacggtagcgaccacccagaacaccagcaaatactgctttagtggtgtcggtattataaccacgacccagaccctgagctgccggagatacgttggtatcaacagctgccagtacgttaactacgttacgggaagcgataatgaagttaccttcaccgcgaccggtctgacgagcgatttcagcggattctttgtcaatctggaacagcagagctttaaagctttcacctgcccaacgagcaccgcggatatcaatcgggtcttggaagtcgaatacaccggctttagaaccaacagtctgggtcataccagatttaccaacctgagcggagtagttaatccaatcaacaacttcacggttgatttccagcataatttcggtagccaggattgaactcagttcagcatcagcgtccataccatgaacagcacggaggtcctgagccagttcgatggaatactgtgctttcagctgacgagatttcgcttcgatagtttgtttatcgatacggaagcccatttcattccacgggttatctttagaaccattaaatgcttcttgcagttcagcaacagaagtagccataccttcggcgatttctacaactttaccagcttccagagcagcagtaactgcagcgtccagtttagcagcatcggtagcaccagcgtctacagtgaaatcttcaacaacctgcaggtgagcacgaccggtctgtacgaaatcgtgaacaacgatatcaccaacagtcagagcatcaccagctttaactgcttcaaatttctcggttgcaccctgaccagagaacattgcatccggagcgtacatcggatggaaagcttctttagcaccagcagccagcgggtctttgccgtaaacagcgcggagagcgaatacctgaccggttgggttagacatcggctgtacaccacagatatcgaaagcaatcaggttagggatagcacgacgaaccatacccataactgccgggccaatctgggttacagcaccagaggtctgaccagctgcgatgttctgtgcatcataaccgtggtcaccgccaatttctgcttcagacaggaaagaaccaaatgcttcagcgattttttcatcgcggtattccggagcctgattaatatcagcttcctggttttcaaaaatcttagcgatcagagcttttttgctagcgccaacaatttccggcagagcttcgttctcaagcagcggctgccatttttcgataagtttattctttttcatgtgttgtataaccttttaaattaagaaagacgagccgcttgggctacataagcatccataacggatggggttttagtcgcaggagtttcttcgactgcttcagttgtgaagtttaaaccgtctgcttctttgtcgatagtatttatatcggcagattccgttacagactgctctacagaaccctgcaccatttcaacaatagctttcagcttagttgaaaacgagtcagaataatccataccctctgtcagagaaactactttctctttttgagtatcagtcaattcacgggttgcttcttgaatagcatactcgcgttgggcgtaattgatataagcatcacgcttagaaacttcttcaaataaacgagcagtttcttctttttgctcagcaagttcttcttccatttcagcgactacgtctactgattcttcaggaattacaacattgtgctcaacaaacagttctttcataccgctaaacatggattcaaacagttcagccttaataccgcggtcaaccgccagctgattttccgccatccattcggcagcgatatggtcaaagtatttagaagcagcttctttcagctcttcgcgagcttcttctttagctttttctttttcttcttcaactttttcttctgctttctcagcaatcttttcaatatgagattctgccagagctacggcgtgttttttgactgttgcttcgaatacagtgctgaagttagctttagcttccggagaaagctgaactgattcgaaaatactgtcaagagcgacggaagcatcgatagttttagcttcggtcattaaaagttctttaagcatttttgatgtcctgtgttaagttacataattatttataacgcttttaacttctctgcgagagccataaaagcatcatcagcactattggcaacttgtgccgaggtattttccgaaatttgtttcggttgtacccatgcatccggagcactaggaccccaaactgcgtctacaccaacagtcaggcgaaagccttcttgtacgatgttatatccttttcctgagtctttcaaagaaccaagtccacgacttgatacaccaggaatccaaccagcacgaatgttagcggctaatttatcacctggaccgtggtctccttcgatgattcttgctcgcccataaacatcgttgcctttccaccacatatcttcaataatgattgcggcttgcatcgggtcaacatttgcacgaggtggatggtttaattctcctagagcctgacgagtagcaacctgttccttaatataacggcttaccgcagtctcaagaatgcgttttggataaagacgtttattacggtttactacttctgcctgcataaaaacaccttcgatatacagaccaggttttaagccagattcattttcgccttcaacgataatagattccagcatgggtttaccatcaatcacatcgcccggttgaccccaatgctcaattaaaagttgttcattgaggttttccattaacttagccccagagcctgacggcgtttaagtgctttcttacgtttacgtaatccacgaatttgagccgatggattagcacgttttgattttactgctttacgcgcgatttggcggcgtttagctttagaaagtccggttgtttgaaacgcgttacgctcacgtgttttacgatctttggtacgggtaatagtacctttagaatcaacgtgcttaacgataaattcatttaattgtagagattcgttaattgaacctaaagcaattgctaaatcaggctcagaagtaaccatgttctctacaattttatttatatcatctttagaaagcgctgcggacaacttatcaaaacgtgcctgtgcttcaggaagaaaagcttcgacagcgtcgataactaattcatgattttcaggcagtataagcattactcgtcctcttcgtcgtcgtctttctcagacttatcttcatcttcgtcgtcttcatcgtcaacgggctcttcaccctcaatcatgacagacgctgcgataaattttttgcgctcttcaattaaaccagatgtccgttcagccataattgcaccaaaagcttttttggctgctacgaggtctctggattcaattgcggaaatataattttccattagaaatcctcttcattttcttggtcttggaagcgagcctctttagactctaattcaatttgcttggcttcttgttcaatttcttcgtcagacatctgaaggaaatctttcattgctgtcttatgagaaatatacttgccgataaacggttcagccattgtgagcatattgattctacgctccataacttcagcatctttcaactcggtgaaatatgagtctttatggaacacaatcttaatattatttatttcgtcttcccactcatctttagacaaaacttttttaagaattagattagtgcgaagtggatcaagcataatctcttcgaatttatgctgtaatctacgaataaatttggcaaaatcaagttcatcacgtgtgattgatgtaccagcatcaaactgcacaccgccttgattatttgcatccggcatgcgtgaaagaggaactcgcaatgccatgtataacgctgttctaaagtaacggacatcatccatatcactcataccggacataccaggaagagtatctacttcagtaaccgctttaccatctctacgctgcaaccaatagtcttctgtcattgacatattatgctgttggtttttaatcttaccagttgacgcatcatatacaacacggtttttcatcgtgttcataatatgctgcatgtgtgctgccgctttacgagaaggcatattaccagtgtcgatgtaaaacacacgacggtcaggagcacgagtaatacgataaattaccaacgcatcttctaatagctttaactggttggcaggtttaacggctcggtgtaaataaccaatgatgttttgacctgagcaatcaactagcccagaatgtgcatatactatagcatcgcgtggaattttaattttcgttccggcggaatataatctaccatctgcgtaataactttctttgccagtatcgtaaatgaaatactctttgtaccccttaacgattttagtaccagcgtcatcagcagtaacgatttcgcgaatgaattgtaagttgcgcgggtcaagacgtctcagttcctgaattccgtctttcattttcttggtgttgacgattttatggaagaatattcttgagtcaacataccaacggcggaaatggtcagcgccctttctctcgaaattaaggcatgttaaaactgtattaaattcttcaagaatacggtctttaattgcttgactgaagtcagtagaatctaaatcaagagaaactactgggtgaccgtcttcgtacacaaccgcatcagaaactatttcttcaacagcgttgtcaacctcgtagttattcattaaactacgataagtgttgattaaatcagcggttgttttcattccaggttcattggaaccaaacatcatttggttgaatgaattatactggatttcgttttcgtttgattcaacttcacgagctccatcatcaaattttggagcagtgattgactctaggtcattgttgatttgttgcttatattcagcttcgtcgcgtttttcccacggagcgaataagtccaaaatatgaaaggccattggagtctccgaaattatctataagtatatttatatcgaagttttgtcagatatttaagcaaataactcacagaacttcgatacggggccgaagccccataacattattcccaccagtcaatagcaaaggtagtttcgaacgtttctacctcattattcgaatcccagtccatctgtacttcaccaacgttagttggccacagaccagtaatggtgtgttcatttgtgatagttttgccatcacgactaaactggcgtaccgtagcaacctttttgtaatcggctggagtcataccagagatatcattgccttgggcgtgggcctgagcctgccaagcaataattgccttacgtacttcatgtttatcatcgttatagatggtaacagtccagtcgtcataagtacggtcaccggcgacgttaatcttacggttcatgtacccgactggaactttttctacgatacctgccggcatcggtgctgctttacatttgaaactgaagttacgacccagataaggaatttctacctcaaacaggttaggacgtgcaaagtcaccagattcaaacgcacgagtgatgtctgttaattccatcgttgtttcctatagatatttatatagcctcttgattgactacatcatcgtagaggctattaaagtgtgcggtaatataatttatcatctaaaggttagatgaccccagaatgtcctggggttcatattactgtggtccgattaactcatcgaagtctgcaccagttgccgtagcaacgaagttcagagtgatgtagttaattgaacgcgccggcttgatgtagaagctcgctacaaactcgttgcggtcgataactgctggagtgttattcgtggtatcacatacaactcggaagtcatatacaccacccagagctttaatacccgccaagtattggcttgtttccatacggaaagaagaacgggtaaagttatcgtttaactcgaacagctgccacttagaagaatcaccgatgttgttcttcagcatgttaaacaagcgacgaacgttaattcggtcaaacggagttggaacagtggttgcagtcttatcaccaaacagaatgaaaccttcacctgtaccttgacccgttaccgggttaatacctgcttggtacatgcggtcacgatgtgcttgacgaggttcaatcgcaagtttaatgcagttcagaatctgaccacgacgataaccagccggtgacatccaaggctgagcaatatcatcagtgcgagcacacagacctgcaatatcagcagctaacggaacccaacggtttacgtcgttatatttatcatactgatatttatagttgccatcaattgctgcgtacgtagtattgatgttcatgtttgcagagtcgtagcttccttcaccttgacgccaatcaattaaattatcaacagcacgggtaagaggaatatttacaatcgttgaccttggtggtgaaatgagtgctaaacaatcttgacgctcatctgcaatagacgccacgtgtttttgcactgtactcgcgatttcatctgtttcaccagcgcaagcaccagcaatcagaaggtttactcgcagtgcttcgcggtcaccaaataaatcccaaccttgtattaaatcgccagcagtaactgattcattagctgaaaccccaccacccagacgaataacgccagcaaagccttcaggccatccttgcgcagtggcaaatatatagcgtgaagaacccttggagaaataatcgtccataaagatgttatttccgtagatatctttgtcttgacggcttgtcgataatactgcggattcgactaccgcgccatctctacgaacaatgatagcatattgggtatcggtctgaggaccatatccaaatacagcttttgcagtcgaagcgcgttttccaccagccggataaatcgtcagctgttcacctttatcaaatgcagcttttgatacgatttcaatttctaactgatttccgagctcgccaggatacgcagctacaattccaggcattttatacttagcaagagcagtctggaattcggttttggtcatttcttcatgagcagtttcaggttcagttaacagaactgttgaatcagaaataattttgcccagagtaataacagcggaaacaccagaactctgtgaagtaatagtagttgtccacgaagaccctaaatctgggtactgattaatgctttttgcatatgcaataatcttcgaagtcggaatgaacaccgacttaatttttccgtcactatctacttcagtaactgaaccagtgtcatctacggtttggtctgcatatttaaccgtaattttatcaccaacttcatagttactaccagcagttgtgatttcccattcaatattatcaaccagcggagatgcgtttttagcagcttcacggttaactacacggacggtgcgtagatcattaccatattgcagaaagttcattgctgacataaaataatcagcagtttggttattaggaccaccaaacatatcaaccagttcaacttcgttagtgatttgggtaacttgatatgcaggaccccattggaacttcccgacaattgcggcacgacctgtagcgttaagtactaccgtgctctgtacgctcgtttctttgagctcaattccaggagagactaaaggcatgatatatcctcaatgttgtttgctttttattatttatacaaatgaaagaccatgttcttgaggcgcatattctgcgctattcacggcgtcaacgaacactacaggagcgtaatcgtcgttcatatcttctaattcgcgtttaaaaacttcagatgctaatcgcatttcatctttatccacgaaatcagcaaatttttgctgtgttgttaaccatgcgaaaattacgagtgacataattaaatcgtcatgatatccatcttctgccgcccaggatactcctttctcagagaaagtacgaaattcttgaacagtagcacgatggtgaataatgagtttatctttttcgataaggtcttttagtgcagaacatccgacggcttttgaccttttcgtctgtttcattcctaaatcaactattgaatcgcaaatgacattctcatattctaaatccatataaagactcttcgctacagaaacaccggtagagttgagttctatatagatcggagcttcgttgtactccattagatatttaataactatatccgggaggattaagtgagaaattgtattagaatgtaatactccaacctgttcccattcagatgtagttacgtcaataatatttagtgcatggtaatcctgccctcgtccttcagcagagtcaagggttgcaatatacttgtggtctgcttcagcttctttgaatttataaaatccgtgtgagtcaggagtaacttcaatccaatccatattagcaagtttcataccggaaataagagtaccggatgtgccatggaattcagcgcagtgctcttgcttgaactgttcaagagaagaagcactgatagtttgaagtgaccattgccacccatcatcaaacatatcttcgtcgttatataggcgttcttttactgagttccaaattgcagtataaggagtaaagccggatttaccttcaaccgccgcagtccaaatatcataaaagtggtttaatccactcggtgtagtcgtgataataattttagaacgacgacctgatgaaataactggttgaatagcaagccatgcatcgatgaagtttggaataaacgcacattcgtcaatgtaaatcattgcaaatgagttaccacgaacggcgtcaggacttgaagcatacgctccaatagatgaaccattatctaattcgattgagcctttgttccattcaacaataccaggctgaagaaagtcaggaagtaattcaattgcttgcttagtacggtcgagaacttccgcagacattgagcctttgtgcgcaagaatacctaccgctttatccttgttaaaacagacaaagtgcgcaaggaatattgctactacagtggttttaccaagctgacgactaagattacaacaagtcatacgtttagccgccatgatttccagcatgtccctctggtaatcacggagttggactttgatagtaccatagtcaatgtgagtaattgcacagtaggtctctgcgaagtacacaatatcgtctcggcatttcttccattctgcaactatttcacgcgtcaactgcattttaatatttgctcgtttaaggtttggcaatcccatatagcgggtgcgcttattatttttgtccttaaacgtttggaaatgagctgggtcttcaccttgcaaacgaattttaactatcccatgcagcttaagatagtcttcaaatttctcaggataccacttatcatcccactgcgatttaaagaaacgaactccattttcaattttcgtttccatttcagacgggtggcgaataaccacttgtttaccgtcatttaaaggatgtgcatcactcagaacgttaaacggttgagtctgttccatttactattttctctcgagcttcttgtgcttcataggcgtctccaaactcatccatcatatcggcagtagaacctacaaagactgttgcgttttgaatattcattccttgttgaggattagctccttttccagtactaacctgctcagaagtaatgtctttcatttctttatgaagcttaagaatttctttgttagttgtggtcatctgacccataagagttgcaaatacttccatatgtctaggagaatcagcgttctttgcagtttccaaaaatattttagctgcgtccattaacatctgttgttggaagtgcatattcttacgaacgacagaatagtcgtcttcgaggtcaggtttacgatcatttggattagatttaacttcgactaattctaatttttcataaaccggaatttcttgcccttctattccgggaattccttcgatgtctagtaatttagccatatctaattgtaagtcactcatttttcacctctcggtccaggagcctccggatttaccggaataggaatatcgtgagaatacgtctgtttgctagaaccatcccagttttcttgctggacatcacgtggagtaacttcgctatccacagattcaaaatttccttctggtgttaattctttactattagcgaagaaatccaaataaatggttctaatttcgccgtcaatttcagctacaggaggatatagccatccgttgacttcaaacatcaatgaccattctaatctacgacgagtaatattatctccgtcaacagcttcatccggagaaaatgattgtaatacaattctaacatcacggttaaagctcgtgtctttgtcgtaaagttcagttatagtcgtgttaaaatgcggctgaaaataaggaacgatttgctcgatgatttgatacatatcatcttggttccgcgtataaatccccaactcaaaaatcatcttaatcggagtaggattatactgagatgtaatttttgaaggggttttatatgatttggttctattcaactgtgatgttttatacatcgcgttgtattgcatatcaaccaagtgtaaattcattcttggcaaaacagtttctatctttgctttattctcggtagactgaacagcagtccatttcccaagttgagaaaggaatttttcctttgaagcatacgtgataggtactttaatatattttagtccagtgtcttcacgccagcgagcaatttgtatatgagaaaataaatctcccagcaatacaatgtatcggcgcaaggacgaattataccaatgtccaaacatgatttctcctaagggacccaaaggtcccatctttattttatttattcaaaaaatccgtcatcaaacgaatctgctttaggaggagactcaagtcctcttccgttattaacataatacggatgaacatattcagaggcttctttattaattgcatcgctttctgcgtattgtacgtcagaaatatcagcaagagaatcaatgtttttgattggttctaaatcaagttcagagaactcaggaatgataattccttcattgcgctgcaattctggttgaagctgctcaccggaataaatgtatttctgcgcagtaatcttacgttgaacattttgacctaactgataaaatggatcatatggttgaacccaattaatttcaaacagcgaattatccatcgggaaataaatcaggtcacctgcctttggttctgaattattggtttgatgcttgaacaaattaggattaatagtcaaattgacttcatcattaaccatcataccaaatttactgaagaacgtgttatcaccagaataaccgtcaaaagagtctaagtaagcagcaaatttccaagccttggtgaatttacttgatgggtcttctccgaaaagcaaatccggattgttatattcgcgaggaaggaaataaaactcaattcctctcatttgaatagcctcagctgataaaacatctgctaacgtttggctatttctgtgattataaaaattcacataaggattgagaatttctgtctcattagttttattgtatcctcggtaatcctcaaggcgagcgaataaactagaattaaatgtagtcatcttttaccccaacagaataggacaacccgggtcaagtaaatcaagttcctctcggagcctctcgatttcttcttgggcctctactttaagtgtttggccatcaactgtaactccaccagctaattgcagcccttggtgtttaaacagaatttcaccccacaattttttagtcagtgctgtagcataatcttttacccaacgattattataagcaccttctctatttgtattaccttcacctgcatattggccgttattgcgaaggttaggattctgatacctatctcctaagccccaatggtcggaagtttgttcaccagcgaagccgtaacctgcagtattacctaccatcatgtcggtattcataaatgatttagtccagcattcacaaacaatgatgtctcccttcatgaagttgcccattactttaagcatttcattatcagagttataccaatagtctggaagtggggcaagcaaatcctgcatcattgaccaataagtcattaattgagtaaaatagcccaggtcagcaccgaaagcgtttggtccataactcttattacagcttgaccccattccgccattaattccggccattcccattaaaaagtcagtaaaccacggataggtagcattaccatccattgaagttaatgaacctacatttgttctaacgatttgagtgacagcaaatacattacgaccacgcaaatcaaacacaccatttaaaaatcttgcgttgtcagcttcatcttttccaatataaaaaacttgatagcctttattcaatccgttaaagtggtattcaccatacaactctaatgctcgttgaatacaatcataaatttggtcttcagttacttcgacattaattaccggcgctcctagacgtcgaagtatagcgtctttaagcgtttttgggttgtatgtgttgtatgacatataagctcctctttatattctatttatacgaaaaagggacccgaaggtccctttcattatactgctggatgaatagtaatatccaatgatttaatactaacaggaacttttgattcttctgaagcagctctatacacaattttgattgcatcgccagacgaaaacttaataagtttcttggttttcaacagttgctcgccggttactgctttaacacctaggctataagtaaacacctcaatgttattgacgagaataacaatttggacagctttatctgaatcagaagcttcgataactgtatcagtttctacacaaaatacgccatcgtcatcaacaataatatcatcaacaatacgaatgccagcattaaatgaagcagcgaccaatgagttaggatttaccaatgcatcagaacttaaatcaacagtgaaatcttctttactgaattcacctattgatgaaggcttcttaaaccattcgccccgtttacggaggtatgctccatcttgttctacgtcagtaactgcagtcacgaatttatcttgcaattctactacagtggcatacacaccatcccgctgaaccggattttctgacgaaaagtcaccattcatttgagtctgtaacgtaaatacagaaccttttaacccttcgctgttattgccaagttctacttgaatgtcctggatagcagactgctgagagttttgcatcccttcaacattggtcattctcgctaaaattgaccccggaggaatcggctgtccgccaggaacaataccaacttgctgatttatccatgctacttgaccctgaagccctgatgaagtatcacgtcctacaacatcagaaatgtacccttggtcagttgaaagagaactaatttttccttcaatagtatcaggcttatcagaagaccccaaacgagcatcaatattattgacacgaggaactaacccggtttgtgcagagttaagtgttgcgtcaactatacgataatcgttttctaatctagtagtacgagctccaatttttactggattggtaaaatcaatggcttggttaatagcaaagatttcattattagctgcggaaatagcatcagcgttattcacaagccttgcataaattgaagctgacgtagctccggatttaggaccaacttctttacgcaggtcgtttacttcaatagtcagagaacctacgtctgaatcattgtatgcatcctctagcgcctgaatacgctcgtcatgttttactatagctgacgcattattgatgattcggtatttcataccagaacctggagcgtcttgcttaggctgtccgttaacatcttgcccaggataagcgcccatttcacgtttaacccaaacaatattatcacgaatagttctatagtaatcgtctttactagaatcataaacacctacatcctcttcgagaaaatcaaggtcagttcgaagtttttcggtgtcttcttctaatttaagaatttgtccatcatgcttttcaatattctttttattgatataaacttgctcaatggcgtcagaagaacctgtaatttctaacgattttttgatttggtctacatctacttgaatattttctacagcagttccaacgttgttcaaatcgttatgtacctgaaccacatttttctgaatctgcacagaagctctattcagttctccatcatttccatagcgggttgaagccccattaagaggctctgtattttttatccagttaattctctgttgaaaatcatctggaattccgtctacaaacggaagcgaatctactagtttggtcatattattccttacggtctatttgtacagaatgtaagcatgcagtcataaaatataatacgactgtcttctgttggtcttatttgaacagtggcatttggaggaatgttattgaagaaaaagttgctagatgcgtaagcttcaaatctccatgaatgaccatttcgtccgcctttagtattttcgatgttaagagtaagttcaccgccccattgggaaccgttaactattacaacaaatctgaaaatacgattgtcatatccgtcgttgttacgctcaaattttacattaacatttagagctaatctactagaagcttcccatggtgcattacatgtaaacgttgcacctcgactaatccaagattgtccttcaacccaagtaacattacctactctggttccagctggcatgtaacgcccgtcagattcttgtcttgtataacaattaatatcattattagtaattgttatgtcattatcaagagtttttccgtttattctacgggttttaaagactgcatctgttgcagccgctgccaatgaagcatcagtagttggagaacctgataatctggttaatccatatttatccttggtggattttagtgcttgaagactttttggagtaacagccaaattgttagaagtagctgaagccacatctgagtctttagcaaattttactataccaaatacactgtcagacgcttttgatgccatgaaggtttttggagttactgcgtatccatcgtgaacagcacctgctgctacctgggcttgggttgcgacacgaactaatcccaagttgctttctgttgcagaggtataactaggaggactgacgctgaactttccaatcatttctacaacacgcttaggagttactgcggtagtttcgtcagttcctgcttgtgcttgagccgcagtagttaacctaacagttccatctacgttttcttgggctttcacagttttaaacacatgaccgagagccgccgcggtaatagttctatttcctgcggttaatgctgcggcttcagtattagtagcataccgtgttaagccaagaactgctgtagttgcttcaggacgggtaactgtggattttaatgtagcaggagttaccgcagcattaccaatagttccagcatcaacttcagcctgtgttgctgtgcgaattacaccggctactgtaggagatgctacaggtaatccggtatcagttcttgcccagctaccaatcagctctaacgctgattggacgtcttttatagcaacaggccattgtgtatttgttgggtcaaatatcgtatatttggccaaatcactgtagtgattatagttattctgggccattatcccatccttctaaaatagtggaaagtaaatgtgttcgcgccaaatgttttagattcgttgccgatagcatcccattgcccataacctgctttagctggtgaagtaatagtaaattcaacagttaaaccatactttttatatgtttcaaaattatggttctgataatctaaatgaataatatcaacatactggggtgttgccggcgattgagtaacctgttgaacaacctttccaacagcttctaattcttttactttatcataccaacgtgttgctactgctgcaaagtcatcaccgtttgcaattctaattggtaagccaagaatatgaattattactgggtcaccgacagagccgtcttcttttggctctaacgcaacgacacctgaaaaagtagcacgcgtaatttgctgtgcgggctgtggagatattccagtgtcattgcaaataatagttccaatttctgctgactgcaatgacatcaaatcattaatagcagcttcagtatttggataccaaacccctaaatccatttgttcaaaggttaggctccctataggagccgtatttcctaccgcaatattttgcgggtcaacgcgatattctgaaaaagcagctaatcttgaattaactttagctccttcacgagttttagtttcaatcgtcattttaacctaccctaatccaacgataaacggtgattgttggctgaattttagtgatgtcatttggaactacaccgttgtttaccgcaacagtgtcttcacgatatttagaataacctggtccctgcgcgtctgggtctaattgacatccaccgataactacgcttccatgttcagggtctgaaattagaactttatctcttgacattagttcaggaatgtgttcttttcctaacgtaaatgtcaaatctccaaccgttccacctgctgttaatgatggctgaccattttcgtttaagttattgttgttacgcgaaaaataaggatcagatgaatcattattccaaccagcagtaacacggccttgtgaataaagcttccacaccccaaatcccatatagtcagcagggtttgcgtggttgtgagcgttttcataaatcgtgccaatcggataaattacgtcaaaaaacgctgcaatattattgactttaatcataatatcgtcagcaaccggacgcatatttttctgattaggttcatcataatttgtgtattcaatgcgattttttagagttactaattgctcagcattcatatacacttggtcggtttctgccatgatatcgtcaatatccatagtagtaccgatgttattattgaaccaacggacggtaagaaggtctttatcttcaaacgcctcaccaaaaataatagcttcgacgttagtaccagttgagtcaaattccagtctatagtcttggttagaatttacccattgaccaccattgtttatacagtcttctgcatatccaccttccgcaccttcacaataaaataaaggaagacctgcagttccagcttcgagtaattcctttccgttcaacgaaatttcaagcgagttaggatttacccctacgcctggaagtacacccatgtcatccagagtgattctgcggagagtagcaaggttatctactatcattgacccaggaatcgtctgggatgtagtctgggctgaatctcgtatctggatagccaacttgttgtatgaagaccgataaacaccaattccatctaggaaggtttcaaatgttattacttccccttcaacacatggaacttttaaacgaatgtctttaccgtttaattctaccaattgacctgctactgttccaggagaaccgtaatcagcattggctttatccatagcgctggtttcaccgtaatataaaatattaccacgacgatatacattaagcgagtcttcgttatattctacgccatcaaaaatgttaagaaagtcagtctgacccgcagtagcaataattgattttttcgctacagtacttaagttaccattagttagcttatctacagttttattttcaatatattcccagcggccaggggcgcaataaaccaattccaaatcttggaagttagtattgaaaattttaggagaagctgaaccctttaatgtatcgccttgagcaggaataactgtgattgggcttaatcgccaggttgaccaaacatcacgaagtttaataactttgttatagtcgttggctgtaccctttggaagctgaacgttaactcttgctgcctgggtattaatagcaaaggcctgaccaaacttagcatttaaagtagttccagtagggctagctttaaaagttttccaggcacctgctgcgaatggaactgaaccatcacctaactctgaatacaaatcatcaaagttgttattaattttaagaccacctttacggaggtaatcaccagacccatcatctactgattggcctactatcaaattttgtttcattattgagatacccctacggtctgtgtagcaataactttaactgccaaacgtgcgtttccataagatgttgaagctgtgcatattaaatctttctgcgcgttaatagagtatgaaatagaatacatcttttcattttcagatgattcaccacttcttaacactgcatattcagtgtcaaatactcttccgtttggcgctgatgaagtaatagtcgggtcaatcataagcatgacttcagatgattgccttttgatggtttgaccacctggatttgcgctgaagcttaataacaatttaacagtagagtaatcatcgttatatccaagccgaatattaataggagaactcgttaaattatatgtagcttctaacggcgaatatgtgctgccaaacatacttgaaattgaataatcccaaactgcagcaccgttagctttgacttcaacacaccacaattcaattctacatcttggcgtgttgataatcaactctcgcgatccatctttaaatgcatcagctacaccttcaccgtttgttgttatttttatgggtctagcttttgatgctgatccattactatttacgatgaatacagcttctcccgctttaccttttgaaagacgaatctgaactgccccttctgaacaatctgcgtctaagcatgctcccattggaaccgtccctgccgagttagcatcaccaaattttaccttttgataataactcgttgcatgaattttttgacttccttctccagatcctgcagcaaatagcctttgatctccaaatgcgttataaatggcgtcatagttttgatttattttaacaccgccagcatacaaaatgtcgcccgtagaagcattacctacttcaccaacgtcaataacttttttaccttcatctacatacatagtagtaacctcttatcaaagtatagtcctatttatataaaaatggggagccaaaggctccccataattaaaactcgaaaattaagtttaattcttccgtttggtccattgaacgaataataggttgccgattttccatgtaaatcatttcacctgactgcctttcaagaccagaagcactataccagcctttttcagccttaacattaggtgaatttggcattggcttaacttcaagcggattagttataattgacaactgtctaaacccagtatttcctggaagactaaattctgggaaataaattgcgtcaagatatgctttaaatctaatcgtattacacttcatacgatagattaggttaaagtcgttttgttgccaagttaagttgttttgaaatccccaacgagctggagattcttcaatctcttctggccaaggaactacgatatattcatttgtacatctgttaattgatacgtcggctggaatttcatatagatattcccaaagatatccatcgcccaaatcgacggtaccatttgcatcaccacgcccacgaggcgctgaaccggaaatagtggatggtgtccatttacccccaagcttaatacattcttctttgcttgtaagattgccaattgaacacattccatcctttggaacatcaatacatctatataccatccatccaaatccagcatcagttctgttatatggcgcagagttagcaacaacgatatcgccaattaaaaatgtacgcgggttaggatatcttgtatcgccccagtctcttcttggaacaacacaatcaagcatagatgattcaattttgactgcccccatcatatttgtccaaacatcaactaccccatctccattatcagcgggatatggaggtgcaaatccaggttcagattcattatctgaccacggagtgctttttccaaatgaaacatacaatgtgttttggtccgttcccggaccaattgatttataaaatgtgtacatcttttcagttctaaacttagatgtaatgatagcacgataaatcgtgctacgtgttgaacttgctcttgttgaattactcatcaatttttacctgtgtcggattttcaggatcgcgaggattacctgcatcgtctttaagacgttggttaactaaatcgcgataattagcaaacgttactgctgattggtcaaacgtaggacttaacggtttacgtcgttgtccagggttttgtccagcgataacactattgttattttcttgattatagttagcaggtaacgggaaaggttcaccagcttgagcacgtgaagaatacctaggctcattagttattgggtctctttctattgtatcatctgaagcgataatagcaactctatcaggataaactgatggcagtcctgcatcccatttatagttcttgagtttatttatgatagtctcaacatgcttcatatttaagccactattgataaacattgtcagcaatgttataccaatgaaaccgaaacctaccggatgaacaaaccttaatacatcgtcgcggaaacgagaagtaggaagttgagatttaattttcataacataataagaacgactacggttaatatagtcaatgttattactcaacatatcctttccacggacaccttgaattatgacaccttcgaagtcagtacgttccgatttaatttcttgtccttcaataaatcgtcctgataagttgtgaatagtaatacgccacaacagacgaccgtcctgatattctctctcgatataagtcacattactacgaccggaagcagtataaatcgtacgaccaactaaatcatcagaaatatttgtgctttcaacaataatgtcatattctgtcgtattctttgactcgatgtcaatttcaacatcttcattataaagaagtttaaacaagaatttgtatgagtcttcaattcctttagtagcatagaaatcattcttgcgtgcttcaaagaaacggacgacagcgtcacgagcgtctttactcagataaatattgcgtttataaacttctgaccacagatattcccatgcattttcttcgcgaggatatttgttcttaacaagattaacgagactgttgtaatgcgttccatttccatctgaaaggaattggagatagtacttacaaaagtgctcaaaattactatcttgcagcaagtaactatccggcatcattttagtaagatacggacgtaaatctgggtcacgtaagcctggagtatgttcaggtgtccagtcttcttcccgtgtttggttctgcagaaacgccttaaacattacatcagttggtttccagttaagcgttacctggtcacgaacacggtagtcaaatgcgtaatagcctatcagttttccgtctggttcgtgaaacatgatgccagaagcatactgcaaaaatccattaaatgaaactggagggcaataaaacgttgcgtcacctttatcccacacttccgaaagaatacgctcggtagttccctgcgccgctgcatctattcttttctgataaagaatatcattataaatgacaactgcatggtcagctgtacttatccagcatctgttaccttcacgagccatccagacaaaccaaggctcagcataaaacctcatcggtccaggaacaaatgtttcccatcttgaaaattcatctgctcggaaactcatcatgtgataatgcttatcagagtgatactgaattgggttaacattttttactgcggtagaaattagttctgggtatttcgtctcaagttcaatatcctgaacatactctgtcgtcttgaaattagctgatgaaaagaatatttcctttccgtcagttgacatagacgtccataaatgctctatacgacgtttttcttcatcggtattaccaaatacacgcttccaagtatttgtgccttcctggtaaacatagacgcctttagtagcagaatccacaacattccttgggtctgttgggtctaatcctaaggttttaacttccccggtaataagggcaaagattttgcctccgacagaatccattttaaagcatacagatttaggattgcctgttatatgagatgcttctttttcgaacactttttcaccaaatgtagggcttaaagggtcagtgtctattggggcatcttttaatttaactttacggacagtgtcttttgcaacaacatacaaatagtcgtcattacaagtaaatgcttccgcatatttggtaacgtcagcgggcaatgacgcatacgttccgaataactctacttcaaagccaagctttaactggtctcccaatttagcaaatgtaacttcgttatcgctaaacttaacctcattcgatgaccaacgtacgtcagatgatttccttccgtaaaagattttatcatatcctaaaacataagaagtagttttagattgataaattaccactctagaaaccggatttccgacgcggtcattaaataactgaacgtattgccaattctgtcctttatcatttgatactttaaccatatgttggaatctttcaaacagatacaaaattccgtctatttctcccagcatagttctatttttatcaacgcacactgcttcaataggtccctgaatttcatgatatccagattcacctacaacgaagttttcgatagctgataaatgagaatattcaggactaaactgaaaagactcagtcatcaaagacgccatcatggcagatgtgttgaagttaacatacgacatgttgtttaaagaaaacttctgtttaatgaattctttcactaaactgaattcttgcatatgctcaaatgtgtatgcgttttcttcaaaagtttggaactcttctgtttcaacccattcagacggctcaaaccctgctgacgtagtttgaacacgcattttataataagtaagcggttcaatacgattttgttcgaaccaatcattatccgcggtataacccagtgaagaccaactcaagttatcagcggggataacttcccccgctctgtttcgagtttcggccagttctacaaaatagtagaagtttgcaccaacgtcatcccaacgaatattgacctgattcgcagatagcttatgaattcgtaagctggtgacgaacggtgcaattgtcattgagtaataggctccaatttaatagttgtgtattgaggacgaaggtcattctcaaatacgataagtgttccatcgcgggcgaagacgatatcctgggtaggagtagaataaagctcaatactctggtcttcaaactgaagaggatcggctccaatagctccaaggctccagtaaatattatcaccataataatctacttcaccgattttgtaccaacgagttctttctccattagtagttctatcaaaatcgtcttcagtatatggctgaatatgagtattctctttaatgtcacctggcttaaacggtccaataaccatatttcctttgccatttttatctgggtcagttccaacgatattaactgaatacggttcagcagttggggtaacagtaaagaccaaatcaccagaacgtaacgtccgcggagtaatagtattatagtatttaatacctgcgctaggaagagtgaaatagttgacaatttcacgaaccatctgaatatccacagaagaaccgatgattgagtggtcagtatcatcaatataggtcaataatttagatttactgaaatttttgttaaacatttcaacttcatcaacataatatctattaattgagtctataatttttgactgtaaccactgctcagattcttgtaacttattcagcgcgtaagaggctttaatattgtgacggatgaacaagtagtctggactcattaccgaaggggtaatgggagcaagacagaatggacgaagataatcttggatgtcttctctttgaacagcggttaactgcagcccagattttggcttaattgcaataaacgcataccctggcttatcttggtcggtaaagcattgtactgcttgtacgatagaaccaaagcgtgaactaacgaatgattcatagtcagttttagacacgcaacgcatttgagattcgcgcttaatctgggcgagctcacgaatacgctcgatgtcttcaggttcaccaccgccatcagcgccaacataatcaggagaatctgaccagttttcaatgattttgtttactacgatatattgtagggtatcagcatagctgaaatcagtcgcaccattcgcagcttcaccatcagtacgaatatattcaataacgacttgcgcacccttagtaggcttcaatccaccgatgaagttgctttcaagaactcctcctgccacagatgcttctgccacaccttcaccaaagaagaattctgtatttccatcgacggtttcacgcatataataaatcgttgaaatagacgaagcatgaaccattgatcggtctgtccagttagtccattcagcgccatccacccacagcttaacctgcttgcggtcaattgactgatcgcgaataacaataggtttcttcgggtcatatgacaactgagtacgaataatacgcccctgcgccaaattgacaataggaagatatctattaaccccttctggtgctgaagtatctcttagcgcaataacattttcagtaacaacaaagttgtatgggtctactgatgaatctcgtgcatatgctaaaaacttggttccacgaggtatttttattgctggctctggatttggatgagttacctcaagcataatagatgcagtagccgctgatttggaacttggcaaatacccgttttgctgagctgcttgaacaacggaacttctcaagttagctgttccaataaagctttcgtataaagcagtattactaaattgctgtatgtaaagcgtgttatatgctaataagtctaatagcacgtttaaacgcgaaccagcaaaatcaaagtcctgaaactctttttgaccgctaagccagttaataagctgatttttaatttcatcgaatgttgctccagtaaatgcgtctgggatagcgtttgcagtacgcgttaactgataatttaaaggttctttaatagccattagtgtatgaatacctttgagcttgattgcgcgacagtgtcgccgcaagaaattggatcggccatttgaacagcttttttgcctgttacaaataccttggatgtgcgaggttgaacaactcctccatgcgtatcatgagggtcaaccgtcttggtgtgtggggtaattgagtcgccatcaactaataccgctattccaccagtgaatactttactttgtgtagcatttacttctgtcggaggatacgcactatgcccggcagttaagcatttattaaatgatagtccagccatttagttccccgcatatacataagcacgaagctggtcgccccatctactccagttgcctttaacggtttgagagtaaaccttttgctttttatattctgttacgattggagcactagaacctccggatgaacctccagacgattcttctgtcactgtatatattatctcaactgtataggtaaatgtcttctctagtgttctgggggctttccatagatacaaatcagcagttttgggattaggtaaatcctcccacgctgaagcggactttagctcatcgccttcacggtatttaagcacatcgtttccaaaagtaaaaactgagttataattacctttataataggtttcagacacagagatatcagatactggttgatagtcgataatatttattgattttaatgtttcgttggtagataattgagcagtaaagtactgctcaacatattcaccttctattacttcacgtaacgttgtattaataggaagtatatcagccatgattaacctacatcaattcgtgaaccgtcaacagtgtattgaccttgggcgattgagctcatagaagccattgtttcagtccaagccccaccaacattccaattcacagtacctgctacttgccaagttaaattaccaccgacggtcacgtcgtggttgccatctactttagtagtggcatcaccgctgacttggatatcagcatttccttcaacgactatcttaatgttacccttgacaaaaatagtaccattgccttcaatcgttttagtttcatttccacgtacgtaaagcgtgttatcgccatcaatttgctgtcgacgattatacatgttataataggtctcgttccctccaacgttaaccttcttatccccagagattaaaatatttccatcaccctgagtcatgtcatataaatcggctacagtttttctggtacgacgtccatcaggagctacttcttcgtatgaacctgttgggtgaacaatacgatagcgttcatagccaggcgtatcatcaaactcttggatatggcctgattctgtttccatcgtatgtacatatggatattgaccattatatgaagactcaggttctttgaaaagaattcttgaatcctctggggtccacgggtcttcaggattaccaccagacttcggttctacataagccgcagacagggtttttccttcaggctttggagccggaacgccatacgattccatgttacctgttagaataatcatggaaacacgagaagcacgaccttttgtctggttaaaccacacggagtttcttgcttcagtataggctgttttccaatcaccaatgagcatggcatcaagcattttaccaaattttgctaatccacctacacccatttgaaaactcatattttctaaagccatttgccttgatttgttgactttagcatataccggtcctacccgtgaatttgttttaatgtcagaaagcattttatcacgatctttcttaaatagtgcaactgcttcgtccattgtaatgataccgggatttcctgtaacagtacgaccaacctgattagataaagttttattaatgacagacatatcacgtactttttgtgccatgataaggtgtccaatacctatggtaggatatccttctgtgtcccagtagaccttcaatctaagaccttcatccctattaagcatatctgttattgtaattgcaggatttgggtcttcaggaatatcacttaagtcagcatcatcaggattaatgccaatgtctaaatttctgtcctggatgatatttggtatagcactatacccagtttcatcgccttgaactaacgggttagtatctgacccgacctgtctaggatattgacctgtagggtcagaaaaaccttccgtgtagtttggcttagtttttctgtgtgcagaatatgttcctattactaatcctgctgttttgaattcatcaagccataagccaaataccgatgttccttccaccattccagttatagacgagccaactccggaaattccagctgagtttgtaggctgaatcactgacatccaaggaaggtcttcggtaggaagaccggttatagctccttgcaccttttcaaacggatgaagcccgtaaacgcgtactcgcactcttccttgctttagcgggtcttgtctgtcttcaacaacaccagtaaaccattttaatgaatcgttcatttcaatcataaaacttctccgatggtagtctgggatttgtatcggcctgattcgtattcgctgtcaggagccttttccatttctcgtataatatcagaaagaaatgcttcaatatcactaggattgataatgtttatttggcgcagtttttcattttctataatagaatcttcataaatgtcaacgccagccaaagcaccagtatattgaggatactgatgattaaagtcccctttatcataccaaacacctgaattttcaggatattgctcgaggttataataacgattgccgtttgcatccacgtgatagagtatttggtctccacctacatctgcatatttttgctgcgcaaattgatagcatgcatcttgggttttaatccaatctctaaacgggtcatatacgttattacacattaaaagaatccagtacagctgactatttccataaagaatatatgctaattcttctggtctaggagctccacttatgtaatatgtttgtaaaagatagttttctgctacagtgtcgaaatatttgcgataattacgaaatatgtcagcggttgggatagcttttgccttagcaccttttacggtctttgcagaataatctatcggactaaaaaatgagaagagcatagtttatcctcttataaatattaataacagtatttataaagttgtagtgtacatgacgagtggtttatgatattattaccctactaactacttaggagaatagcatgaattaccgtaaaatttatgaccaactaattgcaagaggcaaatcccgcaatttagaagggtacaaagaacggcatcacattgtgccacgatgcatgggtggaagtgatgataaagataaccttgtggacttaacagcagctgagcattatgtggcgcatcagcttttagctaagatttatccaaataatcataagttatcatatgcagttcatataatgtcttctaaattagcaggaagaaataacaaatcatatgaatggattcgcaaaagggtttctattgctaactctgccgtattaacaggaaagaagcgaagtccaaggtcaaaggagtggtcagctaaactgtctgcagctcttactggaaagtctcagacgctagaatcaaatgaaaagcgcagtatttctatgacaggtatttcaaaaagtgataccatgaagaaaaatatgtctactgcagccaaaaatagaactaaagagcaccaaactaaattaaatttagctaacaccggaaagaagagatcagaagaaacacgagcaaagcttagagctgtttcagaattgcagcctatagtaacatgtcctcactgtggtaaatcaggaaaacctcgtggaatgaagtgctggcattttgataaatgtaaggagaagcctaatggcttatagcggaaaatttttaccaaaaaacataagtaaatataagggggaccctcgtaagatcacatatcgatctacttgggagcaatttcatgatgcggtggttagataatcacccagacgtagtccaatggaattcagagtgcgtggtaattccatactttagtaatgcagatggaaagaaacgccggtatttcatggatttctgggctaagttttctaatggtcaacagttcttttttgaagttaagccaaagaaagaaactagacctccggtcaaacccacaaagttgacgacatcagcgaagaaacggtacattgatgaaatttacacttggtctgtaaacgtggataagtggaaagcagctcaagctaccgccaacaaaatgggtatagaatttaggttaattactgaagattcacttaaaaaattaggatggaaaggctgatggctatatttgaatttatcactgaagctgcagaatcgcctaaagctaaatcccgtagtgaaaatcaatgggtagcattaggagttgaatactctgctgctcgtaaaaaaggcatgacgtctaaatcattcgctgaaagcaaaggaataaatcctgctacgttcagtaaagcaatggctcgtcatgcatcaagaattaaaacggcaattaaagtagcagaaattgagaaaaaacctgctaataaaatgaccaaacaagagcgtgctcttgtgatggtaaattcatttcgaagctctatcaaagataaaattcgtaatgaaggcgcagcagtaaacaataaatctgctaaatggtttgcagaaactataaagaaaaatatacgtggtcattctgtaaccaagcctcaacctggaaagctatatgcttacatgtatgacgctaagcacaaagacactcttccattctgggataaatttcctttgatagtttatcttggtcttggaaagcaaggtacaaccacattgatgtatgggttaaaccttcactacattccgccaaaggctcgtcagcagtttttagaagaacttcttaaacagtatgctaatacgccagtgatatctaataagaccagattaaagataaactggagccaagttaaaggatttgctggcgctgacaaaatgattaaagcatatattcctggtaatataaagggtgctttaattgagataaaaccggctgattgggcgaatgtagtcatgttaccactgcagcagttcatgtcgaaaggcaaacgctactctgctacttctgtatggaaatcataatgtctactggactgtttaatcaaactaacacaactaactttatattagaggtccctgatgggggcctcacccaagcgtttaaagctaatcttcaaacagctgtagttcctggaattcatattcctgctactgatactgtaggttcgcctcaaggcatgcatcgtgctaaattgcctgggtctacttttgagtttgacgctgttcctgttagatttttagtagatgaaaatcttgattcatgggtacaaatgtacaaatggatgttaagctgtcaaaactacattgaccgagacaagtctggatggaataacggcggtgaaggatttcctggtgcagttttaatgcatgttcttgataacgataaacatgatatagtattaactgtccgctacatcggaggttgggtgagtgatttatctgaaattgagtattctttaaccgaagaatccgacccagcaatggtatgtgtagcaactttgcagtacaaatacattgaagttgaaaaagatggtataataattactggtagaccttctgtcaatgatactcgcgaatatcagtatcagcaaaaggttatgggaatgcatccttctatgaggtaataatttgaagcttttatttttgattggtaaaaaacgtagtggcaaagacacgactgctgactacattatggataactataacgcaacaaagcatcagttagcaggtccaattaaagatgcgttggctgatgcaatgcttactgagtggtatcgcgatacatcacgtcagtttcctcgcattactcggtcaatgattgaaggtattgattacgatcgtgagcaggatttaaatctgtctactaaagacgtgattcgtattatggcgaatgccattgaatatgtccatcatgatttgcctttacctggggtggtttatgatagcaagcgtaaaattcttgacggcgatacgatggaagtcatccgtcaagttgtaataaataaacctgttgagccatggtcaattcgtcgtctcatgcagacccttgggactgacattgtctgtgataagctcgatcgcatgtattgggtaaaacgatttactttggttatggctgatacttttggtgattatgattatttcattgtcccagatacccgccaagaccatgaacttgatgtagccagggcgatgggtgctacagttattcatgtagttcgtcctgagcaagaaggttctaaaaaagatactcacgtcacagagcgtggacttccgattcgcgaaggcgatatcgtaataactaacgacggttctctagaagaactttattcaaaaatcaacactatattaggaattcaaaaatgactactgaacaactgcaagcccaagtcgatactctgaaagttcgtgtatttgacctgtctgaaaccatccaaggtctgtccgctctgcgtgcacagtatgaagaagtactgcagaaactgattgccgtatctggcgttgaaatcagcgaagacggtcaggttaaacttgatgacctcgttgcaaaaatcgaagcacagttcgcagaagaaactactgaagaagctgatgcctaatgaacttcagcgattttagcactggtctatatgtagctgctaaattctctgagaaaactcttgatgctattgaggaccttcagcgtgagttgaaggtccctaatcctgtacctcgtcataagattcatacgacgatatgctattcaagagttcatgttccatacgtttgcgcttcaggaagttttgaagttgctacatcaggtaaacttgaagtatgggacacgcaagacggacgtacactagttcttaaactagattcagaatacttaaaattccgtcaccaatatgcaagagctctgggagcaactcatgatttcccagattactcaccgcacattactctcagctacaatgtcggtccagctcacttcgagggtgaagttcaagtacctgtagtgcttgatagagagtaccaagagccactaaaactgaactggtcagaagatttgaaatagaaatttatttcacaaagttgtttacaaccggttctagtggtgatactatagctccatcaaaacaaactaaccaaacggaagcaacatgaaaacgtaccaagaatttattacagaagctaaaagacaggatgatgaactgccgattgttacaaaaaccgttgacgggacattagccgattttaaaaaagttcctagtgataaactttctaaattgactggcagcatcggtgaaaaagatggtaaagtcactttttctgcccgaggttctgctaatcttaaaaagcttttaaaagccgctggcgctgaataaagttgtttacaacgggttgtagtagtgatactataaccctatcaacttgaggagaataaaatgaaacgttgtgaattaattagaaatgttgcatcaactatctgcatgggagcgttaggttttggcattataggtgcagcctttatgtctcttcctgaaacagtatcagtgttaagtgttgcatttctaatgggtatcatttctttcataatggataaaatagcacatgaaaaagattaagcagtggttcatcaaaaactatgatttaaaccgtgaagaagtaactaagtatgattatgttactttgggtgtaggactaggtgcactactggcagcactgcattcatcactacttgctattgcagtgcttcttattttggctcactacagctggaaacgtaagtaatgtacgcacttttaacttggtctaattattatcctgctcctggctctgaccaaatcagaggtgtctactctacggtagaagaatgctatgaagccctccagggaacgtatcaggactattttgagatactgaattcccgatttgaaaccgttgctaaaggttcaactgaagcatacaaagattaattgtgaggaaattgtgatgaatatcagagctgcatttaatactttctatcaagagaattataagcttcttgcccatgaatactatgatgcacaaggcgttccaattcttaatgatttagttacgcctaagcataccaaaaccgattctcttgacaatgaaatccagcctggtgatttagtatcatactactgtggtgggtcactttctgcagcaagtgttggtattttgctaggatttactcctaaaggttatcgtgtggttcctttccatacaagtccaattcctgagcaccgggtattgctctctcatatggattcaccacatcgggtattcctggttaaatcaaagagctcaccgattgtgtaatatgctttaggttttctttgttattattaatctatcaactgctctgattaattttagagcagtataaataaaattacccattggggagttagaccgtaggggtagcgggacagactgtaaatctgttgctcaaaaggctcgagtggttcgactccattactccccaccaaatttagggatactagctcagttggttagagcaccggacttttaatccgggtgtccgaagttcgagtcttcggtgtcccaccaaattcgggtcgttggctgagagggtaagcgacggactgttaatccgtgtcagaaatgactaggcaggttcgatacctgcacggcccgccaaatgaagaagtcagaagacgttctgataaatcgtcggcatagaattccctgtgtacgagttccctcaacgataactacgtgcttataatttcttacggcgttgaaagttcgctttcagggatacatcttagaacagagtgctaaacaagattcatctggtaccaaggtgatgagagttctgttcccctttgcttcggcatcgtgccagagtatctctgaaagcgaattatggacctatagtttcagcggttaaaatactcgcctgtcacgcgagagtcacggattcgaattccgttaggtccgccaaataagaacgtggcagttcttgaagatgagtttgagtcctataagataatgccgaggacgaagctgtttgttcccacggaataagctctatattcgtaagattatatctttagcgtgttctacatcaagctacttgttagtacttcaagaacccggataaatgcggggtaacttcagttggtagaatgttgggctcatatcccgacacgcgcaggttcgagtcctgcctccgcctccaacaattggactatagacaagcggttaagtcaccggcctttgactccggtatctctggttcgaatccagatagtccagccaaattaatattcattcaacgcgtctacaggggttgaactgatcattcttctcttaatttcgtatgaagtcctcatgatggatggagtgaatattgatgtggccgtagttcagttggtagaactcgagattgtgattctcgtagtcgcggattcaaattccgccggtcaccccaacaatgaaggaatggtggaaaaatacacggccgcaaacgctgtggctgtcgctaagcgaattgtgtctatatgacacttccttcaccaaatactggagagtagcgctagtggtagcaaaccggacttgaaatccgggccatcggaaacggtgagggttcaactcctttactctccgccaaatttatgaaagttaaacgctgcccatagcagtggtacatcaacaattagatgattagctttccatgggagtatagctcatttggtagagctctcgaccgataatcgagcggtgactggttcgagtccagttactcccaccaaataacaggttcttagtataacggctattatgctgggctccaaacccagtgatgagggttcgattccttcagggcctgccaaatttgcatccatcgtatagcggatattatgtctggcttccacccagaagatgggagttcgattctccctggatgctccaaattactccgtatagctcagcctggtagagcgctccatttgggatggagaggtcgaatgttcgagtcattctatggagaccaaaattaacggtatgacacaatacaagatggtgtaagctgagtagcgggattgcagtctcgttcagatatgctatcgagtatgggtgatatattaaacacatggattctgcaaagtcaatgtgactcggttcgaggccgggcataccgtccaatcacttgccattgagaattatattatgaaatattacggcttcaaaacatcccatttcgggaaagcatatcgtacagaaaacattgatagacgtcgagcatattacgaatcactgcataaagcaggacgttctcgtgcacgacaagaaggccaaaaacaagcgaaggaaatagaatgaatatttttattggtgttgcgaataaagtaaatgctattacggtgaaattacaatggaatcgtccaactaattttgctttaggattatgtaaatctgaacgtgatttaatgcttcatgctgattttgcatatacttttgatgaacgcaaaggtatgtgggtatggattaaatgcagatacgaagcattaatcaaatatgagtacttcagtgagcgtgatattcaagaagttattgcttatcattctggctgtaaagtaagtaaactgcgtcaagttattccgtttactaatgcttcaaatgtagaagagctaattactgattttaaacgaatttatcaggcgaaatatgatgaaagattctaaaggtcgagacgtacaagttggtgatatcgttttctacggagaacgtacatacaataagggcggtcgtggttctatgcgttgcggtcgtattacagatattgcttcaggcctagctaaagtagataatgactacgttgcaatgcgaagcaaatcattcgttaaggtttctcctatgttcgcaacaatgtgggaaaacggaacgattttcgagatttaatgctacaagaataacctgttattattactacatcaaaacaaacaaggaaaaagaatgaaacgtatcgcactgattgttgaccaagaagctatgttcgctgctaccggtaaatttcatccggtgagtaaatttgttgctcgcagcgagaaaattgttggtctggtagaaactgtcgcaggtgatgtaattgtttctattaaaacgtctgaaatttcgccggtggttaaagtagcagttgaaaatgacttctgggaagtagctgattttatgtgtgagtaattctgcctagcaggtggataagcccgacaaggcgccctcttcggagggcttttataaaagtcataagatttctataaaggccctgtagctcaattggtagagcgttcccctcataagggattggttgcatgttcgagtctttgccagggtcaccaaattcgtgtgaggagttatgaaaaccattctcgttagaattgacatgtatttcaattattgcgacagaaatttaactgaccatgatttagaacacgggtttggattaaatcctattcaattattcttgttgaaaagtggtcaacagattgttcttaaagaatataccttagaacgaatagatatgaggaatgtataatgaaagttaaatttggacaagttattcctaaaggcttagcaatggcaattaccacttgggaaaatgatgccgatcggtattctacccaaatggtttatgggttagaaaaagaagagattaatcaagtaattcatgttcttgaatggttctcttctaatggtcggcgtggtgaataccttggaaataatgattacaaccatgaagcaattcttgaaaagcttcatactgaacagaagtatgtaactcctgaattttccaagaaattctttggcgttgatgttcctgcatatgattgttcagacgaagagtttgatgcttatttagataatcattattcttgttcaaatgaagttatgtatgctattcaggcttggctaggtaatccaattgaatatgactatgatttcatgcgagtatttgagaaagtagaaatctttgacattaaagaagaaattcgtattcctgatgctccggttgcattccatattggaattacgtataagcagaaagaaagcccattaaaagttgattggttgaaatacgtgaaggaaaagtaatggatattggttcaggtagttcatatccatcatgtgctttgagtaattttgctcctcataaatttatctatgatggcgtagaatgtgcatcaatggagggattcttgcagtccctcaaattttcttcgcctgaaatgcaagcgcatgtgtgtacattagttggtaagtctgccaagtttaaaggtaagaagaaacgttggtggccaacccaaacgctttactggaagggtgttcctattcatcgagcttcagaagcatatcaaaatttactgacaggagcatacgatgcacttagtaaaaatgaaggattcagaaaagctttggctgctacccggaatgctacgctcactcacagtatgggtaaaaataaaatttctgaaacgattttgactgaacgcgaattctgtaatcaactttatcgtttaagaaatgctataaataatcagtaatataattatcttgttcagtgttgaaatcggtagacatggtgacggacaccttttgagctcgcatattgcatcatatgctggcgacggtggtaaatcgccgacggaatcagtcgtgcaggttcgagtcctgcctgaacaatctcggggcatagctcagctggatagagcagcggacttctaatccgcaggtcgaaggttcgaatccttctgcctcgaccatttcgcatcgatggtggaactggtatacacaggagacttaaaatctcccgccgcaaggattgagggttcgaatccctctcggtgcaccaagccgatttagctcagctggtagagcgcttcacttgtaatgaagatgtcgcgggttcgactcctgcaatcggcaccaaattctggtatgtgatagctcaaataggtagagcgtgaggccctggtgctgaatggtttgtaggttcgattcctacccataccaaaaattttatgaggaaaatatgaaagtatatgttgtagtagaaattagttggaacgttgaatatggatatgatgagtattctctacccaaaagaattttccataccaagcttgaagctgaagagtataaagaagaactaaaagcaaataactcttattccgaatatctagttgaagaatatgatgtaatgtaagttttaggaagagttgcagctctcctattaagacgtcgtgttagaagagaaggttagcccttatcggcaaggttctgaggagtcctccggttgttaatcaccctgcaaggtgacacctccacgacgctatacttctttggatgagactgatgcctccgagtccaaaggaatgaatttcgcaggtcatctgccagtaggtgatgctgtcgattctcagagccctgtcttcggacggggctttttagtatacgataataccgcaattatagcccagataccttctagaggtcgtctgggcatttctatatccccagctgtataaatccattctactctttagaaagtccttccagattccctaaaattatttgaaaatttattcacaaagttgtttacatcagcagtaaactcggttactatagcttcatcaaaacaaaacagagtaacggagaataaaatgtctaaattcaactttatccaaattgaacgtggttataatcaatacggtactcctgatcgttatcgcgcgatttgggttaaaggtgaacatgagaatgcagtgttcaacgtagcagaaacccgtgaactgaaagatttgattaaacatgttcgcaaagattggcctgctgttgaagagtactacgttcgagtttaccatgaagaagctgctacggttcaaatggctatcaagtttgctaaaactgttcctgctttggttaaacgaattgaagcggtaattaactgctaataattttggggagttataatgaactccccacctactgaggaaattggtatgtatcaagataagttgagattagtagcgcaaacttattttaaatcttttgctaggctgtttggtgaaactccaaattttccatccggtgaagaacgaatggctgctctgaaaactatagagaacctggtgatttcaacttacaatgagtttgccgatgacccggcggttaatcgtcttgttgatatcgcagttttggacaaaatggaggaactcattaatgcatacaaatgaagttccaaaaacccttgctgatattcgtcttgaagctaaaatagccatcgagcgtttaattaaagcaactgtagaagaaggcaaagagtctgtacttattctcggattagaatcatacgttactgattacatcgagatattcgagcgcagcaaaaatgaacagggtctaatcattaaaccatatgtttatgattggattaatccgtacgaataaaacaccattaactattgaaaggaaataaaatgtctattctgaaaaagctcgttgaattcatccgttctaaattcggtacctttgttgcacagaacacttctgttgaagaccagtataccactgcggcaaatcgtattattgatgaaatcactaaactgcgtaccacgcatgttaaatcggtaaatgaagaaaagcgtctgctgaaacttgctgacgaaaaagaccaggcaggtgcttccaaagagcgcgaaattcgtcgcttgatggcagaaggtatgaatgtagaaacccatgctaaactgggtcttctgtatcgtcgtactgctaaggctttacgtgataaagctgccgaatataaagaaatgcgggcccaaattgaagaaactgtagttaagcttgatgaccagcgtcttgatttggcagtgaaactcgaatacatccgtgagacccgtaatgcttctgctctgggtattacctctgctgatgacgtgattgaaattgcagaactcgctaaagtagatgtacaagacatcatgatgaaagttgaaaccttcagcggtactcagcctggtattgaaaccaccactgctgatgtccaggaatatctggaaagtctgaagtaattttaccggggccttcgggcccctaacttggataataaaatgttatatgaatgcgctggagatattccaatggcaacacctcaaattaaagaattaattgcagcaggattcccaacagaaatcactgatattcttggaaaatttgcttatcctgatactcggcctgaaaattggaaaactcgctataacgggtataacaccacagttttaccgcgggctatcgttcttaaagactattccaagctgaaaaacttaatttctaatatttcgtctatttccgacggagttaagcttgtagatatctttgcacttcggtacggaatttattctttcaacgattctccatcaaatctaacatcagctcgtactaatgccgatggatattttacttctagctccacaacatatacagtagttatcgagattatctataataaaactagttatcgtctcggtattaatctggttaaatacgtgacatctcaggatgattatagcaattatttaaattactgcgttaatgaattaccaccaaaagtcatgggtatgtttgactctaataatttggtaggcaaacaattaatcattgatgaatttatcaaatactgccgtgagagggtgcagaaatgagtaacttatatctgccaagtgaacctcccgtttataattatgtctataaatttgaccaaactgattatgttctaattccggggatggtctgtgctgctggaactatgataacgcttatcataatcgacgcaatgaatttggctgaaattagcagtacatcattagtgaatgtaatattacttacatggggattaataggtttacttggtctaggattaattgagctatttcgttgggtaaagtatgttaagcataactgtgaacgaaaggctgaatggaaagaacagtgcaagaatttaactcttgaatggaaccgcaaaaagtcgtttgagtttattaaagaggtgagaagaaaatgaatgaatgtaaacctgacgggttttggaaccaagatgggctggcgccagcttttggaatcgtgacatggattttatattgtgcttttgtaattgttggagggacattctttggattgaacgtctcagagtttatgattatgcttttatttttaggtgttttcgcattcagcctcatgtggatgctaattatcgcgttgattaattgctgcacatttttagcttaccgtatgaaatacaagaagtggaaagaaaaagaagatttcaacacctggattaggagctgcagaaaatgattaaaacttgttaccgtggaatgattaaagatgatgatttcttgtatttcttcctatttctgcttatcctgttttccttctcaacatttgttggtgttgggatattctggggattctacttcttttcaccagtatttggtgatacgctgtactatctaggttggatgtcaggggttggaacttggtttgcaatgcttgctcgttggttgcaattcgtttcccagcggcagcggggtgtatttgataaacccaaagtaaagaaagaaaaatctaaagatgattctcgtaatgaaactttgtcctggattaaggagatgaaataatggctgttgcagtgcatgtaaaatttgaaaatggtgatactcgccttctgtgttacagcgataatgaatcactgagcggtatcgagatttcacttaaagaagaactgcttggtattaatggacctatctgtgatttctcggtagagggttcatataattgtgatggtgtactagagtctatggtctatactgccatggaagatattcttgaagaaagttggaatgaatgccaatgaaagagctcagtgcaggaatcttattctttaccgatgacaaacggcttttcatgggtcgtatgacaaatacatatgtccagggcagaggctctagatgggatattccgaaaggacatgttgagcctggtgaaacaccaaaagaagctgctattcgcgaatgccaggaagaaacagggtttactgggtttgaccaggacctcttatatgacctcggacgacatgattatgccagcaataaggatatccatttgtttggatatatgctccctgtgaacccagaagtgtttaagaattgttgttgcacagcttaccataaagatgaaaatggaatttctttcccggaaatcgacgcatttgctttaattaaaccttctcaatggaaatatgtgatgggaccaagtttgtataaaatcatgacacagatgtatagcacagcccagtgaggttactatggaagaagctgttgaattaggcattccacacatttataagcatgaactacgatttgttcgtgacggaagatggattagcatatttcatcctcgagataagttgtcacgtacactaatgaagtcacggtatgtcttcggtgacggcgagtatacaaaatcagcatattatatagcagaacagctatatccgggatttagtgaattgcccgaggacgataaaagagattatgtatggtggaaagataaatggacgccgtatgaaaattgcagcattgagatgtttatagccaagtgtagggccaaataaatactcctataatttaataggaggtccttatggatatttttggcatgttgcgtatcgatgaaggatatgacagcaaaatttataaagataccgaagggtattggaccattggtattggccacttactgactaaagacccgtcaaaatctttggctatttctaacctggacaagctggtaggtcgttctactggtggtcaaattactcaggctgaggcagaagtaatttttgccaaagatgttgagaaggcaattaaaggtattgttgctaatgctacattaaacccggtatataatgtattagatgatgttcgtagagctgctctgattaacatggtattccaaatgggtgtgtctggtgtagccgggttcccagcttcaatgaagttattactcgctaaaaagtgggaagctgctgccaaagaactggcaaattcacgttggtatcgtcagacaccaaatcgtgctcgtcgtgtaattgaaactatgcggaccggaacttgggccgcttatcaaggaaaataaatgaaaacttataaagaatttttaaatgaatcccgtttagcaacagttggcgtaatgactgaatctgttggaagtaatcttctgaaatttaaaaaaggtcagaagatgaccgccacgctagaagatggtacagaaattgaaatggacgttgttggatataactacgtagtagacggcaagttatataataagagccatgccaagtttgattcatttgatgatttcacctcttctattgaagatgagtcttctcgcaaagcagtagcatctggcgatgcacgctccttaatggcacttggtcatgagcgtattaagtctaagcagaacaaacctggtgaagataactttgcattagtaggttatcagtctggtaaaacttctaacggttatcagcgtactgttaccatgtacatgcgtaatggcaaaattgcgttcgtaaacgatcgcggcgctattcgttacgctaaatcaattaagtaagcaatttcctaataaagccgaacacgacctctcctcatgaacgtcgagtcctctgagtgaagtagcttttcctacctgtaataaggtcgagcccaagtgcggtaaggggtttacatagtgtgtcgatggattaaacatgtgccaaggaatggccccatttaatttaaaacttttacctttctgttggatttaaaatgaaaacttacaaagaatttatcaccgaagcaaaagcaccaaaagtattccaaatcggtgcgcaaggaaatttagacaaagaatacgttgacgccatcgtaaaaagcattgttgcccaaggcgtgcaagtagatgcagttgaatttactaaaggcagcacctttaatattgttgtatccaaaggttctttggctaaagttaaaaaggcttggggcgttatggcagcttaccaggtagatgattctgctccgggtccaaaagtacgaatgaatacccttaagggaggccgtgaatacgtttagaccttattgtctatacctattaagaatattactaggactaagcacgcgccaaggaatggccctttaactggaatctaaaatgaaacacttaactcccatttatttgaccctgatgcatgctttcagagacgctgcagacagacgattgaataatcccaactacagtttttatgaaccgtcttgccttatgcgagagtacggtacccttcgtctagacggtggaagacaaaccggaaagaccgcagccttatgccaattcgctaccgattggttgcttgaagatggttcggttataatcttatctactcgatacacacaatcatctgaactgatggaaggtattctacgagaatataattcatcgcatttaattaataaattaccggctaatgagatagctaaatcaattgttccgatgacaatcagggaatttctatccaatgattcctcttacaagtttaggggaagaaagtttggaagagcattaattatcattgaagaaccaatgaaagttcccgatatgatgaagttctatgacatgtaccaggaagctatcagatggtctatgcctaatgataccttacctttatttttcgtgataggaatgcaatgatgacacagacagaaattgttgatatgattacagtaatggaaaatacaggatttgccgatatgaagcaattaataacaatggttacggctggcaacctgcttgagtacaagcgctacaagtttctgtctggtccgtttaaaggtgcagaattcatttctaacgctcctaacacgaagtggatgaatcgctatcctaattttagaattgagtttatatctggcaagctcaaaggcgtgattagttcaagcttaatcacatatgaccaacgcattcaagagaaaacaatgcaatggctgaaattgttataaggtgtcctccacatttagttgagagcttctgtgaatggttcagtaattctggcgagcaagatttctatgaagcccatcagaatggaacttggaatgaagccacaaaacagtgggaagaagctacaacgtatataggcactcgtggatatggagttgacgagcctattgaaattgtagagtacgataaagaaactgatgaagaaatactttatgctaatgatgccagagaacgcttatggcgagaatctgaattagaagcagaagttattcgtcttaaagaagaattaaaaggaccaacgggttttgctacatggaaagacgctgctatttctgaacgtttagcacgggtaaaattaatgccagaaggtaaaatctcgtacttacaggctgcatccaagttccattctactgagtggaatactatggacgtaattaccgcatacatgcgcggttggaataaagaatctaattaagaggaaatatgaaagcatatcaaattcttgaaggtgaacttaaaggcaccatttacatcgaagatggtgatgacgcacgagtaatcgtttcaaaagttcttaaagaagatactattacggatgctgaaactttttatggctacaaggcgcgtgaagtagaaattgaataccaaccaacagtaaaaattgaaggcggtcagcatcttaacgttaacgtgctgcgtcgcgaaaccctgcttgacgcggttgagcatccggaaaaatatccgcagctgaccattcgtgtttccggctacgcggtacgcttcaactccctgactccggaacagcagcgcgacgttatcgctcgtactttcacagaggcactataatgtcaatcgaagatattaaaggatacaagccacataccaatgaaaaaattggtaaagtgaatgctatcaaagacgctgaaacccgtcttggattaattttcaaagcgttggaagaagaacatgttgaaaagtacatgagcttagatgttagtacaatgagcgacaaagaatttgacttggctaatgaacgcattactcaaattcgcaatgctattcagcacctgaaggaagcctcaatgtgggcgtgtcgttcagtgtttcagccagaagaaaaatattaaaaagtagtttactttccttacgggccatgatactatggccctacaaacaaaggagaatgaactatgtcaactaacccagaagtattcattcgcagaactaaactgcgtcgtaagtttgaggaagcttttcgctctttgaatttatcagttcgtgcccgagctaaggctgagggcaaagagcctttcttcactaagtactctgatcatttgttggaccgtgctatccaacgtgaaattgatgaagagtatgtattctctgttctttccaaaattcctaatcatcttaaagaaattaatgaattcttagcaatgccttggcttccaattgacccaaaagacattgatgaaaacatcgagtataagccaatgcggttagaaattacggatggaaatctgtggctagggtttactatggatattccaagaccgggaaaaggacctagcataaagtgtcgtatggcattcgttaatgataaacgattgaaaggtaaaatcagcacaaaagttatacacattaattgaggtaaacatgaaaaaagcgcttatcggtctaatggccttgtgttcaacggcctttgggtctgagccaactttcagtaatgttcaacttgacaacttgcattacgcatataattttggtgaacaatatcaaaaatccggaaaggaaaaatctccacataaccgatatgataataacggcttaggatatataatggctgctatatcatggaaagaatcttcggcaggagccaatttaaaagcaggaaaggggcatcattcttatggggtatttcaaaattacttgcctacggttaaagccagagctaaattagaaggcaaaaaccttagtgattctgaaataagaaaaatgcttaaatctagacagaattccgcagaatgggcatatattgagctttcatattggttaaatatacataacggcaatatgcgaaaagctcttgctagttataatgcaggatggaatgtcaaaaggggaaactcttatgcgtcagatgtcctagagaaagctaatttcttaaagaaacataaaatgctacatacaaaggtggaataatggtaaagtacgccgcgcttcttggattggtattggcattctctgctaatgctgaaaattcaatgacagattcacttcgtatcgctaaaacattttgcaatacgaactctgaatgtgttgatatattagcgcttgaattagattcagcattcagcgatggagtaaaagattcacgtagcccggcccagtggacaacactaataaatcgtaaggctaagagcatgaaagatttatgtgtcaatgctcctaacgaaaatatatgtttaatgtatcgtgaccaattaatggctcgttatatgtcaggactatcgtcaaaatgaaaaaagcagctattttattatgctgcgcattttcagttaatgcctgggaaaagctcccaggctatcctgaaactgtgcttgcagcacaggggactaaaatagaaagtaatggcccattcaagaacaacattgaaatagcatttgttcctagcagtagaaaattgctaatgtcattttataattatcaagataaagatgaccaggtaatagttccacttgtcgaatataacgctcgtggatgtggaatgcagagtgacggcgtttctattgacggagtaatgcatcctaaagaacacggagtgctgaaccctatccttaattgcaacaatgctatatttttaagagtatacaataatcttaatgaatatgcaacttataaaattccataggtgaataaatgattactggatatatcaagggtaatattgtagaactattcatgaagcatgaatgcgatattgctcatggatgtaattgctttactacaatgggtgctggtgtagcaggacaacttgctaaagcatatcctccaattctcgatattgacatcgatgaagaccgttattatgacaacaatttagctaagcttggaactcatacacgagctacccataagaatggcactgcatattgctataatctatacacccagtatgctccaggtccaaatgttgattacggcgcaatttttaatgcattccatgaactaaattctggtcgtattgtttataatcgtcctctatacattccaaagattggtgctggtattgctggcggtgattgggaactaattgagaaacttattaatttagcaacccctgatattgacattatggtggtagaatatgaagaagctaaaagctaaatccgtcttgttagaggtaaatagatgattactgaagagcaaaaaactaaactgtggcagttgattgacgattatgcaggtgccgagcaagtagtagctattagtgccatttacggaaatggtctacctgaagaatacgatgaactcattcgttctaagaatgctatttctgattttatggagacactttaatggcacagctttatttcaactacgcgagtatgaatgcaggcaaatcagctaaccttcttacagcagcccataactataaagaacgaggaatgggaactctcattctgaaacctgctattgatactcgggattcggcaacggaagttacttctcgtattggtcttcgtcatgaagctaatacagtagacgaatctattgacatacttgaatttttcaagtgggcacaaacacaacgtgatattcattgtgtatttgtagatgaagcacaattcttgactgctgaacatgttcttcagctatgtaaaatcgttgacttgtatgatgttccagtaatggcatatgggcttcgcactgattttcgcggcgagttattcgaaggttctaaagctcttctttctgtagccgataaactggtcgagcttaagggggtttgccattgtgggcgtaaagctactatggtagctcgtattgatgaaaacggaaatgctattaccgacggtgaagtagtagaacttggtggtgaagacaaatacgtttctctttgtcgtaaacactggtgcgaactggtaggtgtttataatgaagccaagaacgtataatactctcctgatgctagttttaagtatgttattcatttggattggtgtggcagcatctatacaaagtgatagacgagaagaaatgcaaaatcgtcttaattccgaatgtaaagtattggcacagggtaaagactttattgctaatatgaatgggtgttatattaaacatgagtagcctatttgctatagcgggtggtatagtactagtactcgtgattgggtttttactatacgtaatattgctttcgttattggtttaatatgaaaaaatatgtgatgtgctatcgttgtcttcatgtatatgattacaacactgctccaaagactgctaccaagcgtcttaaaaccaaagaacctgaatgtccaaaatgtaaatgtaaggtcatctattcatgaatattaaattttttaaatcaggattttactatcgttgaggtactttaacttaacgaggtaataatgtctagaacaattcgccgtaaaggctggcatgtagtaaaatcttccaaatggaacgatcagaataataacgaatttgcttatattaaaagctataacgaatacgttaaaactcagaaagataaagaaacccaacagaaatatgttgaactgcgtatttctgaaaatcgggaaagaccgctagaggccaagaaactgattgctaaatcaaagcgcgatggattctggaaaactctacgttggacccgttatgctatgccgatcccacgtctatttcataaagccgaaattaaacgcgcattgaagtatgacgaagaatataactgggacgaagcaggtgctagaactattgagcaaggcatctgcgaatggctttgggattaagtaacacatacttatataaatactattactaactgatgaggtgtatatgcagcatttaagtgaaaagcaacttcgtaatcttactgtagaacaactggacgaacttcgtcgtgagattgggcatggtatttcgcaccttcaggaagaaattcgtcagcacagttcaaaagcagattatacccgtaaacgtaagctggaaaaatacctcaaagaagttaaggctgtacttcagcacaaacgtaatactggacaaaaataataggaggccgtatggcctttaatcacatttgcttagccctagtgttgggctgcgggatttcattcccagctgcatcacacgacgacatttcggattataactcgtatgttgagggcgctctacaagtttatgctaaatttaaggagcctagtaagcaagagtctgaacagttctattctttcatacaaagtaaatggaagagcgagtcttgttctaaagactgcgattctttaggacgttcagcaggtgaagaatatgctaaccgcatgaggatacaactcgataatgaagttcaatgattttgtaaaggacggtaaacttactccacaagatgaattcatcggtttacttatggcgtctcaggcgtattttcattcagcgcattttgataccaaatcgtatgccagacataaagcgtatgaagttttctttaacgagattccagatttgatagatgcttttggtgagcagtggttaggattctcaggtaagagttatacaccggctttgccatcacagaaagagctgccaaaggacaccattgaaatgctagacctcattctggctaaggccgatggtatctacaagtcagttcctgccgccctccaaagtgttctggatgacattacaggtctatgctacaagactaagtatttgttatcattgcagtaataccctccgcctccttcgggaggcattttcttttcaaaaagttgtttacttcccttcattacatgatactatagacatatcaacaaccaaacgagaaaaacattatgattaagttaactaccgagcttcaacctggaaaaatcttttatcacgtgtgtggtgttaatcgcactgaaaccaagtctggttctatttcgcgttacattgttgcatcaggcacgtatgatgttgaacttggtcttcgtggtgtgtattcgcgaaaatctcctttcttccaggtgatttgcgaatatgaaaactatgctggccaaactgaaagttattcaactgagcgttctgctcatgatatgggcgtattcaagccaggtgaaaaacgttcggttcataatcttaatcgtgggttttggacgcgtgaagaagctgaacagttcattaaagaactgcaagaagataagttcagcgatccagatgaccaagcatacgctgacagattaactcctattgaagacttccgtcgtcagaaagaatttgcggattcttatcttgattcctgcgattacgactactacgactttgatgatggcgaagaatgagaaacgttttacttatcatctacattgtggtacaataccagcatccgatgtttacatataatttggtgcaaatgattctggagagtttgaaatgaatggatggggcccatcagatgacggatttgcaactcgcgaagctacaatagcagacgggattgaatgggcccgtcttcagaaacaactccaagaacagcgggaatccgaagagttctgtgttgattgtgatgaggaaatcccagtagctcgtcgtctgttggttaaaggctgtcaacggtgtgtagaatgtcaaggaaagtgggatacagtaatgacttctgcctataatcgtcgcggttcaaaagattcacaattgaggtaattatggaaagtattcttgatagtaccaatttagataatccgtacagcgatgtgcatgtaaaggttgtgaattcatatttcactaaaaagttgagtcgtatcgtgctaaaacaaggcaatgatataattcatcttgacactaaacaaattgattcattaattcaattcttgatagaggcaaaagatggcaagtaaattagtatgggacggaaaatcccgtaaaggcgatgcagtaattgaagatgaaagcccgcatgttattgatttgtatcttacggtattccacacgtatgaacataatactatcatcgaaattgaacgtgacggagattgtgtagctattgataaaagcgacgctattgaactggtcaaatatcttaccacaatgattccaactatgaaggactgataatgaatattaataaaaactcttggcatttcaaaatgaacctgtggtttaaatctgacaacatgtggaaaatgccaaaaactctatgcggatacttctggacaacagttcttcatgttgtgttttcttcggcgattattacattcatcggttctgttgcatggatgttcggttggccgattgtggcggatacaggaattctcgcttggataggtattagtttatctgcgctttggttaaatgttatagcagtaccagttggcgcagtagttatagcagcatttgtgcttttatttgcagctatagcgtttggatttatttttggtttagaaaaatttaaacactaccgcaatcagaaacagtataccaaaaaacttgctcgagtaaaagctggtcttcctgcagaagccgaaccatcggtatttgtccagtatttaaaagcccgtaagcggaaagtctgcccaatgattgattatgtagaaggtgataaatgaaacgttttattcgcacgaaatttgaagaaagccttattgaaaaacccttaaaggttggtgataaagtagaaattgggtttgataaccaaagcaatcgatttgagcttgaagttgaatttatttctatcttcaaatgcagctcagcgcatacggtatcgattttctttaaaagtaaagacagcaaaatcgtagtatattacgattatggtagccgagaaacaactactgtggtatatcctaaagatggttaccgtggaatgtatatcgatgattacctaaaagagtcttcagatgatggattttatatctgtaaacttttacccggtggttccaagtcggtaattaatctcagcagccttaaatacaccgtttacgagaagtgtaaagttaatgttcctcttgtagtgggtgataaattctctacaactaataactgctatgaagtactagcaattgcagcagatggaagcatgttttgccagaacgataaaggaaaagctcacgtgtttagtacaaatgacatctcgctcgttaaatctatgcttgatgttacagtaggtgaacccagtgaagaatgatcaagtttatattgtgaacggccttcgggccgtctttcgtgctaaaaccgaacgtggtataatttctacataccctattgccgaatttacttttgatgacggcgaaaaggttacggttaaatttattcctttgactggcaagtacagcggcaaagataatattgatttagatatatactatgagggcgggtcatggaaattgaaatcgtaactactaagaaaaaacttagtatgagtattgtaaaacaaatgccgctagcttcagccgaaaacattaaattcgcaatgatggacccggaatcacgggtcctaggatatatcaatgcatttcgctggaacagacttgacattcaggtggcaatcattagcacaggaattgattgggcattagttcctatgtatgaaacaacattacgtgaagaaacttgtcgtgagcagcatcctgatggacaagagtatcatactcatgaggtagtgtattattacaccagtcaaaaaattggtaatgtttaccgtacatcaaaaagaactacagataaaactcgagcagaagaagcagccaagcgttctaatgcattagttaaattcgctaaagggaatcatatttacttatgaaaacaatcgtaaaatcttattttggttcacatctgtatggtacttcaactcccgagtcagatgtggattttaaagaaatctttgtacctcatccgcgtgatattctaatgtgtcaggcgatgaaccacaccaatcgtaatactaacaacagcgcaaccaaaaataccaaagacgatattgaccatgagctgttcagcttaaagtatttcttcaagctcgctgctgatggtgaaactgtagcgttggatatgctgcatactccgccggaattggtagttgcatctgaccttcctgaagtatggaaattcattcaagacaaccgagctcgtttctataccactgacatgaaggcttatcttggatatgtccgtaagcaagcaggtaagtatggcgttaagggttctcgtttagctgatttgcataaagtcctggatgttatccgagatattcctgagtggaaatatgacgatcgtcctcagcagaagggtatcaatgagcgttggaaagtacaggatatcgcagagaaacttcctctcggtgaattcctcgaatggaccaccttcgttgaccacaaatcaggcgagcagaagttttataacgttctgggtcgtaaattccagacgactatcactatcaaagagatgaagtattctcttgagaaacttgatgctgaatatggtgaacgtgctcgtaaggcagaagctaacgaaggcgttgactggaaagcactgagtcatgctcttcgtgcaggtctgcagcttcaggaaatctatatgactggtgaccttcaattccctctgacccatgctaaaatggtcaagatggtcaaagcaggtgagttaccgttcaaagaagtacaggagcttctcgagtctgtagtagatgaagtagaaattctagctcatactgctgaaaataacggaatgcctaagaaagtagacatgaagttctgggacgatttcgtcgagaaggtttatcttgaaaaccacaattcttactacaaatgatacaatgaaggtcttcttgaattacggaagacctcataaaggtagacggtggtatttggaagcagtttgcagagagactggtcgtagagaaaatgctaaattctctgctcgaccaactcgaaaacaaatccaccgatttatgtcatgggccggagaagagctccggttctcactttattgggctgaaatatgattttactgtggagcgtagtagtgccaatcgttgttgcaataatttactttgtcgtgggttggtctgtctgtaagcatctaatcaaaaatggaaccatcgagaaagcaggagagtattggttttatctcatcttttggttccctgcgtttattgccggagcgattatcatgttcttccgctgggcaggtaaacttccaaagcgtatcgcagaaaacgctatcaacaagcacgcataactgaggagccttcgggctcctctttttgtttcaaaagaatgcataaagtagtatacaagctcgttagctgatgatactatagacctgtaccacccaaacagatacaatggagaataaaatgaaaactttagaaatcgttgtaaacaacattgataaagcctttaaagctgctgaagcccacggcgtagaatttgaaccaatgatggtaggagaagcgttctctaaacttgctatcatccgtggtgaaactgacaacttgattgattttgtagatgacttctatcttggttcaaaggtccgtccttactacatcaatgaaattttagaaaaataattaaaaagtagtttactttggagctgtagaatgatactatagctccatcaaaacaaaacagagtaacggagaataaaatgtcaactatcaccatcaagaaagggatttacttcggcaaagagatttcaggtacttatgagttactcggtgagtggttcccggatagcttaagtgctgaagattctcgccagggtgatggtaaagtctttgttgaactgaatggcaaaaagcgtggtgtttgggtattcaaagatgatatcacaattgacggagtagctgctaaaattgaagttgttgaatccgttgatgaaatgaaagagcgtatcaagaaacgctttaacgtcatgggattaatgactaacggtttaatccacgggaatattcgttctctgattatctccggagcagcaggtatcggtaagacttactctttggataaagcattacaacatgctcatgatactaacgctattgattacaaatcagtgaacggtaaaatctcaggaattggtttatactgccgtctttgggaatcacgtgaagcaaattcagttctgctcattgatgatgtagatgtattctctgatatggacattcttaaccttctgaaagctgctttggattcaggggagaaacgtaaagtatgctggagcactgcatcttctttcttggaagataaaggaattcctaatgagtttgagtttgaaggtactgtggtctttatcactaacgttgatattgaccgtgaattagagcgcggttctaaacttgctccgcatcttcaagccttggtatcacgttcggtttatcttgaccttggtgttcacactaatgaagagattatggttcgtgttcaagatgtaataatgactacttctatgttacagaaccgtgggttaagaaattctgaagttattgaagttttggaatttatgaaagataacgtaaatcgtctgcgtaacgtgtctctccgtactgctctttatattggtgatttcgttgcgactgaccgtaaaaactggcgtgaaattgctgaagtaacaatgctgaaataattttaatgggaggagaaatcctccctaactgaggaaaatataatggctactttaatttctaatgatgtaaaacgtgttttgtttaaaggcggaatgtatatcgttgatactcctaaaggtgatacctcttcctggactattaacgagtggattaattacattgatgaaaacggagcgtgggtacaatgagtttagcagctattaaagatattgaatgttggttaaacgatattaaagtatatccgcctggtcatatctttgcaggtaaacccaagggtaaagcagagaaagcctgtgaagcaatctgtgaaaaactttataagtttaactttggcgataagaaaaatgtattagctgaagtccattcttcttatcatgaactacgtgtaatggtaaacgtatttcgtgctcctccattcattgaactcaggaaagaatacgctaataaagtatttgatactttccttgcaaatgtgcaggatgcagtaaagcatttagacgaaatgcataaacaacaccaagatttaaatgcctattataagccttggcgtaaatcataccaagagcttaaaaaccgtattgaacttattcgttatgaggtgctaaaatgaaatgggtaatgacagaaagtgaagcctatgcagcgtatgtctctccagacgatcgccgtagtgagttgtttggttattatggttcatattgcgttgccgaagaagcagttaaggggcagtcttggtggggctcagatggtacagttaatcgtaagccaacggaactaattacattcaccgatgaaaatggcgaatcatggacttttcctaaaagcgctgctattagtgttcaggaagaaacacctgaagctaagcgtaaacggttggaaaaaattaaagaagccgctttggctaaattaaatcctgatgaacgcgaggcgctcggattatgaacaaagaatttagtactgctcgtatggtagatgcttttggatatccgtgcagcggatatcgtgaatttattcacccggaagttgaaaatcaatttaaagaagttgtaagaaatattttgctcaatgcatttaaaactcaaggaactaacccgagagatttaggcatttatcttgaagaagccatcagagacgtacaaaagagcgtatcggctaaacttcattgggctgaagaaaatattgcgtggtcaaacaagaaacgttctgatttaaattggcccgctgatcgtgaacaaatcgtcaattatgctaaggtgtaataatgttaaaaacctatgaagttaaatttaaacgctttattgatggcaaatgctatgacaataaagaacgttcaacccgaatttctgcgccgtcagcgtaccaagcagtatttcagcatgggcagaccaatggcgtggcattccctgagcaagacgttgaagatattatcttagatgttattgaggtaaaatgtgtttagtactatagtgtctatacatgcgtattacgaagggcagttaaatgctgcccgaaccaagtataaacgagggatggaggaatctgtggaatgtctcaaaggtattcagacgtttgcccagaagacccagaacctcatcttgatggaccgtaaacaggtctcattggctgaagagctaaaagcctctaagatgattatagaagacaataggaaataccaactgaaattgcttaagcggcgacagcaccagtcgccatggtttaacagtgatttccgatctttttaagggccttcgggcccttttgttgtttacatcttagaaaagccatgataagatagcttccgttaactaatgaggagattgaaatgaaagcacctacttggaacgaacttcaagaaatgttcaatactgaagaagcttttggaactatttctgaaatggttgagaatttagtagattctccttcagaagataatcttctgtgtttagcacagttcatcattgaaacctacatcgagaatcagaaatgacagtatacgtagatgtcttgatgaatcatggctggaaaatgagaggtcatcaagtaaagaattgtcatatgtttagtgacaaccttgatgagttgcacgctatggcagaagctatcggaatgaaacgttcttggttccaggataagcgagttccacactatgatttgcgcgatgttcgtcgcaagcaagcagttgctctaggagcagtagaagtatctcgtagagacgcagttctgctttggagaaaatttttcacaaagtagtttactttcggcgaggctgttgataagatggtctcgtcaaccaaactggagaataaaatgaaaactttaaccgagattatctctgcacttgttgaagaaaatcgtgtagcccgccaagcacaccgagcgaaagttgaaaaacgcgccgaggagttgaatgctggatgggcgaagacccgcttcggtcgtgaatactttgataaagttgtagctcctacttggggcaaagatgatcgtcctcatgctccctttgatggttatctttgggaaaatgaattaggtgaagttgaagcttatcacgcaggcagttacttgccatatgttacagaatttgattcactggataagcctgagtatacaggtgaccacggttggtggaaaatccgcttaactcaagaagagtacaaagaacttcgggagtatggttatcctcttgaagtacgcattccatataaagagtggaaattgcaagatggcacagatgttgttatggcagaagttagagctcataagagcatcttagaggctatccaggaacattcaaaagatgtctttgataatatattcaatgagctgaataagaataaaggggatgcaccggaaggacgagtgactgtctctggtacagtaacgtcagtaaaagtttatgaagactattacggcgtacaatgtaagatgatggttgtgcttgagaatggagctacggtttacggctcccttccaaaaagtattccgtttgaatacagaggcaaagtacagtttactgctacatttgaattagcgaaagatgataaaacacatgctttctataagcgcccaagcaaagttataatgcttgaggaataattgttgtataatgggttcagggagattttgagatactctttgagcccagtccaaaatagaggaaaagataatgaataagaatgaattaaagatgtttgtagccggtgaatttgataagcataatggaaagggcttgtcaaagcgtgagaagcacgtaaaggttttggcagctttacatgatttaaatccagctgcttataatgtagcaattgctggtaacgtagctcgtcgtgttctaaatagcatggcagcgcatgaagccaactatgttagttttgttgtagaaaacattcgtcgttctcgttggttaggtgcaatgtcagcagagaaacagctcaaaaagtttgctatcggcaatgctaaaatttacggtcagcgttatagctttgcggcaggggcgtttaaaactgaagaaagacatgaccgcagcgctgctcaaatcttctgctctgaatttaatgcaaacctgcgtcgtattcttaatcgttcaatttgcttacttaaaggcgatgaccgtgtgaaataccaggtatcttctactagttctagaaatcctaagggtgtttcatttattcgtgccgaagaacttgacaatgtaactgtacgaattcatattaatagccatttgtccagcggaaagtatccggcccgggcgcttttagcgcaagttcgtactgctttagaccatatggatgtagttaaaaaatcatgctgtaaacagcaaggtgaaaactcatctgttcttgaagtacatttggacccatttaagatttttcctaaaacattgagcaccaccccagttattgatgaagacgtagcacatatgtatctcaatgttattaagcctcttccgttaacaccagtaaatcatattgaaatcgctaagaatagtattactgccgaaatggaatcggttaagcggtttattgatacaaaagaagctgaattaagtaagcatgaattgatgatggcggatttagtcaaatcgcttaatgagtacaaagagcggtatgaatctctcgagtatgcccggagcttactgtgaaaaatcaattaaaagaagacatggtcgttgatgataacgaccttgaaattgagtttgagtatccacctgtacctgaatttaaaattgactgggatgcctgtcttgaaatggtagaccgtcgagaagctgcagctaaacaagttgtgccttgtgaaaaatgtggtagtattcaagtacagcttgttgattggacaaccgatattctgaaaatgaaatgccggacttgtaaacacagatttgagagaaaattaaaatgattactaaaactattactggtgctaatactaagttttttgtcgagtatgctaataacctcataaaagacaaaaactttgataacatcattgcagatatgattcttgacgcatacgaaagtggcatcgaccctatgcagcttaaagaatatcttcgagcgacaatggattttacagttcttaacatgatgcttagaactgatactgaattcaatgaaatgattgctcgtcgtaatgaaggcaagttcaatttgactgatgacgaagtattagcgtgtgctgctcacgaagcttggaagaaggtgattaaatgaaaaccactggcgcactttggaaagaattttataacgatgaagccttctgggaaggctattatcatgatgacactttaatactctttgatgatgttgaagtagaagaatatgaagacccttcgcctgatgcggtagtaaaaattgaaagcggatatgtttacaaaaccgatgatttcttcacttcccatgatttgagtcttgcaactttctttaaacgttggaaaaagaaacagaccgctcgcactatggtagtcactgttgataaagataactttgacgaagtatttgaaactatctctaatattcctggagtgaaaaaggtaaaatgattgacattaaattagatacttatgcagtacgccagttattcccagaaggtacagaagcccgtgctcaactgcagcagtcagtaatcaataacatcgttaaagaaatggtgttaaaagattcccagaataaactaaaacaagcagtacaatctgaagttaatattgcaacagtaactattccagatgtacgagctgaagttaagaaacagcttcagcagatgttccatactcgtggttggaatgatatgtctgccaaagaagaaatgtcgcagatgatgcgtaacgctgcccaatcatgtgctaaaaatgctattagcgaaatggttcaccagactattgatgatgctattgagcaagcagaaggtcgtattaagctgtctattgaaagcgctaaccgccgaattcaagaaatcattgttaatgcaatgaataagaatttcgctgatcaaattaacgctgccatcgccgctaaattggcagaacacttcccggtaactgctaatggataaaattgattttagcaaattaaatattcctcgcatgggaattcctgatgatattgccaagcaattagctagcgttcaaccaatgccagataattgcatcaaagatattctcgatgcgttagacggtaaaacattagttataaccactaaggctgaaaatggctcgtaaacgatatatggaagaagccgaacgagtaatgctactcatgtattcggtttattataatgagactggtcaaattgctaacagttccaatctcaaaggagctatgacccgtggaagaaattttgcccaagctgcaattgatggcgaagtcactaagcgtcttggaatgactaacgtttataaagcgtataaacacccgagttggaaccaagttcaagctcaagtatttaaggaaatagaagaagatgttcacggtttttggttacgacagcaacattcataagtgtgtgttttgtgataatgcaaagcgtctgcttgacgttaagaaacaagaatatgcattcatcaatgtaatgccagaaaaaggtgtatttgatgaagtggttatcagtgatttgcttcgtcgtttaggtcgcgaatcgcaggttggattaactatgcctcagatttttgctcctgacggtacacatatcggtggttttgatgaactccgtaaattcaaattcaatgcatgattatcgtggaaccctccttcgggagggtgatattgtagctctttattatggctacggtggattggaaactggtgaaattaagcagattaagaatcaccgagcgaaggtagaggtaacttactccaatggagttaaggttatgtctaaatggaaatacggcgagtgtatggtgaaattatgaaatacccaattgagtttgtttttcctgaaggcgaccaagtagatttagaacgtaatcttcgtgaagcaatgattgaaagagctatatctgatccgcagtatgctttcatgcaccaatggggtgaattctttgtaaagcaaggaaataccattcatggtgttcagtggagttatattggtcttgaaattgattacaatgatgctggtaatccgttagggtcttggcgttgggaagatgaagaccttggtccagactttgaagttgactgttcttggcatgaggaagaactatgagttatgatattggtgatttaaaagctccacgcatggtaactatttcagcagaagagcttgaacgcctgcaagcaattgaagaactgttgtgggaaattgaatgtgcgcttccatccggtttagaaagctggattgatgatgaagacttacagaagctgcgaggttaaaatgactaacgctgaattagtaaaagaaatcaagcatatcgctggcgtcactggcggttgggacgacaactacgatttcgaatatccgcctaatgcaccagacgatgatgcagaagaaatctttgttttagtagaagatggagattggacacaagagcacaagtatcaagaccgcactcaaatttggtattatccagcacgcggcgttcatttcatggtatcagaatctcgttcaggttcatatcatactgattggtattatagtcctcctgaagtagatatcgttactcgccatgaaaaagtggttactcgcactgaagttgaatggcgtattgaacacgattctgttaatgattctgaaccaacaccatgcaaagtagcaaaggtctaaaaccctggtatgcggctcgttgggaaactgtcgagccagaggaagatgctattcctgaagaggattataatacctctgaacccactataaatgaattacttgattatgaggacaaagtgaatgggacttattggtaagcagtttgaagtcattattaatgatgacgaattaacagagcaatttcctgtgtttattccgggatttaagttccaagtcatttctgtagttaatgaagatgaccttgaaatgtgtggaattactgctgtaattgatttgctgacaaacaaaatcattactattaacgacccaactccacacggcgaatcttggttctggtgtttctacagcgaagatacgatgcaccaaattaaagaaattggtcaaggtgaagatgttcctctgatttctgaaattaaacttaaccatttccaaggtgcaatcgttccaattaccagagctctttacgcatttgctggacaggaaaattgtgattcagaagagtatgctttaatgcaaaaagccgcggattacatcgtcgcattggaaacccgtcttggagttcgccatgtctaatacttgcatttctaaatcaattaaggttaaactcctagacctgtctgagttgcatcgccagattaaaagcatctttaaagaccatggaattaaagttggagatatcattgaattttcagatggttattatgaagatgaaattgacggaatggcatggaaaagcgtcaaacttgtagatgcgaatagcaacgaagtctatagttatcatacagataatatcactggaatttttgcgttctgcacttcgtactgtgttaaagaatcatctaaaaatatgtatagcagttactcgttaatttagctataaatactcttatctaatcgctgaggtaagagtatgttattaaccggtaagttatataaagaagaaaaagaaaaactatatcaggcacagaacggattatgtccttgctgcaaacgtcctttagatgaggatattcaaaagaaccacctcgaccatgaccatgcgttagaaggtgacaatgcaggaaaggtcagaggcttgctctgtaacctgtgtaatgcggcagaaggccaaatgaagcataagttcaaccgctctggtttaaaaggtcaagatattgactacctcgaatggttagagaatttgctggtctatctccgccagaatcgtaaagacagtaatattcacccgcaatatgttgccgatatggctaaacgcttttcacgtcttggtaagcctgagatgattgctgaaatggaattgcatgggtttacatacgaggaaagtgatggaaaatcacaacttgcttcaaaatacaagaagcagcttcgtaagagtttaaaatgaatatcgaattagaaatccagggacttattaataaaaccaacaaggacctcttaaacgagaatgctaacaaagattctcgtgtttttcctacccaacgtgacctgatggctggtatcgtatctaaacatatcgccaatcaggtcattccttcctctgtaatggaagcacacaaagaaggtgttatccattttcatgatatggactatagtccagctttgcctttcaccaactgctgtttggtagatttgaaaggtatgttgcagaatggctttaaacttggtaacgctcaaattgaaactcctaagagcattggagtagctactgctattatggcgcaaatcactgcacaagtagcatctcaccagtatggtggaactacgtttgctaacgtcgatttagtattggctccttatgtggagaagacattcgctaaacatgtacgtgatgcacgcaaatatcaagtagcattagtaaaagattatgctatttcaaaaacagaaaaagacgtatttgatgctttccaggcatatgaatatgaagtgaatactctgtttagttcaaacggccaaactccatttgtgactatcacatttggtatgggaacgtcatgggaagaaaaattaattcaacgagctattcttgataatcgtattcgtggattaggacgcgatggaattactccaatctttccaaagcttgtgatgtttgtagaagaaggcattaatctacgtaaagaagacccgaactatgatattaagcagcttgcattagaatgtgcagctaaacgcatgtatcctgatatcatcagtgctcgaaataatagagcaattaccggttcagaaactcctgtatctccaatggggtgtagaagtttccttggtgcttggagagactcttctggcaaacccgttcttgatggccgtaataacctaggggtagtaacactgaacctccctaggatagctctggatgcaaattataaaagttcagatgacagtaataaactgttcaaactactggatgaacgtcttgatatttgtaaagatgctcttttaactagaattaaatcccttgaaggtgttactgcatcagttgctcctattctttaccaggaaggcgcttttggtgtgcgtatgaaacccgatgatgaaattcttgagctattcaaaaatggacgtagttcaatttcattaggatatattggcatccacgaatttgatatgcttacttttaaaggaagcggtaaactcgtcctgaagtacatcaacactaagctaaacaagtggacggaagaaaccggctatgcctttagtttgtactcaactccggctgaaagtctgtgctatcgtttctgtaagattgaccaaaccaagtttggtgatgttaagggcgtaactgacaaaggatggtacaccaacagttttcatgtgtcagtagaagaaaacctgtcgccttttgaaaaaattgaccgcgaagcaccatatcattctattgctaaaggtggtcatatttcttatgttgaacttcctgacatgaagcgcaaccttgaaggtcttgaagcggtatgggactatgctatcgagaagttggattattttggtgttaatatgccagtagataaatgtctttcttgtggttctactcatgagatgacacctactgaaaacggattcacgtgttcaatttgtggtgaaactgatccaaagaaaatgaatacaatccgtaggacttgtggctatcttggtaatccttctgagcgtgggttcaatcttggtaagaacaaagaaattatgcatagggtaaaacatgttagagaaaccaatgaagcaagttgattggaaccaacttagcgaatggggattgatttggaaaatcaacaaagaggttctgcacccgcttggaattgctataacccgtgaccccgaaagtggattatcggctggggctattcaaactgatgagccctggaaatatgatgcagaagtagaagcacgtaatgaggtaaggttcaatgaatttcgacagaatctacccttctgactttgtgaatggccctggatgcagggtcgttctttttgtcacagggtgtttgcataaatgtgaagggtgttataataaatctacttggaatgctcgtaacggacagctattcactatgaatactgttaaagatcttgcatcccatttaagcaaatcgtatattcaaggtcttaccttaaccggtggtgacccactttatccacagaaccgagaagagatttcaaatttagtttcttgggttaaagcaagatttccggagaaagatatctggatgtggacaggatataagtttgaagatatcaaagatttagatttgctacaacacatcgatgttataattgatgggaaatatgagaaatcactgccaactactaaaaactggcgtggttctgacaaccaaagactctgggtaagaaatggttctacctggacacatgattgaggaaatttatatgctgacttacaaaattatgtttactctgaaccacatggctactgaactgtttggaccagaatttctggctatgacagcattcatcttaactatttaaggaaaattatgaaattcattaatgctattcgtaaatttatttctaatgttattgcactggttgcattaaccgcaggtgctttcgtagctattccatttattgttctcatcattatttctgattggattaatcctactaagaaagatgaaaaactgtctaatgaagaatttcagaaacgagttaacactctgactgctaaactccaacaggtcatgaaatgatagaattattttgttgcgataagtggtacaagtttaaagaagattctgttgataaatggttaaataacgcatcgtcaaaggatgttgaattctacaacatgcttaaatttaagccatttttggtaacagctctgacacaggacgggtctgttgaacgagttaagaccttcaacggtgttagcatagatgctgatgattttgatcagtggtgtatacttaatgatgctgaccgttgttatctcgaagaagctactgtcgacaaaatttatcctatgactacaactgataagcttgaattaattgaaagattgatttctgagattaaggctgaactatgatagaaatctatggcatccctgaagaagtttggagatgccctggatgtaaagcagttcgtgacttgctcgataagctgcaacttccatatgagttctataatgtaatcaacgaggttgacggtcagccggtttatgaccgtccgttgattgagtcacttgctaaacgcatcgggtgctatccatcgcttgctattcggtatcctgtcatttttatggataacgttaagcagtatgacattccaacatttaaagccaatcttattgctgctgggcatgacccagatatcatagaagattaaccagttcctttctaaggtcatcttgaccaccttctgtatatttctatacccttcatttagaggttcctatgggacctctcttttatttttaaattcatttcacaaagttgtttacaagctagttgatgagtgatactatagctctatcaacggataacagcataccgtttaactcgagaggaaaatatgaactggttaaattggcaagaagctctagaagctatgagtaaaggctgtaaagtaaagcatgtgcattttactgatgacgaatacttcttgatgaagaacagagtcatctgtgatgaaaatggatatgatatgactcgctggtacaagggtgagtcttggcaaaacgaacattggtacatcgcatgaaaacttttgctgtaggtgatatcgtccgtaccagaatttgggatgggcttcaatttgaagtagttgtctacgtcggttcagatggggttctgcttcaccgaattaataatctgattaagtggcaccttgaacgcttcgtgaaataccatgaattcaatagctaccactgtactgtagctccggttgctagtaaagaatactacgatatgctcgaagagctaaaatctctcaaagattgatttgctacaggagatttgatttaaaatctcctctgtcaaaacaatcgttactgaggaaattaatatgtcccaagcaatcaaaaacgtactgaactcttttgcttatgataaagtatctgcaatgctggaagaaggacgttgtgtaactccgtctttgcttgatcagtgggaagttgagcttcacggtacgatgaaagaagaaggccaaaaaattggtaaagcccgcatccgtgaattagttgttgcttatcttctgtctgaatttggcattaaagcctttggtgtagaaccaatcactccgggtatcggtgaaatttctgaaagcactattcgtaagatgaagaatcaacgtaagaaaggcttccgcgatgttaaagcggttaaggcggcgaaatgatttcatatatcgtgtgcgcatctattcctaccggtgtatggcatagaaggattaagtatatccgggctcattctgagcctgacattagtcaagctaaacggatactcgcaaatcaatgggatgaagatactagcgtaattatcagagtatttccaattgattcatccactctagacagccaacttccgtctccgtcagagatgtggcaagaaggtttaaatgagcaagaactgcgagagtatcttgatgcgtaaggttattctatacacagaaatttttactaaccgttgggtatttgatagtattttgcttgctgataccaagtttgccgatgatattggcagagctagaaaactggcgtatgaattggcagaaaaatccccaacatttgtacgtatttcatacattataacaacttctgattatgtgtataaagtatcaaaagaagcattatacagattttgtaatgttatgatttcttctggaaaggcattaaactataatcaattggtggaaattctaaatgactgaagaacaaattgtagaagttggtttgcttggatggttcatatctaaaacgcctgatggcagaaacaatattgaaactcctaatggagaattcatcattgaagaagattttgacgcgttttggatttatgaacgctctggagagaatgaatacacatccgtggatgctttctctaaatttgaagatgctattgactcggtgaaagcatggctaaagtaaaccaaattatgattgtagtagaaggcattggcggatttactatagattcttatatgggtgtttggtttgacaatgaagagggcatgtattgggaaacgcatgcctctatgttaaatgaaactcattatgaaagtttatactcttcattcatggaaatgatgcatgaagtagatgaatctgattggtttgaacttagtttggttgagttcaaacgtatcatggaacagctgttccaatgctatcgtattatgaagggtgaactatgaaaattcaattgactcttacacatgaaaatattaaaggtgtgttctgtcttgaaaatagccaaataacttttgcacaagatggaacgtactggtatgcagaatcagatgatatcgctggttatggaatggagcgcgtatttgaagattttgaagccgttattgaagttccgctaaatttcacatataacgatttttatcgtatcatgatgaaattaattgcatgcgctgaattgattaagtaatgctttaatcctctcgcttcccaaatttgttataatagatattattaattgaagcgaagaggcaatatgagtaattatgtaaataacaaggaactgtataaatcaatctgtgcatggaaagagaagtgtcgggagtctgaagctgctggcggccctcgagtagtaaaacagaacgatacgatcggccttgctattatgctgatcgctgaaggtctgagtaagcgtttcaacttttcaggatacacccaatcctggaagcaagaaatgatttcagacgggattgaagccgcaattaaaggcttaatcaacttcgatgaaactaagtatgataacccgcatgcgtatataacccaagcttgtttcaatgcattcgttcagcgtatcaaaaaagaacgcaaagaaatggcaaagaaatacagctattttgtccataacgtgtatgattcacgggacgatgatatggttgcgttagcagatgaaacctttattcaggacatctacgataaaatgacgcagtatgaatccaccgcttataaggcgccagggtctgctaaaaagagcgaacctacaagcgatggacctaatctggaatttttatatgaggctgaagattaacctcgacgggtttttagaagatgtgcaagacctagacgctatcccttatttgctaaagatgtatttaagggaggtgcttgatcttgatattcacattgacccgaaaaatccacatgacgctgatttcaggtcagattctgctataattgaacatagttataattggactgatactgaattcacatttgaaataaattaccatccaaaggaataacatgaacaatattacccaggaagagcgcgacgagctgcaacagaaactaatggaagcggcagaagaacaagctattgctcgagccaacaaagttgttcgtaaaaaccgtcgtgaacttgagcgattacgagctcatgctggagacgcggtattagacaataatttccctgcttacaagtatgctattgaaaaactgcgtactattttaaaacaaccttttaatgatgagattattctgacttgttggaatacctctcgtaaatctgtttgggacattctaaatgctggtacaagtaaaatttaaacgtgttcgtaaagacgcaggatttactttaaacactgcgactggtacgatggcagtaaaggtagcagataatcaatatcgcgtgttaggctctaccgaaggatgtaagctaatagataagaactctcttgtctgggttgacaccttccaagttaaacggtggtatgaatggtaaatgaagagaactggggattcattgatttagatgaacaccctgattttattactagtgaagagaattgggatgtatgacgaatttgatgggttctaatcctggacatgattggccggaaggaaattacacgtgccggtgcagtaattgttcagaacgttatacaggaccaaagcgtagttacttctgttataaatgtgataccgctaggagagaagcacctgctcccgattatgaagcaattcataatgccaaggtagatatgcttagacgctttgaagaagctaagcgtatatgtgaagcagcgggttatgttgtatacaagaaaatttaaagggcttcggcccttttgctttattacgggaatggtaaaatatccaaaattaacaacaaaggtcaatatatgaagattaatattttaatggctcgcggacttgagggatgcggcgtaaccaagttcagtctcgagcatcgtgagtggttagtaaaacatggccatgaagtaaatatcatttacgctaaagataaagcgtttactcgtaatagagcacatagctataaagatgtaactattcctgtgtctctggcagatgactatgataagaccttatctctgcttaatgcatgtgacattcttatcatcaactcagtacctgctatcaatgctccagaagcagcgattgataactataagaagctcatagagaacattaaacccgaggttcgggtagtcgtatatcaacatgaccatagagcattgtcacttcgtagaaatgctggtcttgaagaaaccgttaagcgtgctgatgtactgtttagtcatagctcaaacggcgattttaataccgtgctaatggaagaatattttccaagcggcgggttgagtttctttgatgattctgactcagctcctccggtttataactttcaacctgctatgaacatcaaagcaattcgtgataagtattggaaagatttctctgctattgactttgatatccatcgttggattggtcgtactactacgtggaaaggctatttcttgatgtttgactttcatgaaagtcatctgcgtcccgcaggcaaaacgactatcttggaagggttagaacgcagtcctgcgtttattaacatcaaagaacgctatgaaatcgattattgccgtcattatcatcaggttaaaactggaccaggtctgaatcctcaggttcttgaccgatatgttaactctgaaatgcttgagcgtatgtctcaatctggatttggctatcagctgtcacgtcttccagataaattccttgagcgttcgctggaatacacacacttagaactaggtgcttgcggaactattcccgtgttccataaagctactggtgatgctttgaaattccgggttgatggaaagccgttgacttctcatgattctggcattctgtggttgaatgatgaaaataaaaatgaagtctttgaacgaatgaaacatctgtcatctgaccagaagctctatgataaagagcgaaataaagcatacgaattcctggtagaacaccaagattctgagcattgctttaaagaacaatttgagttaatgacaaaataagtaatgggccttcgggcccttttgctattcatggaataatataaaattaaactctactagagaggttatatgaaaattattcactcaggcgattggcatttaggtgtccgcgcagatgacccgtgggtacaggatgtacaacgacacggaattaagcagcatattgattatgccaaaaagcatggaattaaaactatcattcaatacggtgatatttttgacgttcgtaaagctatcactcataagacaatggaatttgctcgtgaaattgcagagtctcttgagaaagaaggaattaacttaattacgatcgtcggaaatcatgacatgcactacaagaatacgttgacgcctaatgcatcaaccgaagttcttggtaagtataagcatattactgttattgaaaagcccgtgactatggattttgatgggactttgattgacttgtgtccatggatgtgtgaagagaacacatcagaaatcatgaagcatatcaaagaatcgtctgctgaatactgcattggtcattgggagcttaatggcttttatttttataaaggaatgaaatctcatgggctggaaccagatttcctcaaaaagtacaaacaagtatggtctgggcacttccacaccatatcaagcgcagcaaacgttaagtacatcggaacaccttggacgcttacagcgggtgacgagaacgacccacgcggcttctgggttcaagacactgaattatcaacctttgatttcgtccctaatgaaatcacttggcacagaaaactgatttatcctgttactggaaaaattgactttgaagagtttcgtaatctcgcagtacgcattattatcactgcggtcgatgaagaccttcctaagtttgaatcagaacttgaaaaggtagtacatgaattaagaactgtttctaaagttgacaactcggttgagtctgaagatggcgaagaagtagaagttaaaagcttattggatttaatggaagaatatatacaagcacttgaagacctatcagcagatgatatcaaagccttaaaggttatgtctaaacagttatacattgaggcacaaaatcagtgaagacttttaaactaaatcgtgtcaagtataagaatataatgtcagttggccaagcggccattgacattcaacttgataaatgccaaaagaccttaatcacaggtaagaatggtggtggcaaaagtactatgctcgaagctattacttttgccttatttggtaaaccgttccgtgatattaagaaaggtcaattaattaactccttcaataagaaggactctgtagtagaactgtggatggagtatgatggtcatagtttctacattaaacgcggacaaaaaccgaatgtctttgagattttacgagatggcaataagcttgatgaagccgcaagttcaaaggactttcaatcctactttgaaagtctcatcggcatgtcatacacatcgtttaagcagattgtcgtattaggaacggcaggatatactccgttcatggggttatcaactgctaatagacgaaagctcgttgaagatttgcttgaagtgtctcttttggctgatatggacaaactgaacaagacacagataagagaaatcaatcagcaaatccaggttaatgatgttcagcgtgaagcattgactaatgaaattaaaactcatcatgagtatgcagaaaagcagaagaaactttctggtgataacgtagctcgcctgcaggcgatgtatgatgagcaagtgaaagaggcacgaggatataaagcagaattagaaactcttcaaagcgaactgcttgaactcgtgattggtgatgacccagcagagtcaattcaagaagttcaaggtaaaacctttaagattcgttctaaaattgaatcatactcaaaggttcttgggttgtatgataaaggcggtcattgcccaacgtgcttgcaggatttgcattctaatgacactctaatcactaagattaatcatcatgttgaagaatgtaataccattcttggcgagttaaagacgcgccagagtgaactggatgaactagctcgcgagtataatactattcgtacgcgtgcaagagacatcaaaaatcaaatgagtaatttgaaacagatgactttaactgcagttgataaagcacgtcgtattaaagcagcaattgataaagcatcacaggagttcattgataactctgacaagattgaactgctacaagaagaattagataaaattattctcgtcaaaactaatttggttatggaaaaatatcgtcgtggtattttaactgaaatgctgaaagactccggtattaaaggagctatcatcaagaagtacatcccgatgttcaataagcaaattaacagctacctaaaaattatggaagctgattattcgttcacgttgaacgaagagttctctgaaacgattaaatctcgcggacgagaagagtttagttatgcctcgtttagtcaaggtgaaaaagccagaattgatatagcattactattcacgtggcgtgatattgctgaaaaagtttctggtgttaaaataaactgtctgttccttgatgaagtctacgattcggccaccgacgcagaaggtgttaaggcaataactgctattcttaataagatggtagatgccaatgtgtttattatttctcaccgtgaccacgacccgcaggcatatggccaacaccttcaaatgaagaaggtcggacgattcacggtgatggaatgaatgagtttacaactggccagcatctgctggcctttcctgaagtaaagcgatatgtgttaactaatttgttttctgatgaaaagcacttagtaacagaagaaatgttacgagatgcttttacaggaaatgaatataatagagtcatgtccagcaggaatcccggttggatggttgaagattattacgattaaggtaaatataatgattaattttgttgatgtgaaagatatccaggttaaaaacgtacgtgcagattccaacccgaataaccaaaatcgtattcgtaaatcttgggttctggctctaactgaagaaactaaagcagctattaaagataagattaaagattccgaagctcgctttgctttctataaatctatcgatgatgaagtcgcagaaaaatggattgaactgatgcgtaagcattacaacgaatcaatcaaggctggtgccaaaattgttactgatcgtcacggtggcgaacgtctagaaaatgattactgtgtagatgctgatgagcaactcgttgcagcaggtcagattgttgcagaagaattaactgctacattcgcagcttgatataattatcctgaacttaattaaaaggtattgaaatgaaattctctaaagaaactctgaacattctgaaaaacttctccaccatcaactctggtatcatgctgaaacctggtaattttataatgactcgtgctgttaatggcacgacttatgctgaagcaacaatttctgataccatcgatactgatgtagcaatttatgacctgaacagtttcctgagcattctgtctctggttggtgatgatgcagatattatcatgcaggaagatggtaatctggcaattaaagatgctcgctcaactatcttctggccagcagctgacccgagcacaatcgtgttcccgactaaaccaatcccattcccggtggcaaacgtaattatcgattttaaaggtgaagacctgcaacagctgatgcgagtgtctcgtggtatgcagattgacacaattgctatcaccaatgttgatggtaaaattgttctgcgtggttataataaagtagaagatgctgcactgacccgtccgaagtattctctgacgctcggtgattatgaaggtgacggtaactttaactttatcatcaacatgagcaacatgaaaatgactgttggtgattacaagctgatgctgtgggcaaaaatgaatggctccaagaaacagactgcagcgaaatttgaaggtgcatcagcctcttatgtagtagcaatggaagcagacagtacctttgattttgagtaataacttcggggcttcggccccatctttaatctgaatgaggaaatataaatgaaattgacagtaaacgaagcagacttcatgtgggaacagaaatatcgtccaggtactatttctgaatgtgtacttcctgctgaagataaagaaattttttcagctttagtagctaaaggaaaaattcctcatttaattctccatagtacttctcctggtactggtaagaccacagtagctaaagcattgtgtaatgacattaatgctgaaatgatgttcgtgaatggttctgactgtaagattgatttcgttcgtggaccgttaactgcatttgcaagttctgcttctattgcaggcaagcagaaaattatcgtgattgacgaatttgaccgtgcaggtcttgcagaatctcaacgacatctgcgttcattcatggaagcgtatagcacaaactgtactattatcattactgcaaacaaccttgatggcatcattaaacctcttcagtctcgttgccgtgtaattaattttggtaaaccatctccatctgatgttaagccaatgcaaatcgagatgctcaaacgttgtctcgcaatttgtgaaaatgaaggcgtggtagttgaagataagaaagttgtagctgctttggtcaaaaagaatttcccagaattccgtaagaccattaacatgcttgatcattattcttctaagggtgtgattgatgcaggtatcttgtctatcgttctgaatgaccgtggttcaattgaagatgtcattgaagctattaaaactaagaacatcaaagaactccgtgctcttgctccgaaatatgcagcagactatacttggtttgtagataaactttcttctgagctgtatacaatggttactggcccaagcattatccgaatgtatgaaatcatcggtgaaaataaccagtatcatggcatagcagcttcgattgaattacatttggtttatatgcttattcaacttgttgtagagatgcagtggaaatgatgagtttatttgaagatgatgatcagtataacgagcaccaaatagcgtggttaggtaaagactggacgaaagtccaggaattatctgattcatataaagaaaaagcagaaaatcaattcttcacaattattgggtctattaacgaaaagcaagagcatttgaatatctcgacaatggattattcaaaattcatggttgaaaacgctctttctcagcacgctgactgcatgcctgcagtttatgttatgaaccttgtgggtcaaggactatctgaccaagcacactataactatatgatggcctctgttcctagaggtcgtcgatatggtaaatgggctaagttaacagaaaacatccaggatgcattgattcttcaagttataatgacatattacaaggtcaatgcgattgatgctaggatgtatagagagaccctggaagctaaaaacaagcttaaacctgctctcaagaaaatgaaaggtcttgtgactgatgaattggtcaagacaatcacgaaaaacgtgaaagaacagaaaaatcttaagaaaacagcattggaatggtaaagatgattgaaattacactgaaacagcctgaagacttcctgaaagttaaagaaactctgacccgtatgggaattgctaataacaaagataaggtactatatcaaagctgccacattcttcagaaacagggtcgttactatatcgtccattttaaagagatgttaaagcttgatggtcgccctgttactattgacttagaagatgaaattcgtcgagactcaatcgcacaactgctctctgactggggtctactgagtattaatcgtggtcaaactcttgcacagatgcagaataacttccgagtaattacattcaaacagaaacatgaatggactttaaaatctaagtacacaatcggtgcgtaagaaaagggcttcggcccttttactttataaaaatcggagtataattatcccacctaaagactaataactcggtctataaacaaaggaaacccatgaaagaattttatatcagcgttgaaactctaggcaatgacattgtagagcgttatatcgattctactggtgaggaacgcatgcgtcgtgttccgtattctcctgttatgtttagtcattgcatggaagaaacaaagtacaaagacatctatggcaagtattgcaagaagaatacattcccaactatgaaagatgcacgcgattggatgcgtcgtatggaagatatgggaatggaagcaatgggtatggatgatttcaaacttgcttatatcagcgatacatacggctcagaaatcgtctataataaaaaattcatccgaattgcaaactgtgacattgaggttactgcatctcaattcccagacccgatgaaagcacaatatgaaattgacgctatcactcattatgattcggttgatgataagttctacgtatttgatttactgcattctctttatggttctgtttccgagtgggacaagaaacttgctgctcgtttagattctgaaggcggtgatgaagttccacaacatattcttgaccgcgtagtatatatgccgttcaattcagaaaaagaaatgatgcttgagtacatcaatctttgggaacagaaatgcccagcaatctttactggctggaacattgaaggatttgatattccgtacatcatgaatcgtgtgaaacagattcttggtgagcgtgcgatgaaacggttctctcctctgaataaagtttcatctaagattatcacaaacatgtatggtgataaagaaatttattctatcatgggtgtgactattcttgattacatggatttgtataagaagtttagtttcacgaaccaaccgacgtataagttggatttcattgcttattatgaaaccaagaaaggtaaattagcatatgacggtccaatcaataaattgcgtgaaactaaccaccaacggtatatttcgtataacatcatcgacgttgaatcagtacaagcgattgatgctgttcgtggatttattgacctggctatctcgatgtcttattatgcgaagatgccataccaaggtgtaatgagtccaattaaaacatgggacgcaatcatctttaacagtctgaaagaacaggacaaggttattccgcaaagtcgttctcatgttaaacagtcatatcctggtgcgtatgttaaggaaccagttcctgctgcatatcgttatatcatgtcgtttgacttgacatctctgtatccgtcaatcatccgacaggtcaatatttcaccagaaactatcgttggacagtttaaacttcatccgttgggtgagtacattaacaagactgctcctcgtccgtctgatgaatattcatgttcaccaaatggttggatgtatcgtaaagatgtagatggtgtcattccagttgaaatcgcgaaggtattttatcagcgtaaagagtggaaaaataaaatgatgggtgccaaacgaaatcaagaactgattaaaaaggttctgaatgataagaagtttggaactatcgataaattcgcagaagttaatgtctatgaagatttctctgatgatatgaaagcagaactgctgacatataccgaagagtgtcttgacaaactgatgtttgaatgtaaacacgctgaaatcttgggtaacactaaccagttaaaccgtaagattctgatcaactccctttatggtgcattgggtaacatttacttccgttattatgatttgcgcaacgcatcagcaatcacgctgtttggtcaaatggcaattcaatggattgaacgtaaagttaatgaatatctcaacaaggtatgtggtactgaaggacattcgtttgtagtagctggtgatactgactcaatttacgtttgtgttgataaggttattgagaaagtaggtcttgagcgtttcaaagaaactaacgatttggtcgaattcctgaaccaattcggtaagaagaaaatggaaccttggattgaccaatcatatcgtgagatgtgtgaatacatgaacaacaaagaacatttaatgttcatggaccgtgaagctatttcttgtcctccgttggggtcaaacggcattggcggattctggaaagcgaagaaacgatatgctctgaacgtttatgatatggaaggtactcgttatgcagaaccgcacctgaaaatcatgggtatggaaactcagcaaagttctacaccaactgctgttcagaatgcgttggaagaatctattcggcgtatgctgcaggaaggtgaagaatctttacaacaatattataagcagtttgagtctgaatatcgtgaacttgactataaagtaatagcagaagttaagaccgccaacaacatcggcaagtatgatgatggtgcaggatatccagataaaggtacgccatatcatgttaaaggtgctttagcgtataaccgagctaccgtaggatttgaaggtataacaccaatcatggaaggcgagaaggtgatggtcatcccgctgcgtgaaggtaacccatacggtgagaaatgtatggcatggccatcgggcactgagctgccacaagaaatccgacaggaagttctagtgtggcttgaccacagtgttctgttccaaaaatcgttcgttaaacctctgacgggtatgtctgaagcagcagggttagactatgaagagaaatcgtctcttcttgacatgttcgatttttaaaaaagttgtttactttgccacaaggatgtggtaccatggttctcgaaataacatactgaggagattacaatgaaatcgttacttgctgttatcgttgctctcacgctgactggttgtcaaatgccacaaggtgatatcgtcccggcttcttctgttggacaggtgcgagcaattggcggtactgtaggatactatcgtgctagcaaccaggtctctgctgaatcgctcgcggtagagcgtcgtttggcgaaagaaaaagctaatcctaatcgccagctatctgcgatggaactcgacatgattgagcagaataagcatgagctggaagaaattaagcgtctgcgtaaaactcaaaaagaacgtacatgcactgctcaagcggcagcagtgaatgaccagattcgtttaactgattttgctaacggcggattgagttataatgagcataaacaacgtatggagcagttaaaatctctccaaaatcacatctacaacaaatgcatgtctaactgaggagattaacatggaagcagtatttggtttaatcattcttttcttcatctattttttgccgacctttgtagcttgcagtcgtaagcataaatcacggggtggaatctttatcacaaatctagtattcggttggtccattatcggttggttaattgcgctgatttggtctgcttctaacgcacagcagaatacaattattatccagcaagttaaataagaggtctcatgattgtaactccaatgacagtacaagatatccgtcaagaattcgctgatgctttgctcaacaaagaatttgtgattgataagacgggtgtgaagactattgaaatcgtaggtgcatcatttattgcagatgagcccctgatttttggtgcagttaatgatgggtacattgcccgtgaacttgagtggtataaatctcaaagtttattcgttaaagatattccaggtgaaaccccagctatttggaaagcaattgcatccaagcatggtgagattaattctaactatggctgggcagtttggtcaacacaaaactattcacagtttgctaactgtgcgaaagaacttatcagtaatcctgattctcgccgcggaattatgatttatacacgacctcaaatgcagtatgattttgagcgcgatggcatgagtgatttcatgtgtactaacaatgttcagtatctgattcgtgataataaagttcatgctgttgtaaacatgcgctctaatgatgtcgtctttggatatcgtaatgactatgcgtggcagctctatgttctggaacagttaaccaaacttctgaatgcatcaggtaaaaattattcagttggtgacattatttggaatgtcgggtctttgcacgtgtatgagcgtcatttctatcttgtagataactatgcttatactggtgaaactcatattgcaaagaaagactataaaggtgagtggaaatgattcagtttgtaattccaagttataagcgtgccggggcagttactgccctgactatgtttcctgaaggttatgttccgcatcttgtagtacgtgaatcagaaaaagaagcatacgaaacttggcacggtcatgctgctaaaatcgttactgtccccgatgatgttgatggaattgcaggaactcgtcgtctgattactgaaatgtatgcaggacaacgaatttggatgcttgatgacgatactaccattcatctgactgaaattcgtgaacgcgacgatcgccgtgttccacttggtgtcggcgaggcaatgagtcaagaggtatttgatgatatggtcaaatacgtagagactgctatggattgtggttattatcacggtcatgctcgcttgccgattttcaaaatcacatcaagctggggtcattatcgcgagaatagttttgggttcaccaatactttctacgatttgactaaacttaccgcagaagatattggttacggagttattgaccttaacgaagatgcttatgcttttctaaaattaattaacatgggtcatcctcatctggctctgtttaagtatctcgttaaatccggcaaagtgcagtctcctggcggttgctctactcagcgtgatactgctcgtcagaatagagcccttgaacagctacatgctgctttcccaaatcaagcccgttggaaatctaaagacggcgaaagacgtgggttattcggtgataatgaacctctgaaatcaattcgtatgtgtattaacactcgagtgaaatctcaggccttccatgaatttggtaaggtagaaccatatctgtgagggcgaaagccctccaaggacctcttatgaacatctatgataaatctgacgtagctggtaatatattcaaggctgaagaattcagatgcttcgtatgtaaatctgatgagtttgttcatgaaggaactactggctcagatggaatgcattgctggtggcatggcatgtgcgttggatgtaaaatacactatgaaatagatatggaaacagtggtttataacaccaagaagaaatggaacttctgataatagcttcaagaacaaagtaatataattactctatcctttaacctgtgagaaaaatataatggagacttatggaatataatgaatgtctgacttaaaatctcgcctgattaaagcatccacttctaaaatgacagcagaactgactaaatcaaaattctttaacgagaaagatgtagttagaactaaaattccgatgcttaatatcgcaatcagtggagcgttggatggtggtatgcagtccgggttgactatcttcgcaggtccatctaaacacttcaaatctaacatgtctctgacaatggttagtgcttatcttaataagtatcctgatgcagtctgtttgttctatgattcagaatttggtatcactccagcttatctgaaatctatgggtgttgaccctgaccgtgtaattcatacaccggttcagtcggttgaacaattaaaaatcgatatggttaaccagcttgaagctattgagcgtggtgaaaaagtcatcgtgtttatcgactctattggtaacatggcgtctaaaaaggaaaccgaagatgcactgaacgagaaatctgttgcagatatgactcgtgcgaaaagtctgaagtctctcttccgtatcgtaactccttacttctctattaagaacattccttgtgtcgcggttaaccacacaatcgagactatcgagatgttcagtaagacggtaatgactggtggtacaggtcctatgtattctgcggatactgtgttcatcatcggtaaacgtcaaattaaagatggtactgagcttgaaggatatcagtttgtcctgaacgccgagaaatcacgtactgtcaaagagaaaagtaagttcttcatcgatgttaaattcgatggcggtatcgatccatatagtggtctgcttgatatggctctagatatcgggtttgtggttaaaccgaaaaatggatggtatgcacgagaattcctggatgttgaaaccggtgagatgattcgtgaagaaaaatcctggcgggcaaaagatacgagcagtacggaattttggggtcctctgtttaagcatgagccattccgtgacgctatcaaagcccgttatcagttgggtgctattgattcaaacgctgcggttgatgaagcggtagcagaaatgattaactcaaaagtttcaactaaggttgatggtgttaaacttcctgagagtggttcagtatcagctgctgaagttgaagatgaattagagaacttcatgaatgaagactgagtttgatttagaatctgaactcgagaaatttgaacaagaatctccctcggaagagggagacttcgagcgtcaagaacgagtgttcaagaaaagccatgaaataatccaagaagctatgaagactgttatccaagaaattgtgataaaattaaatggtcaatcacacttggtttatgttcataaattaaatatttctccttcgggggaagtaactattgagttcagtacaccatctgaagctcataaggatgaactttatcctcatgtggaagcttgtgttaaacaacaaatccagagtgcattaaagaccaagaaaaaatcattatggaaaatcttttaagaggttaaagtggtagaaacaatcttagctaatctgatttacaaccaggctttctttacgaaggtttggccatatatggacaaagagtacttcgagcaaggacctgctcagacggtgtttaacataattaagaaacacgttaatgaatacacagcaattccttcaaagactgcgttatgtgtagcactggataattcgtctataactgaaacggaacatgaaggtgcaaagaaacttattgataagttatctgatgctcctgaagatttgaattggttagttaaggaaactgaaaagtacgttcaagaaaaggctatgtataacgctacgtctcgaattattgaaattcaggctaatgcccagcttgagccaaataagcgagataagcgtcttcctgatatgggagctattcctgatatcatgcgcgaagcgttatcagtatcgtttgatagctatattggtcatgattggatggaagattatgaagctcgttggttatcataccagaataaagctcgtaaagttccgtttaaacttagcattctgaacaaaattactaaaggtggtgccgagactggtacactgaacgtattgatggctggcgtcaacgttggtaaatcgttaggattgtgttcattggctgcagactatcttcagatggggcataatgtcctttatatttccatggaaatggccgaagaagtttgtgctaaacgcattgacgctaatttgcttgatgtatcacttgacgatattgatgatggctgtgtatcatacgccgaatataaaggcaaaatggaaaaatggcgtagttctagtactcttggtcgtttaatcattaaacagtatccgactggcggtgctaacgctaatacattccgagctcttctgaatgagttgaaactcaagaagaactttaaaccgactgttatcatcattgactatcttggtatttgtgcttcttgccgtattcgtcaatatactgaaaacagttacacgttagttaaagctattgcagaagaacttcgtgcattggctgtagaatctgaaactgttctttggaccgcagctcaggtaggtcgttcagcgtgggatgcttctgatatggacatgagtgatattgcagaatctgctggtctacctgctacagcagactttatgttggctgtgattgaaacccctgaacttgctcagatgaagcaacaattaattaagcagattaaatcacgttacggtgataagaacatcaacaataagttctctatgggtgtacataaggctaatcagcgttgggtagaaattgagcagcaaaacgacccaactaagcctaatccaagcaataccgtccgagaaggtgccggtgcacagaaccgtgtagccgaatctaatcgtcaagaacgagtatcacgttctaagcttgatgctctggcagaagagttgaaattctaggtaaattttatgatttttgtgtttagcgcggtccgtgaccagtcaggtcactcttttgttgtaacagccacagataccattcatcgaggcattgaggcatataacaaagcagacctatctgtatgcgactatggagaggtcaaggtgtataacagcgatggcatctgggttaactctgctacatatctacctactaagaatctgacctctgacactttgttgaaaaaattgttcaaaaggtagtttactttctccaaaggccatgatactatggccttactgaaacaaaacgagtagaggaaaacaaaatgaaaaagattgtacttgctttagtgttcgcagtatcaagttgctctgcagttcctgctatggccaactatgataaagacttatgcgagtggtcaatgactgctgatgagtctgaagtagctcagcagattcgtgcagatgttggtcatattgtggaaaacgtagacccgagcaaacaaacagaagtgcaagcagaacttaaagacgacggcgcagcacttaagttgaattatgttctttactgtgatgctcagtttgataacttcaacatcgttaagtggattttaggatgattacgtacgttttaataatggcgctatctactggttcaggtggaatgtctactgaaaagatggcattcactggtaaagatgaagccgtgattaagcaaaagtgtgaagatacaggcacgcagtttatgcttatcaaagacaatccaaaatcaatgtctccgacgctgtatcctacatataaatgcttacgtattacgcatgaataaatagtaggaggctctatgaaaacatacaaagagtttgttactgagatggtcgcaggtgatgctggcggcaatccacagaatattgcatcaggtacaacttccggggacatcgtcaataaaggacccgaaacccttccaaagaaacgaaaagcggataaagacgctgccaagaaaaagtgataaaatggccttattagtttaaggccagaggaaatattatgtcttgggttgataacgagtatgcaattcgtgcaatatctcacctacctaaatttagacacgttactacatcttcaacattcaagttaaactgccgttgcccaatttgtggtgactcacagaaagatatcaataaagcacgattctggatttttgatgcaggtcaaggattacgctgtcattgcttcaactgtgagtataataagtggctatcgcagtatcttaaagataatgaacccgacctctatcgagagtatcttcttgagaaaagaaaggagcaagtctttgataagccaaaggctgtagaaccgtctgagaaaattaatgcaaaactccccgtaatagaaaaacttaatttctgtgagcgattagatagacttcctaaggaacatccgatagttaaatacgtgactgccagatgtattccaagcacttcttggaaaaggttatggtttactaaccaatggccttctcttgttaactccgttaatccaggaacctataagaatgagacgaacgaaccacgtttggttattcctatcttcaacaagaaaggagagattgagtcgtttcaaggacgagcactacgaaagaatgctccacaaaaatacatcacaatcaaagcccacgaacacgcgaccaaaatttatggtctcgacactattgatgagtcaaaactcgtattcgtcatggaaggaccaatagattcgttgttcattgataatgctattgcaatcactggcgggtctttagatttagctcaagttccatgtcatgataaccgagcatggattatggaccatgaacctcgtcatcctgatacgattaagcgtatgaagcgtttagtagacgcgggtgaaagggtagttttctgggataagtcgccttggaaaagcaaagatataaatgatatgattatgaaagagggggcaactgcttctgaaataacagattatattaatcaaaatatatcgcagggtttaatggctaaattgcgccttgacaaatacgcgaagatataggggccaaagccccttaaattaaagcaatcctccggtcataataaatgacacaactttttctaacggcattggaggaagaactagaccgtgtgtgctagctaatggaactaccacataattccatgcagctaaagcagcagtggcgattccgacgtaaagatatcttccaaatcctcctttgtctttacattcttgtttcacttcagacatgaatcctcctgctatttatgttaagtgatataatatttatctaattgaaaggatatctgtgaattaccaaaaaatttactcagctttagttacaaaggctaaatgccggcatcttgatggatataaagaacgccatcatataattcctagatgtatgggaggagcagatgacaaaaacaatcttgttgagttaactgcgcgcgagcattttatagctcatagattattaactaaaatatatccaaatgtgaaaggattgcattatgctgtaaatttaatgcgatataataaaggtgttaaattaacaagtagattaatagaaacccttaaaatccaaaactctgttcttttctcgggtgaaaataatccaaggtttggaaagccatcatggataaaagggttaaaaacaccagaagaaactaaggctaaaatgcgagcttctcacaaaggcaaagttatttcggaagaagctaaagctaacatgagcaatgctcgtattggaaggtttagtggtaaaaattctcctagatacggtttaccgaatccaagacgtggtgagatatggaactcgtatgattcgctttacgagttgtgggtttataataatagacctaagcgcacaaaatttaataaaatagctgtcaaggcaggttatcctaatatctgctatagacgtatgatagaaaacttcataagaaaggaaaaataacatgccacatttcaacgaatgtagtcaactgatcgctggtgcagataaagctgaagcccgatacgcaggtatcgtacgcaaagttggtggtgaccctctgcaagtaatgcttgatatgcaaaaatctcttcaggttcgtcttgcaaatgacaagcctggtactaacatgcatcctgatgaattggctcaagctggtgatatcgtacagtggctgcgtaatcaaaaagattacattgatgacgaattccgcgaattgctgacgtctcttggcggtatgagtaacggtgaaaaggcagctagtgctgtgtggaaaccatggaaagctgaccacgtcaagatgcaggaaacttatatcaaagacctgtctgataaagaccagcttgaaatcaaatttgaaatgattgatatcctgcactttgttctgaatatgtttatggcgcttggtctggattctgaagaaatctttaagctgtattatctgaaaaacgccgagaactttgctcgtcaagacagtggttactgatggctaaaagaatatctaagcgtcgtttaaaaattatcagaaaacaaaaagaacgggccttagtattggcccttcgagaagaaatcactcgagaaattgataaagaaatattaaagacgcttacagcagctatataaatactcctgtaaactaaataggagattaaaatggcttacgtaaatatcaaaacttttgaccataccactgctgatggcgaggttaaaggtactgaagtatctgtagcttttaaggtatattctgactcacatcgcattgctaatgcacagtatcagattttcccatccgaaaaagccgcttattcaacagtagttgatgatgctgcaacttgggcaaccaccaacgcgaaaatgtttgaagctgttccggctgacagcgaagtataaaattaaggactccttcgggagtccttttatgctatattgggaatagtatattattcctactaactgaggagaacaaaatgatatgttatactaagccctggtatcaatcaccattaaagaagtctcattttgattgttggtacagaggtgtaagagctgcagcgttattactaaaagctgcgcctgctttaattaaagcaaatgataagtggtttgaagacaacaacatgactgaaggagctatgtgtggccgacgcaaaaatctataaagtaagtttacagcgcaaactaaaagaaggttttgattctgataaagtattcactgtagcaatttacaattattcttatgacgagtttaaagaactggtcaataaatttgaagcacgcgggtggtgtcctaatagtaaatatggacttgtcaaaacagcccatacttttgatgtttcacacatgccaggaagtccaattaatattttaggtgctttacaccttaaaggatataccaatgcatatcatgagaccgatctgtttgaatatgcaaatgataaaatcgttaacggcaaaagtatcgtcattgacaatgaagacgcttttatagtatttactcagttagtatggtcatttatgcaagctgatttcgccagatttactccgagcgatttgcttcaaaaagctgctgatgcatataataatagtaacagtcaatatcgtcggatggagtggttcatgtgatggatttgtttgaaatgatggaagagcctcaggaagaggttcaggttcatccagtgatttctaaggacatcaaagacgaataccgtataattatacagaagtatggtattaaagccccagaagctcttctagatgaactagcttcaatctggtctgacccgccgccctggtctccgtgggcaaaataatttcacaaagtagtttactcttctaaaaagccatgatatgatacctctcgtaaccaaaaatggagaatatcatggctatttcattaaacccatctatttcagtaaaattatcaaaggttattcctatcgaagaacccattcgctccattgatgttcttaacttcgcgcgagaaagcaaaggattacctttatatgatttaagcgtatgggaagcattagccaatcgttttgactgcaaagaacagtcaattctgtggcagtgcatgaacaataagattggcgaagaatttcataagaaacttgactctatcgttagacgtcatcaaattgataacagtgacattctctatagaggtctatcatgccgcgaggctaaagccttttatgacgctcttattaaaggagagaaatttgacttcggaaaggtagcatcattcacaacagatgaaacgattgcccgagaatttgcaggcaaatggcattactcgacctttgtagtcattgaagtcaataattgtcagcaatcatttgattatcataccaacatgaaatcgcttttaattactgcaccagattctgaattcatgcgaccaaatgatgtgattgataacattgctcagcgcagaagcgctgacatcgagatgattgataaagaacaagaaaggatgctaccgatgggaactaagttcaaagtggtgggtcataacaaagttgaaaaatctggtttacttatggactactttagtgttactatagcttagtcaactagtgattatctagaactagggacctagacccattataccgtccgtaagacgaaagcatttttgaggaaaacatgatgaaatttactgctgaaaccgctaaagtttatactcgtttaattacaactttaggttctgctcaacgtcggcacaaggagttcaatctcaccccagaatatctgtttaacatcatgcagcagacacattgcgcatactcaggcgaaaagtttggaactgttaaaggaaatcatcctgatagcatgacgctcgagcgttggaataatgacttgggttatgtaatggggaatgttattcctgttaagcaaaagtataatactttgcgcggaaataatacgattgaaggccttgaacgaaaagcgaatgaaatcgcagcacgcatagttcgttcttcagattctgttaagccaacaagtgataaagaagcttctcgtttggaaaagattcgtgagtatgaaaaaactataacatcaattaaaactaacttacgtaatcgcgaaaatcatctttctcaatttgtgcaaaaagaaaagaatggaactgcaacctcggcagatttagaacttattaatgcattgagaactcgtatcagtggtggtaagtctgaattagctaaagttgagcgtaagttatctgctattttagcgtcagttccgaatcgtccgtcagatgctgaaatccgtgtacaatcaatacggctaattgttagctcacttcgtcggttagaaaaatgctcaatgctagataagttaaaattgaaaaaaggtcttccattgactgcgtccttcttccaacttttgagaggtaaaatgtaatgcaacactatggatatgtagtagcgtataaggataaagacggatttgaccatccagtcacaactgatatgtacgatggagaacgatgtgtggtcttcactaatgaagaatcggctaataaagcacggattcgtacaatgtcggttttaacagacaaattagcaaaagggaattttactggaaaaagcaaaaccaaaggaatgctttggtggaaaacaactgagctagtgtatgaaccacttagcgatgttgagcgcgaaaaactcaaagcaaaaattaaaaatctacatgtagtgagggtaaaagtggcatgattacgtttgaccaattaaaagaaagtcaaaaagcgatttttaataaagtcattgaaatggtcaaacaaggagccaaaggtcaacacattacgattaatggacctgctggtacaggtaaaacaactttaaccaaatttatcattgacgctttgatttctcagggtatctctggcattgcgttggcagcacctacgcatggggccaaaaaggttttatctaagctcagcggaatgcaggccagtactattcatagtcttctgaaaatcaacccgacgacatatgaagaaaacgttctgtttgaacaaaagaaagttccggatatggcatctattcgagttcttatctgtgatgaagcttcaatgtatgaccgtaaactgtttaagattttgatggcaactattcctgcctggtgtattgtcattgccattggtgataaggctcagatacgtccggtagaacctggaagtaatgaacctgcactgagtccattcttcactcataaagatttcttacaacttcatttgaccgaggtgatgcggagtaatgccccaatcattgaagtcgctactgaaatcagaaatggtggatggattcgtgactgtgtagttgatggtcatggagtccgtggttttacaaaaggaactgcccttaaagattttatgctaaattattttaatttagttaaaacaccagaagatttatttgaaaaccgaatgcttgcgttcactaataaatctgtggataaactgaatgaaataatcaggcgaagaatctatgaaactgaacgaccattcgtagtaggtgagattgttgttatgcaagaacctcttaccaaggaacttaaatttgaagggaagaaattcagcgaaattcttttcaataatggtcagtttgttcgcatattagatgcaactgaaaccacgtcatttttaggtgccagaggtgttccaggtgaatatctggttcgtcattgggtattagatattgaaacctatggcgacgatgaagagtacgctagagagaaaatctgtgtcatctcatccgaagaagaaatgaataagtttcaatttttcttggcaaaaactgcagatacatataagaactggaataaaggcggtaaagcaccctggtctgagttctgggatgctaagcgtaagttccataaagtgaaagcattaccggcttcgactttccataaggcccagggcatctcaattgacagaagcttcatttatactccatgcattcacatggcagatgcttctctcgcacagcagttattatatgttggtactactcgtggtcgatatgatgtgttttatgtgtgaggtaatatgtttgaattgaaattagaagaccttcaaacaatgattgttggcttacaagaatctaagtttgaagcaccagacaatgttaagcgtgctattaacattaaaattgatacagttctgaatgagcttcgtgatatagcagataatgctaatgctattacttggttcacaggatatgacccaaaggtgtatctgagcgaatatattggttgccagttacgcgaaattaaatttatgctagaggctcaaaatggctaaagactttattattgattttgaaacattcggaaatgtgtcaagctcttctgtgattgaccttgctctaatcacctttgattctgaccccgaagttttggaaagcttcgatgaattggttaaacgtggtcatcgtattaagtttgaccttaaatcccagaaaggtcatcggttgtttggtaagtctactcttgagtggtggaagaaacaatcagctgaggcccgtgctaacctggcctcaacgccagacgatttatcagtaattgctggaattaaagaagctcagcaatatctgattgataatggaattcacccatgggattcctttggctggtgtcgtggacagagctttgactttccgatttttgttgattgtcttcgcgatgttcaacgagcccaaggaatttccgaagaagaaattgatacatttaaagaagagccgtgtaagttctggaatcagcgtgatattcgtaccgcgattgaatcactgcttctgactcgtggtctgacaactacccctcttccaaagggtacgctcgacgggtttatcgcgcatgatagtatccatgactgcgctaaggatattctaatgcttaaatatgctcaacgttatgctctaggcctaagcgaagcaccaagtccagaagataccgatccactgagtttacctaaggggcgtggctaatggaagagtttgagttcgatgaaaacttcgaagagtggttcaaccgggaaatcctcccggaaatctctccaacgatggttctggtggccaaggctttgatggctaagggctgggatgcagggtatatgttcggagtagatgttgggtgtgaaatttctcaccgataactatttactttatgaaagagccgttatataatggctctacattaacaaactgagagaaacacgatgaaaggtttagttgtaggtgaaaacgttaaagtaattggtggtaagtgggttggtcacaatggtgtaatcgttaaagtagttaatcgtaatgacggtaaatctgggtataagatttaccgtgaagattttggtgattacatccactgcttgaaaaaattcgttgaatctagtgaaagctatctgcgcaagtgggtacacgtgaattcgctggacaatgttattacccaatcggtgagttctactaattcagccactaatctgtcgctgcataaaaatgttcttgtcactgatgagtgggaagaagacggtaaaactttagtaaatgtagtatttcaaggtaactatgcggttctgcctaaagccgatgtagagccgacggaatcacagcgtcaaggtttagtataaaaagttgtttactttgccacaaggatgtggtactattatcttatcaactactgaggagaataacatgaaaactgaaaacaccgtaaaaattactgccgaagcttttgaagacattctgttcaatcctgacttaattgtcgttcagaaagagaaaaccttcggtaaagaagagcattggacctggttgtatgtattcgcgaaccatggtgatatcgtcccagttcgtacctttgctcgtgtaatcacagttgatggcccagaatacatggagattgtgtaatgaattttaaagaaggcgtacagtacaaattcgtcaatgatgaagcggaagaagaattttcttcacgttatgagtttaatgaagactttgtgtatgaactccatgaaaatggcgggagttttactgttactaaagttgaccaccaaaataacagagtatccggaattacgtgggctaatggcacagaatgtgatgaagttggtggtgaagaccttgtaatttttgatagcgaattcaaatactttactgaagttggaacttccgcgaatgtaattccaaccgatttggttatgaatctttctattcataatcgtggtcaagcaatcgctgctattgcagcactgcagagtgcatatcaatgttaaatttagctcctatttttgaagcatcaaaattatcttatcctattcccaaccgtagcattgggaatgtcatgctgcaactttcttcagaaactggagaaatgtgtgattggattaatcgtccatggcggcagaaagaagaatttgaaggcgagtgcgcagatgttattaactgtgtagtggatgcactttggctgcatttcagaaatcgccataaaaatgatacccatgtatcagatgatgaaatctccatgatggttactcgtgcactgaatgagcaaatcatggtcaaaacacaaaaatggaaggatgctgttaatgccaatgtatgattacaagtgtgaagtctgtggaaaaaagatagaaattatgcgtaaaatttcccatcgtgactatactgttaactgctttaaccctaagtgtgaaggtcaaatgaagcgggtggtttctgctccggcagttcactacgatggattaaagagtggtgattattgatgggaactaaagcacgcattaccatgaaacccggagaaatccgggttattaaagtaggtaatataacttatagggttaaattaaaatgaaaaagattttaattacagcgcttgccttcatgatgattggatgcactgacgctgataacgcaactcgcgtgttagataacgcgggatttactgatatcaaaatcactggatataagttcttttcttgctcagaggatgattttcagcacacaggctttacggctattgggccaacaggaaaacctgttaacggaacagtgtgctcagggctttttcttaagaacagcacaattcgttatgaataaatgaccttcgggtcatttagttgtttacatggacaccgtgttttggtattatagtcttgttggccagaggagaatattatgattattggaatgacaactgcgcaaaggcgtgctaaacgacagttaaaaatggtagagcgggctattggaaaatacaggtttgcttggtggccaattaatgacgtgaatggtcgtactatttggatgcagaaatattatgaagtctgtgaagagtggatttcacttaatgaaaacaacgagtaccggattgaacagtactacggaaattctcgatatgcatacgctaacgttagtgatgctcaatggactatgtttgaacgacagcggccacgatatcccgagtataaagcggttaaaggaggccatgaggttcttggtaaattgatgtatatcaaagaagaattacttgctataattaatagttgatataattccttcactaaccgaggaaatgtaatgattaagaacgaaattaaaattctgagtgaccgagaacatatcattaagcgtagcggaatgtacattggtagttctgcgtttgaagcgcatgaccgttttctttttggtaaattccaatcagtaaagtatgttcctggtattatcaaactgattgatgaaatcattgataactctgttgatgaagctattcgtactaatttcaaacacgcgaataagatttcagttgatgtcaaaggcaacaaaattattgtaacagataatggtcgtggtcttccgcaggctcctgtagtaacacctgaaggagaaactattccaggaccagtagctgcatggactcgtcctcgtgcgggtggtaactttggtgatgataactgatgttgaccaatcaatcattcacgatcgtctgatgacgttagcagtagtttatcctgatattgaatttaaattcatgggtaaacgggttcaaggcaagtttaaagcttacgcccacatgtatgacgaaaatgctgtagtgcaggattctgatacttgtgctattgccattggtcgttcggatgacgggttccgtcaactttcatatgttaataacattcacaccaaaaacggtggtactcacgttgacctagttcttgatgaactgagcaatgaacttattccagcattaaagcgtaagtacaaactagaagttaataaagcgcgaattaaagaatgtctgactgtcatcatgtttattcgtgatatgtctaacatgcgatttgattctcagactaaagagcgtctgacttctccttggggagaaattcgtagccatattgatattgattataagaaacttgctaacgctattatgaaatccgaagatattcatatgccgattattgaggcgatgttagctcgtaaacttgctgcagagaaagctgcagaaactaaagctgccaagaaagcgcagaaagctaaagtagctaagcacatcaaagccaacaaatatggcaaagatgctgacaccactttattcttaaccgagggtgattctgcgattggttatctgctcacaactcgtgaccgtgaacttcatggcggatatcctctacgtggtaagttcatgaatacatggggaatgtctgctgcagatgctatgaagaacaaggaagtatttgacatttgtgcaatcactggtttgactatcggtgaacccgctgaaaatactaactatcgaaatattgccatcatgactgatgcagacgttgatggtgttggttcaattttcccaagtcttttagcgtttttcagtaattggcctgaactgtttgaacagggtagaatccgctttgtgaaaactccggttattattctcaccaaaggtaaagaacaacgttggttctattctcttggtgaatatgaagaccataaagatgatttcaaaggttggaaacttcgttatattaaaggtcttggttctcttgaagaagatgaatacgaacgtgttattcaagacccggtttatgatgtagtcactcttcctgaaaactggaaagaactgtttgaattaattatgggtaatgatgctgcaccacgtaagacatggatgagtgaataaagaataaatagtaagggtactattgcccttacttagaaggaattaacatgcaacgttattggattactttgatctcaggcgactatggatatctgttcgctgaaaagaaacctctgcccggaacttgggttactatctgggtggaaaacattgatggttctaaacatgaggtttatggtcgagttagtagggtgtggtaatctaagggacctccgggtccctttttctttataagaatggatttatatggctttaatcaagaagtgcttggagatgattctaggattcttgcttaaagttatagtgatataatttccctaaatcactgaggaaaatattatgaaacgcagttacatcccatcagaagaattattcaacgatgctatatatcgtgaatatcgtatcatccagcggttctttgacatccaagcagctgaggaattcaaagaacgcttcaaagaaatccataataaaatttttacaactaacaccgctactgctgaagagctccttgaagtagcagaaatcattaaacgacataattgataggaataaaatgaaaattaaatgtgatgatgaagtaatcattggttcttctgacgctgatgattcaacgtttactattaaggcctcgggtaaagcttttgacatcttgtcaaacaaactctataagtataaagttcgtgctgttgttcgtgaactttctactaactgcgatgatgctcataaactgaatggtaatgaaaatcgtccattttacatcaaagcaccaactcgtcttgacccacgatttgtaattcgtgattatggtccaggtcttaatcataatgacatgatgacgatgtacaaaacgttctttgaatccacaaagaataatagtaatgatttcatcggtgctcttggtcttggttctaaatcaccattaagctatacgagtacatttaacgtagtgtcttatcatgatggtaaagctacaggttatactgtcatgaaaaaccgaggtgaacctactattcgtccgatgtttgtcgatgatatgaaagaagacgaagaaactggtcttgaaattacagttccggttaaagtagaagatattgatacctggcactatgaaatcgcatatattttgcgtacgtttggtgctgttcctccgaaggtagattctcttcgtcgcgaaattgaatatttcccggtagataagaccgactggttcagcgttaatagctcttacgaaagttatggtctgtatgcagtttatggaaaaatcgtatatccgattagcggtgtagatgttaaggcagattggctgcttaatcgttatggcaaggtttatgttcatttccctcttggcgaattagacattactccatctcgtgaagagctttctcttgacgaagaaacaattgctaatatccagaagcgtgtgaatgctcttgaagaagaggtaattaccgcagatattaaagcgtttgaagcgtatgaatctgaccgtgaattcttgcgtgagttcaataagctgagttctaaggaacgttctattcttcagagccgtggtattaccattgggaaccgcgatattaaacaagtagttgcgaagtataatcttgataaaattcgttcatattatgtagataacgaagtatcagtttatgtttcatgcgatgaacctgctcgtcgtaaagtgtcaagcagttcttggcatcgtcataaccaagtaaacatttctgatatttgcggggttgatagaactaaagcgtttgttcttattgacgataaagcgggtaaacgtattgctacggttcgagctctgtgtaaatctgggttagttccaatctgggcacacattactgtaatcaaagacaatgaagatgaattacatgtcattgatgagctgaagaaaatcatggatactgatgaagtcgtagtattccgtgtgtctgaacttgaagcccagagaaaagctcttcctgattatgacactggtccaaaagagaaacgtccaaaatctcctaatgtttctctgcattggattgataaagacgggtactgggaagaagaccgtcagactttagtatcatctgaaattgctgagcttgaaggttatgcaatcggtcgcaatcgtgatgaaatccacactttcccagataatgtttggtggtggaatatgagcatcacagatatgcggtctctggcagaagcgtgtggaattaagaaattctatgcaattcgtccgggtgctatgaaagccgctgcaaaagctgatggattgctttcatttgaccgatttattatcgaccaatacatcaagtgtattgataaggtagattatgaccagtacatgccatcaaatgctactggaaaccgtatctgtggaaatattgcgcattacgataaattgaatttcttgtcgagtaagtttactgcgtctggaatgaaaaatccgttcctgacaaaactaaacaaaatcgctaaggtttgccgtaccagtaaaatcaaagatgaaaacgatgatttagctttatgtaataaaatttataataaactgtctggtgatgctgagacaatcttctataaaaagattgaacagtttaaagatgattatcctgtcatcgcaagtgtcttggatacttggcggactgacagcaaactcgtcgatgatatcgtaaaaatcatggagctccttgatggagcttctactcaaaattctgaaaataaaggtgaataaatggctgttacctgtctgtctgaaatccaaaaagatgcaatcgttaaaaacttcaaaaacggtctgtacactaagaaagagctcgccgagaattatggtgtttcccgtgacactattcggcgtgtgtttaaagagcgtgaagctcgagctgccgcggcagctgttcctgctaaagtagaagctcctgttgagcgtgaatttaaatgggcagcaagttccaaattcatttcaattactgaaggccgtactacttataatgctgatagccaacatcctggatttaaatctgcactgcagaaacttgtagatggcgatatcgctggtgctattgaccacattaacctggaacaaggcatcaagaaattcgttcagggtaacgtccgaattgaagatggtacgctgttctataaagatattgaactgaaatctggtctgactgagcgtatcgttcgagctatggaagatggcgaagactttaaacgctatctgcctttcctggaaaacctgatgctgaacccatctcgtcgtgcagtttatcgtctgtttgatttcctgaacgcgaacgatatcgacatcactgatgatggccacttcattggttggaaagtagttcgttccacttatatggactgtgcttcaaacacgtttgacaactctccgggtaaaactgttacaatgccgcgtaaccaggtagatgaagacgaccagcgtacttgttccgcaggtctgcatgtctgctctaaatcttacatcggtcacttcggtagtggttctgaccgtattgtttcagttaaagttcatccgcgtgatgtagtatctatcccggttgattacaacgatgctaaaatgcgtacatgtggttatgtagtattagaagatgtaactgatcgttggggttcagaacttcgctaattataaggagccttcgggctcctcttttattatgggtgaaacatgattaatccatttaatgtatctcattctaaagttgttaatcttcgtggtactcatcatgcgtaaccacgacgatcgtgtttattttggtgaattacatatcagaggaatttatggcattgatgaacaaagccctgcagagattgaaccaactccggacatttaccctagatttgaataagttaaggggtgaagcaaaagtaaaaatcattgatactgccagatatagcttagatatcgatccatctcaagatagaattgacgttcttaaacgatgcagaattgctataccggcagagtatgtggtagcagattttctcgatggatacgtgaacgatcaagttgttgaccataataacaacgatccatacgaatgggcatgggacgtactagcccacccgtactatcaaggagttagggttgaagttaaaacacactttgttcatgaccgagcaaatcataagccatggattaatgttacgactggtaaagacggtctattccctaatggaagtggaataaatctagggcccatgtttaaacataaagtcgcagactgtataattatattcgttgcagaagaagtgtcccagaatgtcatacagtacacaccgatgttcagtggcggtatcgaacagctcatggaagtcgtaaaaccttcgcgagttggtgctggcgggtacatcatgcataaattttaaaaagttgtttacttccgggattggccatgatactatggccttacaaactgaacgggagtaaaacatgagttacttagagctaaaatcacttcgagccaaacgcggaaatgcttctattaaagctgagcttttgaaagagtataagattcttgaatctatgaattggcattatactatcattgcttgtgataacggtgattcaacgtatggcgggttgtatcctaatggagctgccgctgctcgtgatgagcacatagagaaagtcaaagctctggaagaaaaaattcgtaatttgtgcatttaatagtttactttcttgttctccagtgatactatagtcttgttagctaaactggagaacaaaatgaaaaagttacttacgattctgaagaacatctttgtagtattctgccttatcgttactttcattggtgttttcgcatgggatttagttaacgtttggattaatgctttcatctgaggaaaatataatgattcgtaatagttttgatcgtcgctttaacttaatgagaactgttgttctgtctgttattgttgcggtagcactggggattgtcaccgtgttcggattcggaatttattttgccattaatgcgattgatattattcaaactgatggccttaaatccttagtagaaaccgtatgggaaggtcaaaaatgaaacgacacatcgtgtatcgtctgcttgctttaggtcttcttgtgttttgggttggtggtgtaacggcagtagtatatttttggtagtagaaggggcttcggccccttatcggagaataaactttaatcaactgaggaaattaacatgcgtaatattatgacttttgctgatctcgataacgctggcgcagaactgatcggttctattcgtaacggtgattgggcagcaggtgctccatctcgtgaaattactgagcgcgaaggattttattttttgatgttcaatgatggcaaagcaggttatattggtgcatctgctcgtttctttgtagctaaacagcgttcaaaggcaggatttgaaagtgttctttctcatatccgttctggacgttctcagttgggtcgtactctgcgctcgaattgcatgacctacggtgtgttctggattcctgctaataaaatgaaaccactcaccactggttatggcaaaggtcagcttgcattggcgtttactcgtcagcattcaagtgacgcgcagacctactctgagctgaatcgtattctgaatgataacttcatctttactttgcagaaatactaatgagaaccttcttcgtgatgggttacttgtttctgatggccctaatgatttgctcaggaacattcatgtggtatggccttgtgcctaccactaaagtaatcggaagtattgcgttcaccgcagcatttattatgtttgagcgcatttgtaaaattgtaggagtttacaaatgattaagaaactcctaattgtggcagctattgctgccgcctttctattagttatgtactatggaatgatttatggaatgatttatattgtgcttttcatttccgatgttatagtacaaatcggctcactaatttggtaggtacaatggatatttttgacactctattaaagcaagcaggttctattgatgatttggctaaggcatcaaatcttcgtcatcgtgatttgaaatctatcattgataatgaagcaaaagaatacgcgatttatactgtagaaaatcgcgctattccaaacttgattgatgggtttaaacctgtacagcgttttgttattgctcgtgcccttgatttggctcgtggtaataaagaaaaattccataagcttgcgtctgtcgccggtggtgtagctgatttaggatatcatcatggtgaaacctctgctcaagatgctggtgcattgatggcaaacacatggaataacaactatcctctgttagatgggcaaggcaacttcggttcgcggctggttcaatctgctgcggcaagtcgttatattttctgccggatttctgacaacttccgtaaaatctacaaagacacagaaatcgctccggtgcataaagataaagagcatgttccacctgcttattatcttccggtaattccaactgttcttctgaatggtgttcgcggtattgcaacaggttattcaacttctattcttccgcatagttttgaatctgttttggaatgcactaaagcagcacttcgtggcgaaattatggaacctgaagtacagtttcctaaatttaacggaaaaatcgttcaaactgaagacggttctgttgaactgcacggcgtgtataaagaaacttcacggaactcgatctatatcagcgaaattccatacaagtttgaacgtgcttcttatgtagagaaagtactcgatcctctggaagatgcaggatacatcacttatgatgatgactgttctaagactggttttggcttcaaggttaaattccgtaaagattatgctttgagcgaagaccctgaacaacgtcatgctaaaatcatgaaggattttaaactcattgagaaaatgagccagtacatcgtttttattgctcctcagttaatctagggaacctggaggtcatctccaggtccttccatataaatctatatccctccaaaatccctccttagaatgccccaaattattttcacaaagttgtttacatgcttactcggttgtggtattatagcaatatcaaaacaacacggagtaaaacaaaatgattacatcattaaaatctgatatcaaaaacattctttatatttccactcaagccgatggcactcgactgagccactatgtcaaaggtaacattgtggtgcttgatgtgttcgaagttaatcgcgagtatcctatgcgccaggtaattcaagcgagtaactatgaagacggtgaagagtatcaagtcgttctttgtgtatatgatgatttctgggtgcttaaacttgagaatggtgataagttcttgatctttaacgtataacatttttactgctctttgaagaaaatttttcagagagcagaataaaatggtttacaagctggttagcagatgatattatagtctcataccaaacaaattgaataaaacatcatggagaatcacaatgtctaaagtaacttacatcatcaaagcttccgaagatgctctgaacgaaaaaactgctgctattctggttcaggtagctaaaaaagatttcatcacttctgctgaactgcgtgaaatccttgaagaaactatgaacgcaagttctgttaactcaaacatcggtgttctgattaagaaaggtctcatcgagaaatctggtgacggtttaatcatcactggtgaagcacaagacatcatctctaaagcggcagttatctatgcagaagagaacaagcctgaacttctgaagaaacgcaatactcgtaaagctcgtcctctgactgaagatatgaatgagcacaaagacctgatgatgaaacttctcggtgagatggaagatatcttacctctgaaagaacttactgtttaccgtagtaactatatcgcagttctggaaaaacgcaccttcggtattcgtagtcttgaagttaacaacaaaggtactttccgcatcttcggttacaagatttctgaagagcatcagaaacacttcactgacctcggaatgtcttgccgtgtagctgcaacaggcaatacttacttagatatcgcccgtactgctgaaaacattgaaaccatcatccgctctattaaggaactgtaatggaactttgggaaattatatatgaagatgatgtgaatatcagaggcagcatcttcattaaggccctggacaaatatcacgcgattgaattgtttgaacagttacagcaacaaacttatatcaatgaatcgcgttacttaattaaactcgcaatgtttttggtggaataatgaacaagtttaaagtattgaatgaacttcagcgttgtgtagaaaaagttaacttgaatgctaatatcccaactgattgttgggatgtatggttccgtgggcactttatcggatacattgataagaaattcacaaaatgctatgctatctacaatgcagatggtaaacatatcatggatgtagataactaccaaaaggcccttgctaaatttgttccaatggcggaagctgttaactcaatggaatggttagagaaaatgcagggtgaacctgttattcgtcagattggtattcgtgaaaagaaaagtttatggcagaaaattaaaggattctttaaatgagcaagttttccgaacaaatgaataaatttgttgatgcttctcgtcacggtactctaattaatgagccagaagaagttagtattcctgaaatctgttttaaagtagctgattggtgggatggacgattacttcaacgtcgtatcgtttgtgcagcaaatcgttttgaattgaaaactggtggaacaattgtagttccaggcactcgccactattctgttgatatggcgaacgttttagatatgtttcgcgacaaattggtttctgaccatgtccatggagacaatcaaggatttgttgaccaatggggcgagtacttcacacgtgaagaagcattaatcatcgctacacatgcaggtcaagttaatacagttcgtcctaaatcaggacccgccaatgaattattctcagaggatttatactaatgattagtacattaaagaataacattacgcttttaaaaattcaacgtaaatcgctccagcgttcgttagaaatgatggacgataattggggtacatataccaatgaagccgggtttaaaatggcagatagcaaattcatgaaaactctcatggataaagaatacatctgtccgtttagtcatccatttaatggcggcgctaaaccgtttcttgctgaaatgtacaaagtaatgacagaagaaatgattaaagatattgactattacatcaaggaaattgaaagtgcaaaatctagtagctaaacatgattttaataaaggcggagcacacaaagataaaaagcgttccgcaaaggaatctaagcgtaagcaaaagcataaaggcaaagaaaatgcgcattctgaataattccaaatgtactactttaaccattatttgtgatgacctagaagctctccataagaaattaggggaccattccggattagtagaagatatccattctgaactaatggaagacctacagaatgctggctatggagactggatggtacacgattggaataatggtacctttactgtagctattatcgctaatgttgaacctgaagaagttattgaacaatttcagaaatgcgttgatgcttatgatattggagattatctatgaatactgaaactttacgcagagaagatgaagccaaggcatatcataaacgcgttgaattgctttcagcaattaaagtagaatacaccttacaagttaggcttaaagttcttaactcttgggctaatgacttagaagtaaaacatttagagcaagcagtaatgtttcaagaggcaattgacgtatgtcactggatgaatcgtagggttcgtccaattggaaaggaatggtatttaacggctagagtaaaagatggtcgctacgggctctggatgtcctctggtgctgagtatatcactaccaaggaagatttgaattctcgttgggaattggcataaactggtttacaacgcggtatcaagatgatactataatcacataatccattatgttgtaggaaaaataatgactaagtttgaaattgtccaagaaattgttactgttgcttctattctgaccaagttcaatgctgaacatatcatggagaagcgagatgaatttattgcgttcttgaatgaaattggaatcaagaatgagcaggggcgtcagttaaatcagagcaactttcgtaaaatggtttctgagttaactgacgaagagaagagaattctcgttgaagaatacaacgagggatttgagtctatctatcgaacaatggctatgcatagtaataagtaatcacttagctcttccaagagctctaaccgcctgaccacatatcgatgttagtctttcgttagataatgcaggtttggaattgtaccagtacatttcaacagttccagcataaacattgtctaaattgaaatacggacagctaaacatatacgatatttcaggcggttttctttttgttggtaagaaaacaaattccttatccgtccaaaaatatctacccgataaatgcgtgctatattcagcagttgttttgtcgattggatatcctcccaagtttttagaatctaccgtgctaggtaaagtcccctcataagcaattaagtctacgaagtagttcaagtttttaggtctgaacgtaaagaccgcagaaaagtctgcaccgcttgagatatgtactatctggagttgttcgagtgctgtattatcaaatcgggaatctctatccttttgaaccagtttatcatacttgtcataagtactgtcgacgtaagctgtaataagactatcagacttatatccagcaaacgccaatagtgctaaaagtacgacaacgaaaacacgggaaaagagaactcttcccgtggctccatctttgaataatagctcgagcaacccaagaaacatatcaaaaaacggtattgattgtttgcttgccatattgctctccttacagagctatttattgctctagcatatgcttaatatgctgtaaacgacagttggaaagttcgtccatcattggcgtaaagccaattccaaaaagcatttgggtctgtacaattatagcatcgtcttcctctataatctctagagctgttaaaatggaactgacttccatcttcaatatcaacgcgccaatttacattaaaattcccactgccttctaaaacgatggcatcattataaccgtcccatttactaggctctgctagcccaaaaacaaccaaattaaagcctgtttcccatatacctgataaggacccacgagaatcaagtaatacgttccacgaagcactgttcttatcattccaagcgccacgaaccttaggtcctgtcgcagggttgttacctgaaatagttatactagcattccaaacgtttcttcctatcatgttggacatccaaaagggtgttcccagccttaattttgctccagctgcaatcattgaagattctcctgttacagccttagctgagcttcctacattaggacctgttactgccatgatatctcctcaaagatggggccgaagccccataacattatttagatttaagttcttcaatttctgctttaagctctttaacagattcgactaataacgcaattactgcattatagtttaaacgaagtaatgcatctttatcgttatcagttgtaactgcttcaggaagaacttcctgcacttcttgtgcgataaggccagccgatggtttagtatcaccatttggaagctgtaaatcataaacattaccagatagcttcgacactttatcaagagcgttatcaatcttagcaatatttgatttcacacgacggtcagaacgaatttcaacgtcccagaaattaccaacaccttcaacgcgtagattagcagcactaccccagatttttacaccagtatctgtaagtgctaaccactggtcaactccagcggcgttatagaaatgccatccagcgcgaacatattcacccgactgccatgcgttaaagctatcgaaaatcgtatcaccgcgctgtaaacgtattccatttacggtgtttgcattatctgtgtttcctggtgctaagtgggctaattgcagatatccatcatttctgaatacaagctctcggccactttggttacggataatcatgtcaccgttttgaccatttgaccaaataacacctctgacatttccagcagaatcacggaaccagtagttagagtttgtaccagctgaacctgcatcacagtaaacattaccgtttttagcaaaaagaccaccagcattggttgtgtcagcggcgactaagtttccgctagaaactttaagactgctactaacatctaacccgcctcttagagtacttttgccatcaacttctaactgccatgtttttaatctggtgccagttacgtcaaggttaccagttacagtaccaccggctaatggaagataagtatcgccagcgttactaatagcagaagcaaccttatcatcaacatatttcttgttggcagcttggttattctgtgtaggagcatcggcaatttgcacatacttggtagtaggaacaataataccgccgttggcattaataaccccattaatagttgctgtacttgatacagtcaaagctctagaaactgctgagtttccataaactgtttggtttccatctgcgtcaactttaaacacatcagtgtaagtttccgaagctggattagctatggcagttgctgatgatttagcaacaacaaatgattttcctgaagcaaataccagcttagcgcctgagttagattttttaacgaaacctaaatcggagtcttttcccatcagaataaaactattatcgttagtattctttatgttttgagaaacgatcaagcttctgctcatcgcggcttcgccatttacttgcaagcttcctgaagacgttagagctccaccaactaaaacgtttccatttggctcaaagcgggtttcaccattagaagtatctgcacttcctgctctaatgtggatgtttgcaccactcgcagaacctaaaacaaccgcccccgcttcattggctcgcagtacagcagttgcagaagcagaaccaaggttcagtcttccgactaatctagcgtttccgtttgcggttaaatcggttgtaactaaattaccgaatgttacagtttgtccttcaccaacaccaaggttattacgagcagcagctacagatgttgctccagtaccgcctaaattgatcggttgaacaccagcaacaacctctttccatgcagaccatgtaccgttttgaccgtagcgaatatatacaccttcaacaccaccgttctttgtagtaaaggtctgcttacatgaccaatcagtatcagaaaccttgcgtaaagacagaacttcaagaacaaagttgccatcagatgtaggtttgttcgatatattatttccaccgccagaagatacacatttatacaacagacgagtacctgggtcggttcttttaatgacaagactattaaggtcaatggtcttatcagaaatatccactgcctcttcagtgccgcgataggtctgattaaaaactaaatccccttctacatcaagaccatcaggtttaactcggatgtacttagtaggagatggagtagcaactgcagtttgataaccaaattgcacgtatccttcaggagtaattttaagcattgctacggcagcgccatcgccaactttacgagcaagggttaatctgctatacttatcagagttctctgaacccaaatcaacaaatgttccactaggattttcgacttttaagttagcgttaatagtcaagttaccggtcatggtatcaccagtcttgcttacttgcttattatcgccagtggtgatatcatttttaatagaagtcaaatagttgttaaggttaccgccaaacattgaaccagaggtgatgttaccatctttagttaacattgcagcaccgccaactttaactgctacaggaacatccaggcggccatcagaacggaagctaaaatcaccggcagaagcgcctccagtggttcttgcgcgaatattaatttgtcctaagtccgctgtatttggagttgcccaaattacaccacgttcattggtatttgttctaaaccatatatgggcatttccggttcctgcgttaatatacaacgacgcagtaccggtaccggaagcatgtaaattaggaacagttaaatcaccagtcatggtgtcgccggctttcttgacttgggtatcgtttgtcagattaccaagtccgacgtcatccttagatggcttatttgctgtaccatagagaacattagagtttactttgccggcggctaaaccgctatcgtttgtagcaaatactctgacgataccagttgcatagtctatattaagagcagacattgtgtcagaagctcttccataaaacccggtgccatgggagtaataaggagccccggtataaccactcgctacgttggctctaaacactgtaccgccaagagccttaagacgagtcattaagtcaacgtcagaagtaatatttactagtgattttccgttaccaccaacaccaaaggcaccaacctccattacgtttccgctagattccccaacatcacgcacagcagctgttctaagaccaaggttatttcgagcgtctcctacgttagtagcacctgtaccaccgcggttaaccggaagagtgcctgtagtatcaccgaaatctggttttgcgagactgtcaaaaatttgcttcattgaaacaagaatgcttccagatggtgtagtagcaccagtatcttgtccggtttcatagataattactttaccgctatcttgaccattatatccagcggtgtttagcactgtaacataaagggcattgccgtatcgaggaactttagcgtaaaaatcaaatgaagcctctgaatctgtagcagaatcgtttttaacaacgtaatactctggaacgttcgttttagaaggagacccaacccggcgccattcaacccagttatctaaactgttggtgctccatgatgttaaatttcgtcctgataacgtgataaaatcaacataatgtcttccgtgcccagaatcaatgccaccagtaatcattaaatctaactgtgaagacgcatctcctgggtgtttaattgtagctactttaacccaacgtggagttccagcagttgcagcagaaatagtatattgccacgcctgacgattgttttctacattagtcagaagagtaccggatttaccaggacctcttccattcatagcgtaataaacctgagaatttctgaacgttaaattgctgtcattagttaattgaagaacaccggttcctctcaggtttttaatgtacgcgtcattagcgcctacacccatttccaaagtaagagtgcttccgtttgaaatttttaccgttttattagttaaacgaaggtccccaggtatagatgtatcgccaaacccatctaataatgctaaacgacgaacttcagcttgagtcgttccaccggttctttgaacaaaatagataggttcatttccgttatcatacgtaccgatttcaagaaatccctggtcagatgcaccaccagctccaatgtaccagccatcattattagcacacttaccggtgatatgacgtactaatgctccgcttaaatccgaagcttcaaaattgatcgccttattcggagaaatagtaacgttgtcttttaatgtagtagttccatcaacattaagattacctgcagtatctaagaaaggaacccctttacctgcaagctgaacaacgttatcggcttcatctttagtgtaaatggcaagagtacgcccatgtgtattcaatgcgatttcgccacgggctacgatatctgcaccaggtgctttattctctgtgctagttcttttaaattgtatttgttttaagttttgatcggccatggctacctcttagtatgtgccaaaatctattgttaccccgcgtgaaataacctgatctaatctaggagcatattcaccggatgttgctttatttactataactacgccagcgttagctctaagtacaccggtcatggtgtcgccagctttcttgactgctgcgttagctacgttgctaacagtatttattagctcatcgacatagtctttgcgtgttaagtgtgaatttgctgttggagctgcagccgcaacagaaacttgattgttagaagtgattccacctttagtagtaatattaccagatcgcaaatcgaatgcgatagttattccgtttgaaccagaattagattcaaatcccaagccccaccaagtttttattttggcattgacaccatttaaagtggctccatcaactccgccatttacgagttccatgcccccggagccagtagtttgaactcttaaacctgtttcaaacgttactgttcgagagtaactgccgccattagccttcgaaacaaagtcgttatcatctgcttgtggtttatctatttcagtataaacctttttacctctataagttagggagtttcctgccggcacaagaggaaaagtacctgcgtgccaaataggatttccaccaactgttgaacctgcttttaaatcggccatagtttatcctcttatatattttctatttatacgaaaaaaggaagcccgaaggcttccttagtctgatgtttctctgaacgattgaactggaataacaccgctcggatcgacttttgaatttggaagttccataatcacagtggttcctccttcaacgcctttattcattcttatgccattcacaccaaactcctgaataacactattcaactgttcgccgtgagaagtttgaacaaatacaaggtttttgattttagagtcaccaactacagacgtttttggatatcttgataccacaatagtaaatccatcagcgtccgtaggaacagcagtaaatctttcaaatcttaaccatctatcagctccattttttggaacttctaatgatacgtttgacgataataaagatgagcctttgaaccatcgcaggctagctctagtagtagaaccagcatcaagaagacttttagatgcatacatatcacatactaaaaatacagaatccccaggagatagtccataatcagctattttgcttatagattcattttgtgctggataacgtttatattcatatccagtagaatccgagtattcattggtatcttcaatggaacgataaggacacccagtatatcctacatcgccaacgttatcatatacagtatctactttagccctggaatcttctttaacctttccatcattgccgtaaaatgactcaattaatatgcgtccttttgctgctccgagcactcctacataagcagagtttggaaatgatttggaaaagtcagaacctggccaagaagcagaccacttgtttttaaaccatctgtctattaacgggctggattgaaatcgttcatgtgtcattataatatacaatcccgaagttaatccatttgcatattctacaaacgctttgttattagcgttgttatcatcagtggtaacatcaaaagttttaaagttaataaaactattgccgttaacctgaacgacattaatccccctccgtaaggaggaggtcatatcaaaggcaccgttaatattcaactctggcttattcggaacagcattagaatgtgtagcataagcttttagccaatacttcacagagtttgcctcagagaggattcgtgtttccacgaaatcctcgccgaaggctgccattaaaattggttcagccattaatcacctacccattcaaatttgagagtttggtttggacggtctggccagattttaactggaccaagcttaatccattccaaaacttcgagggttttaacctgagttgatactgagctcggagctccgatatcagctgcagttggaggagtagcagacgtgaacactcgcatccaatcatcaaacttattaaggtttggattataaatcctcatccacacagtatgcgcgaaacgcttatcagcagtttcggttgtcggaggataaggcgtccaaagctgataagtgttgtttgtagttacaccaacctgagttaaaacaccaccagctgcagttttttcttcatacccagtcactactaaagtgcttgggttaccagggtcaatcggtgttctgattggaaccatataaccacgaagacctttcaatttagtagcgtctttgatttcagcagtccaagaaccttgtcttattacagtgtcattcgttggcacataccatgattcagaacctgtaatgacgatagcagaaccgcttatgttaagattgccggtcatggtatcaccagctttcttgacataacggccatcagctaatcttgcgtagtttttggtagttaaaattggatacgatccagttgaatcctgtgcaaaaatttgtgtatcagcgtcacgggaacgaataaatgcggactgtgattgggcaccgaatattgaattcaatccctcgacagcaagcatctgaacgtcattaaccataacagttccgccaactactgcatttccagaagacctcagagttttagttgatacttcattaggaacattcagcgtgccgtttccaccaaaggtgtaggtctggcttgtagcagtagttcctgttccgtttttgacacgaacttttaaatttccagctgaagctgtttgggtttctgcataaattataccgcgttcagttccgtctctattttgaaaacgaacatgcacgtttccggtgtcagcagttggagaaacttttacttcaccaccattagcatataaaatattctggacagaaatattattgctaaatgaagtatcctgactaaatgtccaagctccagaaatagtctgcgctatatcgcgacgagcatatttgtctggggtttgaccacctagcattccggtgtcataggctttaccaagacgaggtaagtaatgtttcagtgtaaggttcaattcatacggagacactgcgacgcccttagaggcatacccgttatccggaagagttgagccattagtatcattacctttccacgttccatcgcctgtagatagcctcacggtccctctaacgctgtctgtagcttgccatgactctgttacctgaatagtttgtttcaagtaagcaggaggaacaattctatcgcttaatgtgcctgcatcaacttgtgcctgcgtagcatactgagcaagaccgatagctccttcggttgctgttttcgcgtgcaacgtggcagcagtaactattttcttggtgtcggtgccggttctaacctcagcagcagtagcaagagtggttgtacctctttgagaagtacttgcttcctgtatgttgatggtataatggtcccagaggttcccagtaatagttaagccagaactagtattaacttggatacgatcagtattagcaaatttatcgaacagtaatttagggtttaccattactgtacttgaagtaccagcttcaaattcaccctgggcaccaggtgtcgcgaagcgagcaataccagtacgatcgttagttgctgtacggtcatttaatgttttaggtgtaactgctttattagtcacgccgccagcattaacttccgtctgtgtagctatttggattaaaccaattgctccatcagtagcaacttttttgtgcaaagcttctggtgtaacaaccgtaggaatatttgaagaagcaggagttccgtttctaacttcactatcacttgctaaccagactattcctgattggtttacagtagctttatactcacgaagagtttttggagtaactgcatttttgtaatcagaatgatcgaatataccggtgccagcagaagaacgatcagcagttgtgttaggagcaccaccagtttttactaattgaataacacctaatcgtgaatctgatgtagtgcgataaagcaacttcttaggagtaacaatcgtaaaatcgtctgttcctgcatccattttagcgttagacgcaatttcagctaaacctctacgagtttcagtagcagacctttcgttaagctttttaggagtaacgattacgttatccaagtaagaagcagttgttgactgattaacttcgctggaagttgcaattcttgctataccagtctgagtttcagtagaacgacgcccatttaaggtttctggagtaattgctaattctttttctggatttgactccgcattagcttgagcctgcgtagcaagagcaataacacctaatcgtgctctagttgtattgtctttagcatcaactcgttctacggtagggtcagattcagttacaatccaatagctttttccggatgctttatcttcaatatatgcaagtccaagaacaggaacatacgacgtagttccgttaaaggtaatcgagcttgattgcacccatgctgcatcaggtggatactctgagcgttttggaaattgcagtaagttcaaattacttgcgatggtatcaccatcagaagctttaattactacagtctgtcctttacgcatataattcattgcgattgtgacagtatccccaacagctacgtctgtaggcaaagtaacgttaattgttttaacagtattgttatctgcgccaaatacagaaatatgctcattaggcattaaagtaacatcagaagtaattattcttactcgggtgcgtaaatcattttcaaaaatacgccagattttgtcaatcgagtcatataccaaaaacccattacctgaagtacgtacttgaatttccgtttgtccgggagtcccaatcgagatagttgggtcaaacgtacgcacagtcatgtggttaattggcgatgtaccatcaaggtcagtaaaattgatgatatcgtttgagttagcaaacaacggcagagtaatgaaaatctctgagttggaagtataacgacgaactacgttatcacctgactgaacctgggttggaacaatcccgttcggaactaccatcttggcagtatcgccaaaatcggttaaactcgcacgccatgcaccgttactaaacgtaaacataatttgcgaatacggacgagtaagtcttacttcacgtaagcgtgattcgccgaagacaatagatgcaccagtatcttgtgctttaataagaattccgttatatccagggcgtccaccgatatcacgaactacaatggtatcaccttcatctggtgctaacggaagcagtaatgtagcattacctgcagcgttagagtcaacgttgatgaactgaccggattgaatttcaaactctcctttacggacggtataaatccagttcgggtcaacacgtaaagaagtccaattcgcctggttaaaatctccagcaggctttggaatatctttatttgcaatccagatacgacgtccataagtcacagcaaaatcagtgagatacccacgcgtcgggtcatatttttggatagtgttttcttgaataacgtactcgacggagacgccgtcggttttaacgttgcggtcagctagtgccacatttataactttatttccgccggcatccaaaccgtttgttgcacggaaatgttgtttcagtaaatcgctcatagagtctcctatggggttatgcttcattatagaagtatttataatggctgtactaactaattgaacgaggttcaaatgtctgatttaaattgcttattcgccgaagaagaccaagtaaaagaaggtgtcattttaattgacttgtcacaaattgcaatggcgacaattcttcatacgtataaagaaggtgacaaactaaccactcctatggttcgtcatcttattctttctactttaaaatttaatgcttttaagtggaagaaggacggatacacaaaaattgtcatctgtgttgataatgcagttaatgggtattggcgtcgggatgtagcatattactataaaaagaaccgtgctaaagcccgtgaagaatccaattgggactgggaaggttactttgaaggtcttcgtactgtaattgatgaatttaagcagtatatgccttattacgtcattgatattgataaagcagaagctgatgatagtattgctgtactgaccaaaaagttcagtctcgaaggtcatcctgttatgattgtttcttcggatggtgactttactcaattgcataagtatcctaatgttaagcaatggtcaccgatgcagaaaaagctggtaaaatctaaaaccggctctccttctttagactgcatggttaaaattattaagggtgataagaaagataacgtagcttctattaaagttcgttcagatttttggtacacccatgttgatggcgagcgtactccttcgacgaaaatgacgtttgttgaagagtgtcttgatgctggagaaaacatcaaagatttgcttactgaagaacaatataagcgtttcttagaaaatcgtgtgttaatcgattttgattacatccgtgaagacattgttgctaacattttagattgttataataactatcaactaccgggtcgtggtaaaatttatagctactttgttaaatccggtctgtctaaattaatgaaagaaataaacaacttttaaggtgaatataatggctaagaaagaaaaagagcaagtagtatttgatgaagcagtacacggacaggctctgcgagatatgattaaggaagcctcaggtaataagttgaaagcagaaagctatcttgagcttaacaaagacattaaagaccgcgccaagaaagaacttggcgtagaaggcaaactgtttaatcaactgcttgctctgttccataaaggcacacgcgatcgttttgaaactgaaaaagatgaagtggtagaagcttatgactctattttcgcttaaagacgagggggatacctccccctctgaatccattaatcagctgttagataagcaagctaacggatttactattgagtctatggtaacagaacttggaatggggtatcttgaagcaacaactcagtggttagaagaaaattctattcctgaaggaaacttcaatagatatattcctccagcaatcatagaaaaaattatgtcagaagcattggaagaaaatatgcttcgaccatcatttagtcaaacacataaaacgaatagtctggactttttattatgattcgtctccgcatgcctggaaataataacagatacgttaacggtaagagcgtttatcttttatatttaatgctcaaacaacactttgccggtcgatatgacgttgttaagtataactgggttatgcgggtctctgataaagcttatcaaaagcgtagagacaaatatttctttgagaaactcgctgagaaatatacattaaaagagttaacactgatattcatgagtaacctcgtagctaaccaagatgcttggattggcgatatcagtgatgctgatgccctcgtgttttatcgtgaatacatcggtaagttgaagcaaatcaaaactacattctctgaagatgtaaagaatatttactactttgctaagaaagttaatgtagataagcttcatgatatttttgaatataatgagaaagtcggaacatcttatgtgttcaaacttcttcagtcaaacgttatatctttcgagacattcatcatgcttgactcgtttttagatataataaatacacatgatactgcaacggataacttagtttggagtaattactccactaaattaaaagcttataaaaaacttttaaacgttgacggtgctgaagctaagaaactctttattagcataatcaaatcttgtaaagaaattagtatataattaatctatcgtccagttgcaaggacccatgttgcaacaacaactgttaaatttaaaaaggtaatcatatgtttaagcgtaaaaatcctgctcaacttcaacaacaactggctggtctgaaaggtggttcttctttctctaatgaagataaaaacgaatggaaactgaagaccgataatgctggtaatggtcaagcagtaattcgcttcctgcctggtaaagatgaaaactctctgccgtttgtaaaactgatcaatcacggtttcaaacacggcggtaaatggtacatcgaaaattgtacttctactcacggtgattttgattcttgcccggtttgtgctcatctgagtaaaaacgattcttataacagcaacccagctgaatataagcttctgaaacgtaaaacttctttctggtctaacatcctggttattaaagacccggctaacccagaaaacgaaggtaaagtattcaaattccgtttcggtcagaaaattatggacaaaatcaacgcgatggttgaagtcgatgttgatatgggtgaaactccggttgatgtaacttgcgtgtatgaaggtgcaaacttcgtcatgaaagttaagaaagtcggtggtttccagaactatgatgaatgtaaattccttggtcagtccgagattgcaaacatcaatgatgaagaaactcagaaattcctgaccgaaaatatggctgacctcagcgaaattgtggctccatctcagtttaaatcgtttgaagttaacgaagccaaatttaaacagattatgggtacagcagctcttggtggtgccgcggcaaaagcagcagctcgagccgataaaattggtgatgacctggattcctttgacaaagacttgtctgattttgaatccaaaccgacctcttctcgttccgcagacgatatcatgggcgatgctggtgacagtgttggcgatgacgatctgaatgatattctgaacgacctctaatataaagggaccttcgggtccctttttctttatccctccaaaaatattttcacaaaattgtttacaaaccagttgatgagtgatactatatctacatcgaaacaaaacgagtagaggaaaacatcatgggtaaattaaacattgatatcgtagcaactcctattatcaacaaagacggtatttgtgtagatttggagtatgcagatggtacacgtttttatgacactgaccatggtattgattttgacttgattatgcgtcatggacctggtggtggttggccaaatattgacctccgcggttctagagaaaaggttattgcatatcttgaatctctggaatgggacgacattgattactttatggaagattttgaagaataattgtttacaaggagctatgcttgtgatagtatagctccataatctactggagaataaaaatgaaacttcaacgtcaaagcatcaaacttggttctgaatatcgtggtaaatggaatttctgcatttgcgacaaaaacccagaagaattagagcgtgttgaagaagtattgtgccaaatggaagctccattcactatgggtggcgaaactgtctattggaatgactactgtgataactgcccatgctatgaagatgggtatggctcaggcttctggattcctgttgaagatgttgaagaattcaaaaaagcatttaaacttgctaaggccaagaaatgattgaggccgaattagtagttttgttaatttctgttactgccgcttttattagcggcattatattaggattatttttatatgtctaaatttagtgtaatgggatatcctcgcgttaatattcgctgccagtttgatgaaattcctggagtaactcatattgagctcgtatttgaccctcattcgctatacaatcaggtttcaggtaaaattgattcagcatatggcgagtttttaattaatgatcaggtgattatttcagctctttctggcaatcaagcgggttcgttgtatattctgaaaaaggaagtatttgaagaaatttcagaagctataaaggaaggatttaaaactcttcagagtatgattaaagctagtgggtacaagtcatgtggattttaaccgactgggattgtaagtactgcggcggtagcctatggcaattaggtggccggtgttttaagtgtggaatgaggcaaggctaatggaaaatttcgcagtagatgattatgatgatttgatttggtgggatggccgtgaatgggtaactatctgtgcaatgtccaatatcgatagcgctatcaaacgtctccaagagcttcaacagaagtgggaagacggtaatgttgaaagagttgaattttgttgaggtttaaatgattcaaatagtttatgcctttgctcctacaaaaaccgtagacggcaaaaacgaaaatgctttcggtttaggcgatggtcttccatggaaacatatttctcaggacatgaaaaactttgctaatcgtactcgagatactatcttgatttgcggagcaaagacttttatgagttttcctaaacctcttcctggtcgtaagacaatcgttgtccaagacatgagtcgtgcgttagcaactgctaaaaatggtttctttgcggatgcttatgtaagtgaattagaatttatcggtttcttgggtggtgacattatggccgctcatacttcttacaacagtactatcacttttaatagagaccttaattattctatcataggtggtgccggaatcatccagaaggcatatccatatgcagatagggttatccaaacaaccatcagaaaaagtcatagagtgaattctgatgtcactctacctgctgaatttgtagcagctcctacttggccagaatcaggattcattactaaagaaaatcactggtatcatattgatgaagtgactaacatttcagaggtggtctatgagcgcaaactatgatatcactcagctatcagaagacaaagttcaaaagaagtggaaaagatttccatttaagcatggtattcatcttctagttttcagttataatggtcttagcacttataacggttcaactacagtatataaccgaaatggaaatatacctattgaaattgaacgtgattataagaagatgttcatcggaatgtcacatggcaatgtgatggtcaaagatgatgtagtgtctattattggacgatttgaaaagcgtggtgatcagcttttctttacccctcttcaggaaaaatttaatgcgtgaataccaagaattaattaaagatatttttgaaaatggatacgagactgatgaccgtactgggacaggtactatagcaaagtttggtacccagattcggtttgatttgcaaaaaggatttcctgctgtaactactaagcgtcttgcatggaaagcatgcattgcagagctgatttggttcttgcgtggttctactaatgttcatgaattgcgtcttattcagcatggttcattgctagaaggtaaaactgtctgggacgacaactatgaaaaccaggcaaaagacatgggatattctggtggtgaactaggtccggtgtatggcaaacagtggcgagatttcatgggtgttgaccaactaaaattggttattgatcgtattaagcaattgccaactgatcgccgccagattgtgactgcttggaacccagttgatttgaaccggatggcattgccaccgtgtcatatgatgtatcagttcaacgttcgcaatggatatttagaccttcagtggtatcagcgttctgttgatgtgttcttgggtcttccgtttaatattgcttcgtatgctgcattgattcatgttattgctaaaatgaccaatcttaaacctgggcatttggtattcactggtggtaatactcacatctacatgaatcacattgagcaatgcaaagaaattctccgccgagaacctaaagagttatgcgaacttaaaatagcatttccggatacgtatgaaacatggcagaccggttctcaggttcgttggttagagcagtttgcacgtccacaccactttgaattagttggatatgaatctcacccaacaattaaggggaaaatggcgatatgaatattcgatttgttcgtaaaggacatcagtctaaaaccgtattaggagaaatgcaggacgcatactctagtgatttgcctgaagttaatgacacaatagtttttgacgggactgaacaacgtgttttatctgtcattaaatcgtatgaatggtctataggcaaaacacaattaatctgttggtttgaagttgatataacatgaagatatgtcgggtggttaataaataccattccgacttcgatgtaaatatccaacgtggaacaatgtggggaaattacgtcggcaaagattgcgataatcgtcctgatgctattgcagcatttaaggacgattttattgctaagattcggaacggagaaataaagcgagagcacttagaaactttaagaggaatgagattaggatgcacctgcaaaccgcttccttgccatggtgatataatagctcttgtagtgaataaactttttaaagatacatttgaattagaggacttatgcaagtaattaagagctcaggtgttagtcaagaatttgacatgcagaaaatcattaaagtcctcgaatgggcgtgcgaaggaactaaagtagacccatacgagttgtatgaaattattaaatcccatctgcgtgatggcatgagcactgcagcggaagagcttctgacacaatgactgctcttaatatagactatgcaactggtatcgtcagagtatttgctacaaacgatagtggtttagcaagcggcaaagtaaatgcaaatgttctctatggtacagcaaataaaccatctaaggatgacgtcggacttggtaatctgacaaacgatgcccaagtcaagaaagctggtgataccatgaccggcgatttaatcgctcctaatttacatgcttctggaactggaactgcgtcgttttatattaatgcgggaagcggaaatgctcatatatggtttagaacaaataccaatgaacgtggtgtaatttgggcaactccaaataccgctgacttaggtcagattaatattcgcgcaaaaaccactggaaatacttctgcgggtgattttagtttccgttctgacggccgacttgatgttcctgtagcagttaaagttggtggggcagccatgctaaccaaagacgggaatattacctctggttcgatgtttggtttttgttctcgaagttctgtctttacgtaaagtttctgatactgattggtcgtgtaagcagacctttactacaaagaatggtaatgttgaaggcgtatatgttcgatacgggcaaaacggttcatgggctgcatggagagaggttgttgcaggggttcagccaattaatttaggtggtactggagcaacttctgtagctgctgcccgtaataaccttggtgttggtgaaggacaaacagtatcattcggtaatttagttacaaatgatttaactgcaaacggaaacgttagattagtcggaagactgaaccttggttctgcttctgcaactggtgtattgcgagctaacgaaactggtgcggttgttttaggttctgctaatggtcaaaacgttcatattagagcaggaagtgcagatacttctaatggtgaaacccgctttgagccaaatggaaacgttttagttggtggagctctaacgtcttcaggaagcttgcaagtaaatggcgaagccgcgatgagcagaagcttgatcgtttctcaaaacataaagaatactaacgataatagttttattctgatgggaaaagactccgatttaggtttcgttaaaaaatctaactcaagctctaagctggtatttgcttcaggaaaatcgtttattgtcgctaaatcgtcagcaactgccatagctaatccagcttcggaaacttacactgatgtgtttaaagttgacgcagatggaaaccaaacagtttatggaaactcagcagtttctagagctttgactgtatcaagtacagcaactattaatggcgttattaatgccaacggcggtattattgttcctactaccaagtatgtacaaattgccgatgctcctacgcagaataaccaagccagagcttccaaatggtgatactaaaccatcggctggccttatcgcacaagaagtgcaggaagttcttcctgaagcagttacaactgataacgataaagatgcattacttcgtttaaactacaatgcagtaattgcgttattagtcgaatctgttaaagagcttaaagcagaaattgaagaacttaaatctaaataatgaatggggcttcggccccatctttgaggagatatcatggcagtaacaggtcctaatgtaggaagctcagctaaagctgtaacaggagaatcttcaatgatcgcagctggagctaaattaaggttaggaacacctttttggatgtctagtatgattggacgaaatgtctggaatgctagtataactatttcaggtaacaaccctccgacaggacctagggttcgtggtgcttggaaagataagaacagtgctgcgtggaacgtattacttgacgctcgtggggctttatcaggaatttgggaaactgggtttaatttggttgcctttggattatcagagccaagcaaaacatctggttataatgatgctatcgttttagaaggtagcggaaattttaatgtaaattggcgcgttgatattgaagatggaagtcagttccattttaacagctctagagattatagaggaagacgatgctatagttgcacagacaacaatgctttttggaattggctttacgccaatgatggacgaactttccaattgtcgtttactgcatactaaacccagtaaggagagcaataaatagcttctgtaaggagagcaatatggcaagcaaacaatcaataccattttttgatatgtttcttgggttgctcgagctattattcaaagatggagccacgggaagagttctcttttcccgtgtttttgttgtcatacttttagcattgttggcgtttgctggttataagtcagatagtcttattactgcttacgtcgatagtacatatgacaagtatgataaactggttcaaaaggatagggatacccgatttgataatacagcactcgaacaactccagatagtacatatctcaagtggtgcagatttttctgcggtctttacgttcagacctaaaaacttgaactacttcgtagacttaattgcttatgaggggactttacctagcacggtagattctaaaaacctgggaggatatccaatcgacaaaacaactgctgaatatagcacgcatttatcgggtagatatttttggacggataaggaattcgttttcttaccaacaaaaagaaaaccgcctgaaatatcgtacttttggttacgagaggtatcttatcatggctttttggaagagtaaactactttgtgaaattattttgcccagggagaccagggcggcgggtcagaccagattgaagctagttcatctagaagagcttctggggctttaataccatacttctgtataattatacggtattcgtctttgatgtccttagaaatcactggatgaacttgaacctcttcctgaggctcttccatcatttcaaacaaatccatcacatgaaccactcagtattgcgatacagacaactactgctattatatccatcagctgctttttgcaacagcgggcttggagcaagtttgataaaatctgcgcccatatataaccaaactaacttagtaaattctattagagaatctgtgctatcaatgataatctttttgcctcttgaaattatgtcattttcgtattcatataagctagtttcatgacatacattggtgtatcctttcaagtggagagcatgcagtatagaaacaggacttcctggaactgtatctacgtcaaagacatgagcagtcttaataatgccataatcttcagaaggacaccaaccaaatgcctcgaatttattaattaaatctttgaaatctttgtcgaacgtactgtatagagcaacagtaaaaattctatcttggtctagacgcaaagctccttttgcatcatttcttgattgaactgcgcgttgtaagcttactttatagatttttgcgtttgccacacatagctccttcagtcatgttgttgtcttcaaaccatttatcatttgctttaattaaagcaggcgcagcttttagtaataacgctgcagctcttacacctctgtaccaacaatcaaaatgagacttctttaatggcgattgataccagggcttagtataacatatcattttcttctcctcagttagtagaaataatataccattcccagtatagtgtaatcatcctaaaatccacttaacaatgttgaagttatcaaactgggcatcacagtaaagaacataattcaacttaagtgctgcgccgtcgtctttaagttctgcttgcacttctgtttgtttgctcgggtctacgttttccacaatatgaccaacatctgcacgaatctgctgagctacttcagactcatcagcagtcattgaccactcgcataagtctttgtcatagttggccatggcaggaactgcagagcaacttgatactgcgaacactaaagcaagtacaatctttttcattttggtttcctcaagcagcttgtacgttaagagcagaaatcaggcgataatcaccgtttgcgtatactaacattgacacattgccatcagtgtttttgaatggctcaacaactactaaaactgtatcgccttcatctaatgcttttcgtactacgccatcacaacgcagattagcatgtggagacttaactactttgcttccaactaccataccgcaatgcggtacagtttccgctgattcatctttactcttaaagactacgtctaatgctttttcaattgtccacatgatgttttcctctactcgttttgtttcagtaaggccatagtatcatggcctttggagaaagtaaactaccttttgaacaattttttcaacaaaatgtcagaggtcagattcttggtaggtaggtatgtagcagagttaacccagatgccatcgctgttatacaccttgacctctccatagtcgcatacagataggtctgctttgttatatgcctcgatgcctcggtgaatggtatctgtggctgttacgacaaaagagtgacctgattggtcacggaccgcgctaaacacaaaaatcataaaatttacctagaattttctaaaccaaatacagcaattacagaacctataattaaataaaattctatcatagttcttccaggtctttcagatactcggcttcaggcgttgtcttttcccagtacttaacctcttgtgctaggcgttttgcttcctgagcaagtttcttcgcttcatcatcagtgatgtgatagatgttcattgaaacaagtttttcagaatggtctttgaatagttcattctgttcaatttctttagtcaactgcttacgagttttaccttggataacgatgttacctgcaataacctctttaataaattgagcttttgcctgagcaagattaaacgcctgcttagtttcagcgattttatgctcgattcgtttggcagtgaatgtcttacggacttctacaaaatgacgaataagctcaccggaagttttgaacttatcgttcagtttaccgttctcgtcgatgactttagaccgaatactgcaattacagaacctataattaaataaaattctatcataattcttccaggtctttcagatactcggcttcaggagttgtcttttcccagtacttaacctcttgggcaagacgttttgcttcctgagcgagtttctttgcttcatcatcagtgatgtgatagatgttcattgaaacaagtttttcagaatgttctttgaatagttcattctgttcaatttctttagtcaactgcttacgagttttgccttggataacgatgttacctgcgataacctctttgataaattgagcttttgcctgagcaagattaaatgcctgcttagtttcagcgattttatgctcgattcgtttggcggtgaatgtcttacggacttctacaaaatgacgaatcagctcacctgaagttttgaacttgtcgttcagcttaccattctcatcgatgacctccgtaagcgtgtttatggccagtttgagccacctgcttttattgaccacatttcacgttgtgttaacgcaaataagtacgataaagaaattctgagcaaatggtctgcagaagaaattactttgcttgattcttatattaagcatgagcgtgatttcaccatgacctatgctggaacaatgcagcttatcgagaaatatctcgtaaaagaccgtcatacaggtgaattgtatgaaactccgcagtttgcctttatgttgatcggcatgtgcttgcaccaagatgatggcgaaaaccgtttagcaaacgttattcgtttctatgatgcagtttctactaaaaagatttcattgccaacaccaattatgtctggtgttcgtactccgacacgtcagtttagttcatgcgtggttattgaaggctccgtaaacgtgtttatggacagtttgaaccgcctgcatttattgaccacatttcacgttgtgttaacgcaaataagtacgataaagaaattctaagtaagtggtctgcagaagaaattactttgcttgattcttatattaagcatgagcgtgatttcactatgacttatgctggaacaatgcagcttatcgagaagtatctcgtaaaagaccgtcacactggtgaattgtatgaaactcctcagtttgcctttatgttgatcggtatgtgcttgcaccaagatgatggcgaaaatcgtttagcaaacgttattcgtttctatgatgcagtttctactaaaaagatttcattgccaacaccaattatgtctggtgttcgtactccgacacgccaattcagttcatgcgtggttattgaaggttctacgtttaaccaggacacttctaagccattcagtttgtcagccgacttttacacgcatggaattattactattaaagcaaaggatagaggtgacattataagtggagttgagtatatcgaaagcattttaggtaatcgcggagaggtagttttagcatgagtcataacttagaatctgtcgttgaatcacaaagatatcttgaagcgttaatgaataaaatcgcgcttggaagtctgattgacatgtcttttacgtttactcaggaaacttctaaaccgtttagtctatcagcagatttccacacgtatggaattattactattaaagcaaaggatagaggtgacattataagtggagttgagtatatcgaaagcattttaggtaatcgcggagaggtggttttagcatgagtcataacctagaatctgtcgttgaatcacaaagatatcttgaagcgttaatgaataaaatcgcgcttggaagtctgattgacttgtcctctgagcgtaaaactggtggtatgaacggtgtcggttctgcgttaaccaacatcttttcagtatcttttactggtgcaacatgcgatggtaaaaatgaaatcatcgttcgttgttctaacggctcagaaaatatctcctgggaagaacacccagcaaaagataaagaattcatcaaagataagactggtactgtagtatcattcattccagatttcagtcactttgaaagcacaggattggctgagcgtaaaaccggtggtatgaacggtgttggttctgcgttaacgaatattttttctgtgacatttgtgggtgcaacctgtgatggaaaaaatgaaatcgttgtccgctgttcaaatggcgcagagaatgtttcttgggaagaacatccagctaaagataaagaatttattaaagacaagactggtactgtcgtgtcatttatcccagatttcacccactttgaatctgatggctt

SEQ ID NO: 31 - DNA, 165574 bp, unidentified
  source 1..165574: mol_type = genomic DNA
ccttcaatttcatcatctgcttggattaaatcagcaattgatagaccatcgttgtcttctggcataggctcatcggccaatttagccagttctttttccaaatcagcaaccatattgtcaaatgagcgggtcttcttcagtttaataccgaaggttttggcatattcgtcgagcttgtctttagcttcttttttatcgagtgcctgaatttctttaatatagtctttatctagcattgggtgtgcctcatgtaatgtataaatatgattgtatttataaactgaggatagtacagtgcacgacatccaagtcaaatttaaagattttagtcatgttcatattgagtgtgatgactcgattttctatgaactcagagactattttagcttcgaagccgatggatacagattcaacccgaaatatcgctatggacattgggatggacgaattcgtctgctagattataatcgtctcttaccgtttggtcttgttggccaaattagaaaattcgctgaccaattcggatataaggtttatttcgatccagctatattcgagcaagaaactctttcgcgggaggattttgataattggttgtcaactaaagaaatttattcaggattaactaagattgaacctcactggtatcagaaagatgctgtatatgaaggtctagttaatcgacgtagaattcttaatcttccaacatctgctggtaagtctcttatccaggcattacttgctcgatattatgtagaaaattacgaaggcaaggttcttatcatcgttcctactactgcgttagttgaccagatgattgatgatttttgtgactatcgtttatttcctcgtaatgctatgctgggtattcgaggtggtactgctcgtgattcgaatgcattagtttatgtatctacctggcagaccgctgttaagcagcctaaagaatggttttctcaattcggcatgatgatgaatgatgaatgccatcttgcaacgggtaagtcaatttcaacaatcattgcaggtcttacaaattgcatgtttaagtacggactgtctggttctcttaaagacggcaaagctaatatcatgcaatatgttggcatgtttggtgaaatcttccgtccagtatcaacttctaagttaatggaagacggacaagtaactgagcttaaaattaatacaatcttcttaagatacccagatgcagccgcaaacgctttaaaaggcaaaacgtatcaagaagaaattaaattcatcaccaatgttaagaaaagaaatcgttggattgctaatcttgctactaaacttgcagcgcgtgacgaaaatgcctttgtgatgtttaaacatgtagctcatggtaaagagctattcgagatgattaaagctactggtcatgagcaagtttattacgtatcaggcgaagttaatactgaaacacgtaatgctttaaaggctatggcagaaaacggaaaaggaattattatcgtcgcaagttacggtgtattttctaccggtatttctgttaaaaacctacatcatgtaattttagcccatccagttaaatcgaagattatcgtactccaaactattggtcgtgttcttcgtaagcataaagataaatctttggctacagtgtgggatatcattgatgacctgggtgtaaagccgaagtcagccaatgctaaaaagaaatacacacatttaaactattgcttaaaacatgcattagagcgtattcaacgatatgctgatgaaaaatttaactacgtaatgaaaacggtaaatctatgattaaatttgaagatatttacgaagccacaattcgtgaggctactatcgataacttcatgagtaaaattaatgcttgccagaccttagatggtctggaagaactcgagaagtattacgataagcgctctaaagaaactactcttgctgattctgatgatatcattgtgcgtgatgctttggcggggcgtagacaagctcttgaagctgattctgaagatgacgaagacgaagacttctgatataaaaaagccccaaccgaaaggaaggggcaaagccaattggctacatcaacactagactaaattaaaagttgcgtttcttgtaattgctcttctgtgtcttcagtgacaggcaattcaatcgcataattatagcaagctccgggatgaaccgggcctttgtctgtttggacaaccaatgcttcatcgattggtcctttacagacgacacataccgtattcgacatgattgtctccttagtttacaggtttatttattacgcgccagcttcaaactgacgaaggtcaataatatgcttaatgctaaaacctcgtgacttaatagcatccatagcatcgctacagaactccaaaagaattccccaatattgcaatttagtatctacacccaagatttctttatcagcgcttaaaacagttttcatttctgatttttcatatacatccatgcatacttcaccaccaacctcgccacggccagtgtaataatccaatcgtgctttaagattttgctttttgagggcatctaatcttaacatctcttttcgacaagtcgagtgcttacgcacccatttaccatacagaacagggttattagccgcttcatactgtagtttagtctggtcgataatcaaatcattatccaattcatcctgtaattcttctaatctcattctatctccactctactgtttctttggaaggactagtcccattatactctactgctagagttagcattactacgcatctgtatgcgtatacgttctagcgtatcagggtcgtctactatagaaaactgcacggtgacaattatagcattatcgtcatataacggaagcacatcaactgatagacggttaatcctaggctcataattacgcacggcagagactatattacgctttatcgtatcaccagttaatggagtcatgttttcaaataattcgtttgtgatatcacaaccaaacgctgggtcaaatggccgagacccctttcttgtggttattattccaagaaggctatttttaaccgatcgtgctcctaccgtttttgacacatcagtatcccaagcaagtcgcatctctgggtcaaggtcagaatataatttatcaatattgctcatgacataatcttaaagaattctttaagccccttaattacatgaatgtgagaaattccgcattcacaagtaatgggaactgccaattgaacctgcggcttcaatagcatatttttgatgttaactacatcttcggttgtaatagcagaatataaatcatcgatttctgcatcgtttaaatcattaaagtaaatctgctcatttccaactacgatatagtctatgcattttgatatcatcattggaatgtctgaatcgtcaaaaagattcggatacttgaactttattttaaatccctttaagtcataccagaggtcttctggaggatcgatttgcgcatgtgtataatttaatggcacaggaattttacgcccacaggtgcaattccaggtcacctcatgattaacctcgcctatactatgcgcccaaagtataactataagtaattccgattcttgtttgtttaacccagtagcattggtgcattctctgagcaatgctttaacacattcatcgattgtaccgtttttcttcgctgcaattaaattagcgtattcttctagtgtaaaagctcggcactggatattcttgccatttattcttgtttcaaatttatatgtgatgttcatatccactcctcttattcaattatttataaatagtataaagaggattaccttatggccaacatagttagatgcgaattaccagatggtgtccaacgttttaagccatttaccgtagaagattatagagaccttttattggttagaaacgacatgaacaccaagtctgaagaagaacaaaaacagcttatagcagaattaatggatgattattttcatgaccatcctgccgagtatcgtccttatatatttcttaaggtatttctttcaagtattggtaaaactaaaataccagtcagaatgaagtgcccaaaatgcggaaaatacaagcagtatctttttaatcttaatcagcctccgttgacaaatccgaaagtagaggttgcaggattaacgcttaagttcaaaaaacctatagaaataattgatgatacaggtaaaatgattttagacaacattatatctgtgaaggattcatctggggaataccagtggaatgaattaagcgatagcaataaattgaccgttatcgatgctatagatgttgaaaccttggaaaagattttatcacagatgaagccgtttaattttgagctaaagacgtcatgctgtgataccacgacagtattaaaatatgataacattgttgatatctttaagctattgctacatcctgacgagattttcacattttatcagattaaccatagattggtttctcaaggtaaatatgacttgaattctataatgaagatgctgcctattgagcgtggcataaccttatcgcttattgaaaaggaccttaaatcatgacaacacaaagattaggatatcctaatataagcataaaattatattctggatatgatgcgtggctagctaatagattcgttgaattagcagctacatttattacattaacaatgagagattcattacgcgggactaatgaaggtctacttcagttttatgattcgaaaaatatgcacacgcgtatgaacggtgatgaactagttcaaatatctgttgcaaacagtaacacatcaagaacacaaactcgaatttacggaattaaacactttacagttggtgttgatgataaaggcgatagcattatcacccttcagcttggaacgctgcatgacataatgaatctcaagttcagtagagcgttttttagttctgcatatgaaactataaaagaaatgataggcgcgatgtatgttgaccaaccattgattgctcctcctatcaacggaattaacgcttacgtcccacgagttccatggactagtactctcaaagattacttacgatacgttagaaacgtaggcatttctactgataacgaccaatttatttttgcctgggaagatatcactgggattaacatgatggattatgaatcaatgatatcccaggacccaaatgtattcatgttcggggctcctcaaacaataggtcagtttgctgcaggattaaaatatccattagcatgggattttgaatggcttgttaaatcaaatagatataatagaaatcccatgaaaaacgcaacattttatgcacactcatttgttgacaaagatgttacccgaattattaatggagaaggccaaaacagcgtattcattaataggtcaggaggatattctgacatgatttttaggaatggctatgaagaagcactacgcatttctacgatggctcaatatgacgggtatgctcaaactaaatgttacggtaattttgagctaactcctggaatgaaaatcaattttgttgatttaaaggaccagttcagaactgacttttatatagatgaagttatccatgaaatatcaaataacacatctataactaacttatatatgttcacaaatggctctgcccttgaacctgtagatttgattaaggtgaaaaatgaacttaaacgtgattcttcctattaagaaaatagtaataaacgaaaagacgatatcaattccaaaacttggattaaagcaccataatctgatgaaagatgttaagggaccagatgaaaacatgaatcttcttttggattcaatttgtccaggattaacagcagccgaatctgatattgttgtattacacttattagcatttaacaacagaataaaagaaactgttgttaaagatgattttacctacgatttgaataaggtttacatttgccagcgattaactcaacggttagatggtaaagaattcaaattcagagctcctcctcgttattccaaattaggttcagtagattcaattttaagcgaatttcttgaatcagtagatggaaaaccaatggatataaactttatgaagcttccagcttttgtgacaaagtgggctgatgacttagtaaacactatagccattgatggacctgaaggaccaatcaaaggcatgcttaacgtaatggaaatatttgaatgactaagaaatcagaaatgaattcaatgcgtagaagagttattgctgactcggctccacagaaaaaggctgagtctcaagctgatgctcagattaatacgctagaagatattggtcgtcgcttagacgaccaacaagcgtctactgatttgatttcggatgtaatagaaactaaatcaaacgaaattatcaaatcagtagaagatgtttcagctggtgttgaattaactgctgaagcttcagaacgcacaacagatgctgtctcgaaactaaatgatacagcatcgttaattaatgataagctcacgaaacttgccgatttgttatctaaaaagcatgatgttcagcaagatgtccaaaagactggtactggaacatcgttagaaacaataacggaacaagtacctgatgctccggttcagcagccgctagaggaattactcgaaaggcttattcctccacaggatgatagacgtcctgacgcggatttctttcctaacacagaagagcaagaggaaagaaaagaacctaacaaagaaactgaagataagaataaaaagtttcttgacctaaaatttggagaattaattaaaagcgttaaatctggttttggaaaaactatttcattaacagataaaattagcagcatgctgtttagttatactgttagcgctttggcccaaatggcgaaaactgccgctatggttttgggcgtgataatgcttatagatttaattaaagttcattttaattattggactaaactgttcgaaaagaactttgttgaatttaacaagcaagccaaagaatggggtccgctattaactgcaataagcgagatgtcgaatgaaatagtaaaatcattcgtcaaaggagattggggcggattagcaaaagccattggctcgggtttggttgatgtaattgataagctcggagaaaccattatgctcggaatgagtaagcttcttgctggaatgttacgcgcattaggatttaacgattcggcagataacattgaaggcgctgctttagacagatttcaaactgttactggagcagaactagatgaagaagatgctaaaatgagagcaaaatatgttgaccgtcaagaaagagaatatgacgaacagcctgaatggaaaagaaagctttctgctaaattccaaaaattcaccggtcagattgatgacgatgaatataataaattgctgagcggagagaaaaagcagtcagcgtatgcagacttgccagaagacgaacgcctcaaaatcatcacagctcgtaataatgctgaagcagaactcaagcgtacaaaagcatatgttgaaaaaactgatgcatctgattccactcgattagactctgctaaggatgcagtacaaagcacaaccaccagatataaagaattggagaaattatctccagaggttgcaaaagacttaaaggttgaattagaccaattgcaaaaactccttgattctaaaatatcagaacctgctccaactgccgaagctatacctgcagcagaacaacctgaggttaaacagtctgcttctattaaagccgctgcggatagtcgtgaagctgctcgtacacgtgaatctaatacacagtcgcaacctattcaggttaataccgctgtaaataagaatagcacatacgtttatagaacgcctccacagacttcaacagctgctcctggaatgcaaggcgctatgaaaacctcttaaggaaaaacaatgatttttgaagaactggccgatggccttgaaaacatcaaaaaatcaggaactcgaatttcccaaggtaaatctaaactgacgaatgcgccaaccactaaggtggcgcagtttccggccgaacgctcagccggaaacgattccgcgcaagatatgagagtacacgacttgtatcgtaacggattattattcacagcatatgattttaaaggaagaaccactcctgatttgcgttcatttagacgagatgtaatgttatcgtctgtattcgattcaccaatgtcagcactggctaattcatcaagttctactacaagtactgcgccggtagctaatattctattaccgcggtctaagtcagacgttgattcggttagccataaatttaatgatgttggtgattctcttgttactcgcggcggcggtactgctaccggtgtattaagcaacgtggcttctactgcggtgtttgggtcgatagagtctttaacgcagggattaatggctgataacggtgaacagatttataacacagctcgtagtatgtatgccggacccgacaacagaacgaaagtgtttacttgggatttaactcctaggtctgcagatgaccttatacaaattattcgcatctatgaaatttttaactactattcttacggtgtgacgggaaattcatcatacgcaaaagaagttaaagctgctattgatgaatggtataaaggaacacttaaatcggcagcaccagatggagctaaagtagaaaacacagtgtttgagcaaataacatcgtttttaagcaatgttattgtagtttctaacccaacgatttggactgttcgtaattttggatattctacatcaatggatggtagagaggatatatttggtccatgccaaattcagagtatccgctttgataaaacaccgaacggtcattttaacgggttagcaatcgctcctaaccttccaagcacatttacgcttgaaattactatgcgtgaaatacttactcttaatagagggaacgtttatatcggaggtattgaataatgtttactctcgaagaatttaagagtcaagcggctgacatcgatttccagagaactaacatgttctctgttgtattcgctactgtaccctctagtaaaacccaggctcttctaaacgactttggcggagagctgtataataatatgggtttagatggaaattggcttggattgaccccaggtgaattcaatcagggtataacaaccatagtgacacaaggaactcgacaggttgttcgcaaatcaggtgtgaatacattcatgattggcgcaatgactcaacgcgttgtacagtcgttgttaggtgaatttacagtaggtacttatctgcttgatttctttaacatggcatttccgacagcaggcttgatggtgtattctgctaaaataccagagaatagactgtcatatgaaatggataagttccataacgctcctaatataaaaatcactggaagagatatggagccgttggttctttcatttaggatggacccagaagcaagcaactatagagcaatgcaagattgggtaaatgcagttgaagacccggtgactggtctgcgaggattgccacaagacgtagaatgtgatatccaagttaaccttcatgctagaaatggattaccacatactgtatgcctgttctcaggggctatgcctgtagcatgtggagctcccgaatttacatatgatggagaaaacacgatagcagtgtttgatgtcacgtttgcttaccgtagcatgcaaacaggttcagttggaaaacaagccgcaatggattggttagaagataaaactattcagaaaattgagacgattaatccaaatcagggcttgagtgcgtctgcttcaagattatctcgtttaggcggggctggtggtggaatttctaatatcactacttcaacaagcagaataatttaggggccgtaaggcccctttgttttatgcaatgcagccaataaaccctggctcagtacgaagaagtttcatttcttcagtagtccaaactactttaacaggaataataccttctgctttaccgttaagaaccgcttcaacaaacgatggttcagttggcttacggaagatatcttgaataagaaccgtcggagtaccttcgttaaacccttcaagcatgataagaacttcttcattgaacttctccgcatctttaacatcagcagaccattcaataccgttaaagcggaatacatgtttcatatcaatttcctcattggtttgtgtaagtctatagtatcacgtccttgtgataagtaaacaactttatgcaagtttttctgggataccatccaggttgatagcaccagccagtagctccatggtgcgtgtgtagctaaccttatctgtggaacggtctggcgaaaagtaaatctcatttaaaaagcctttgaacttgctttcttcaagaggttccactttgccttgttccatcaagatgtcaccatcatagagatgaacggattcatcgatttgctctggaggaactaccgtcatttctaccatgaatgtcttgttattcgctacaccaactccatttctaaaaggagttccccatactttgttgactttcattgccaacccgcgaggaagaataacttcagcctcatcgctaaagcttgacaagacacccgggataactaccttaactttatcggccccatggataacgaatccaaacttaaactcatcgccataggcaacttcctcgcctctatcaactctttccaagttgtctgttccaataacagaagatactgcatcgatagttgtttctttgttttctaaatcagaactaggcgcatctggcattaatgaatcaccagcatttgaataagcaccaaagataattggacttaacgaagtagaaacatagttctggaaataaaacattttagactcaatgttatctttaaagtcttcatattttcctcgctgaccacgatacaaaagagtgcctggttcaagacgcaaacctttttcaaaggcagaatcgagcggacgaattttcttgtcaataattggatcgcctaagctttccataccaataagatagttattaacaaatgaataaccagaaccgcagtaatggtgtattgcatctctttcttcttcgcttaaacgagattgcatttcacggttatattcaattgctttggatatagaatcgccaacaattgacacataagcggatatcatataattgacaagattttggtattgacgtaaagctccgaaatcgtcagctggaggcatatcaaatccacgagtagctacttcaacgattttacgcattgtttccatagatgcaggatttttagcttgagcaataacgtcagcaacgtctgaaattcgttgctcagcgattttcattttgtctgaacccgaaggaatgaaaaccttccagtcgtcatgcattctagacatttggcctacaaataatctctcaactgcatcgccaaaattacttccatatccgccacgaacacgatagtgcttgatatcatcaacataaaaaggaattgatttttctaatccggctttgatatctttttggaggtctaccgtatcgccttctgcgtttagtactggagtgttagtagttaattcataccaacgttcacgtttattttctggccaatcttcatcaacatatgaaacaaatttgccgtactgtgctcggattaaatcttttcgagacactttcattttactcattacagcgagttcagatttcttgtcttctttttcgccaatggaattagccaatgcttcggctttggtaacgctttcgccggtttctttagacacataaatttcacctactttggaatctactttggtgtaaagttcttctgaaatttcaggaattccttcaatctcttcaagtttcttacctttacgaaccataatagaataagcatacttacctttgtagtaagccatatctttcattagattgaaacgaccgccggtgcgagtagtaatcaaccgagcaagaatgcgttgaatggctttatcctgtccttgcattttctttggattaaagcggaacattaccgcatcggctttaatttgtttaactactttgttgacagtttcaaagatggtattgattgcgccaatcgggtcatgacctaagccacccttaagagcaccaatgttacctttttcggatacagagaaaacatagacctggatgaatttatcacccattttgatgttcttaactgcatcaccttgaccagatccgtgtactaaacgaatcattaaattgttattgcctggtaccttaatcagaaatacctgaggcacctttagttttggtttaacgttctcgacaggatagattttgctattctcttcatcgaaaacttcgtttaaaagttccatgacatatcctcgtttgtttattctatttatacgaaaaaaggcccgaaggccttaattaattattgttactgtacgccaaacttgtagtccatttacagactcatactcttcaatgttttctttgaagtttcttaatgtgttaatgttattaaactcaagaacttcggtgtgaacagaaatacccccacgtccgtcagaagatttagcaatcacttcgtataaaactttcattttattcctgttgcctcagtaaagttaacaccaaacgcggcttcgaatgtattagccacttctttatcatatctacgttgtttaatgataggtaagaataaccctactgtaccatcatcacggccttcagcagttacccaaccattgcattcaagttcccagatagttcctggaagagaatctctgtttttccatagatgagtgcgatcaagttcatgtaattcttcgggcttatctttaagacctgacccagcgttaacacgaatacgaccacattctgatacgaacattaagccgcccattttaccaggttgtttcctatgctcgtatgaaccgacacatttcaaatctacggtgataacctctttaaatttgacgaggttcttagaacgcttatcttcccaataagcaccgatattcttaaggataataccttcgagaccttggtctacgtatgtcttatagatagctcgagcttcatggatgttatgtacgacatggttttcaattagaataaccttgtcatagcctttgctcatcatttccaatgcacggaaacgcacatcataagcaaatccaggaactttgccttcagaatatactacatcaagtggaacataatcccaaacttggaatcgcataccttctgcctcttcggcagagatagttcctttaatagccttattagccaagccgtttgattctgtacgagccgtctgttggaattccttagctttacttaactcaggaagttcaggctctttaaacatatcaaacaggtcgttttcttcttctttcacttcgacatgatataccaactcgccatcaatcatcacaccattaggatgacgctctcgggcttctttggtcatctcgataagttgacgcttaagtttatctagacccaggtattcattaccggaacgagtaagaagagttacatcatctaaatcatctccgcggatttcagcgaagcaccgggctccatcggctttaagctgagcaaatgcagggaacttaatatacgatagcgctttctcagagtaggctgatgctaacatctgtggcatctcaggaattaacttcttccataccttattagcaatagaacctgaagcgccgcaacgcatatccttaagaagtacacggactagtacactagcatcaccctcgttcatcttagagagcaaatctactagcccctggattgccatattaccagtaagtactcgtgctgccagaatgtcttggaggtaatctagaccatcagaaaacgtctttgaaggaacatttggatatttaacgggagtatattctggaactttcttaataaagaatttaaatcgcccggaatacgccagcagataagctcgctttaaatcaacgttatctttattgtcaatgagaatttgggttttggctttagaacccttagcatcttcaatttctttgatgatatcaaaaatcattattcacctaattcttttgaaagttcgcttacgctacgatgataagttaatccatcgatataaacaaacccattattgatgcattcattccaaatcgggcacgactttgcttcacgccaaattggattccaacgataaaactgattaacatggccataatcacatgataaccaacgtttaccaaccttagtatgaactacaaacatatttcctcctagggtatggctattataccatacccagattgttagcaattaatttggtggttatcacatgtaatacgaccgttattccaccagtcgtttccaggaggaacatgtggaccaggactaaacggaatgataggttgtttccaccaatctcctggaacttgccgtggaggccaattaaaaggatgtcgctctttacgaatttggtctttgatagcttcttcccacaatccagaaagagacttctgaggtttcttaacggatttcagagattccaggcaagttacaatttgatgccaatcttcaaccataattccaggagcagtcactgaaccttctcgctcaccacgaggcatatagaacacacgggtttcagtgtcttcaaatactttgctggccgcagcaatatgtttaggcaaatcatctacatagcagacgatgcgatcgccgtattttactttagccttttccagtaaagcatctttagattcatcataatcgcagaccatgatttctgtaaatgcatcagggaacaaagcattcagattgaaacgacgattaaggttagcatctactgaattaccaagagccgtgatagcgacaaaatcgtatttttctttgagcttattaactgtagctaaagcatcagcatacggagcaagataacgaataaaatcgctgttgttgtacttcagaagcagcttaacagctagttcttcttcacaatcaaacaactcagcgggtttaatgaatttttcagtagtcatcatatcaaggatatgctctacaggaaggttatatttttgggcaaagtaaggcagaccactttgccatttaacgatgattccatcaacatcagtcgcaattacaggttttgacattcggggaaattcctcaatgcttgtttaaatttggcgacgctatttgcggcaccggtgaaattgaaccagattaaccctggagtgtccgagggttctatatcaattaattctatattataatactcagcagtctttagcatttccctggtgatacgtcgggcaaccatatgaccgaagtgaggattaatagacatcgtcgttagcagcccttagttgagtaatcggataaagctcagattccgcatgaattgaacgattgccgtcaacccaattaacttcataccaaggttcaaccgagtaggctttaatggctggagccgtatcacatacaactccaggaattccatttgctaatcttactgtactgaagatatgatatttcatgcatcaagtctcactgcccattcaggcaattcaaagaaatccggagcatcaatttcatactcaacggtgtgttgtttaacgttagctgacatgatatcaaccatttggtggtttttcaaactgcaagaaaaaataccagctttagatttaggcacggatacaatcatgttaatttcctcaaaatttagttatgaatttttctttcggcattttggcatttgagccatcactgtcagaatacccaattggcatagttgcattaatgaattcaattttagcatttataatgttaatgctcagagaatctacgccatcaaccatacgaaattcaggagggcaatacttatcaatgtatgctttcacgccatttttattagcaggtgtaccatcgcgagtatcgctgataatggtttcaacctttttctttcgtgaatcatagaaagctgatacaatcatttcaatttcctcttaaaacggacgaatattaacgtgaaccacagggacagcaaaaggttgcatgattacaacttttgtgtctttagttgcattcagacgttgtacttttgcaagattaacagcttcttcctttgttaatccgccattgtaggtatcatttcctttatttgaggtccaaacaccccaatcattgcttccatcatcgtcggtcttcggttcatgttctttgtagatggtttcttcaaaataatgctgaaattcttgattagtaataatacaccacatatgggaaaagcgaacttcatctacactaacgcgtttgcattctccatctggcttaatgatttcaaattcaactaatccggtattttccgcatatttaaaggttctggtaattttaatcggattattaccgatttgctcaaaaacacccttgataagagcgcctggagacaagattggagtctttttaagcttatagaatttacctttttccattatcatttcctcaatagtggggccgaagccccgagttagttaaaacttgatttcgtttgaaacgatatcccagattgcttcacgttgttcttcggttgttttacgaccgaggatgtggcgcagataaattttaacaagcagctgacgatttgtgttccaagacggatgtgaagataaatcacgtttacgaacttcatcatggaatccaactttgatttcagaaccgttgaactgaatatccagagtaggaccattttcaaagctgaagaacacatagttatcttcccagtacatatcgatttgagctactgtgccattgttgtgttcccaaagtaaagtagtagatacgtcccaagcattgttctgtacgtatttgcggttgaagttagtgaagttcatttttattctccgtagtttgtttatctgtttgggtggtacaggtctatagtaaccttgttgagcctagaagtaaacaacttttttcattctgtggaaaataaaaaagggactcccgaaggagtccctgaacttatgctttcggcttaccaaaacgagaagcatcatcgcgaagaaccgcacgagcccgacgcatgattttctcaaccgtctgattgatacgcttgttcgacccacgcttgtagccagcgcgtttagaggtaccaacaacttcttttactgcagtttttgctttagcctgtttagccattttatcatcttccattttggagaaatacatgggagcacgttcttccgaggttcaacttctttcgacagttctttcggttgtagctcccgcaagccctcaaaggggtactatttaaactcttatctgttgcacaccgttagcttaaaggttccgggtccgatttatcggggataagatatacaccgatggatgtataggccttgaggcgtactcccgattggccatcgcctcggggtagcatgcacttgccgtttattttctagctgcactttggtagcaaatcaccgttggtttcgggtgttttacgtggggataaccaacaacgtccacatcatacgttacccatgcgtacacatggtgggcgtacaaattacttcagcgttaccacaaagtggcgaacagctttgcgagcagcagaaccaagatgcttagcatacttcagttcgtccatcgcttctaaagtatcacgaaattcagcttgtgctgggttcaggtgtttaaaccctttcagaacttccagtgcttctgcatagatatcgattgaagcaccgtagttttcgtgaccggaattccatgcattacgttggagttccagagctttagtaagttgtttgttcattgaatcgttcctcaaatgaggttaaaatttggtggacggtaaccgaggtttagctcgggcatccaccgcgtagaattgctcgggtaactaattgtccgacgcccaattcatattattatttatatacgcatgcaagggacttataatgacaagtcacaaacttctgccggatttctttaggtttcttcacacctgctgctactaacggatgaggtacatttctgatattaccaacaggcagtggagtcaaatcaccgacttcaacaaatcctttcggtacatcatcaccgatagaatagatttcacacatatccggcagttgtccttgttcttcttttccaagaataataccggaaggagaaacaatttcatcaccttgctgtgcaggttcagatacgagaattacatactcgcctagagctttaattggaagttccatgtgttacctttattgtttgaccatgtagttatattaacatggtcagtttaaagcaaattacttaccgatcatctgcagcagatgctcaactttcataccatttaccgagataagtttatcaaaggcaaatgagcgccaaccttctttctcggtatcatatactggaagtgaagtagtgctttctgctcgagcagatttagtagtgctttctaccaaatcagatggaataatgtctttatcacgagtacagcgcagagtacgaatagtgccatcagctttttcaaacacaatctgggattcgcccatgctcagcacagccttcagagtttcacgaatatggatgttttgttcagtagtcagtttcattttgatgtctctttaatagttttgataattacagatttgcgcttggataattcttttaataatcgaactgcttgatcttcaaatttaaatgttgctagtggtttccatttaaaccaataccggcgttctactgagtatgatataacaacatcaccacttaggttaagtttattaatttcaacaattctaagtttcattattcaattccacagaattctttaatgttataccaattcaacttatccaaattacgttttggaacattgaacacctcgattccagcagaacgaagaatatcgtcccagccgggttcgttcttgtcgtatgtttcgcagtatactaattttttaataccagactgagcgatggcttttgcacaatctggacatggagacagtgtgacatacattgttgctccatcaatactactgccgttccgggcagcaaaaagaatagcattaagctcagcatggatttcattgactttagaccatgcagagtgggctgctcgatgttctttgagcaatccgacttttttgacttggaatccgtcttgacgcaatcctgtagatttgtaaggaatttcaccaatccaaccttgttctgctgcatggtcacaacagttcacaccaccagaaggtgaaccgttatagccagtagaaataattcgtccgttcttttcaattactgcgccgactttccacgagcagcattttgactcttgagatacgagatacgcaatttgtagtaccgtcgacgctttcatttaaatcaccagataagttgtgttatttgttttaaccaattttaactcgtcagtaggagaagcaaaaccctctactcgagaagtacgaatacctgtgccatctggaaacggatggtttcctcgttcaagaacatcggaaaagacatagccataaagaggttggccttccttaacatcaacgttactgtacaaaatagcatcatattcttcgcgtggaattgaccaaacgccttggtcagaaccaataacagcattaattagacgaataccattttggctaatttctgctttaatgccacgagcatgttcaattaaaagagcttctaccgcttcacgtaaagtcattagatatgtcctaaaatgttagtcatttcaacttggcctgttccggttaaagccaattgagtatgttgattgctctttccattattaactgtaatgatataagcatcaacatagttaaaggatgactctcgtcggagagtcactttacttccaggaacccggtttgctacttcctgtgcgaagattttaaccttcgaaataaattcatcatgcgaaaatttagcgtcagacaacataagtctcaacctgttgggtttcaaaattagcaataattccaacgataaaccagtcgtgttcaccttcgccacaagaaattttaacttcagatgaaccgcctgaccggtcaatagaaaatttaataacttcgccgtttggaataagtgcattcatggcagataaaaactctgcatgcattttggctacttcagatggagtaaactcatctgttaaatgattagcaacaacttgcgtaaatgatacttttactacttcggaatactttggaaacattatactttcctctaaaaatcaccgtgggctacttgccagcattcaacaccgatacgacgccacatttcaaccacctgcgccctgtcatctactgcaagttttacattataacgatcagcaattcggtcccagaagatttcttcttttaccacatcgtctttgcgtgaatcgccttgcttacgttggaagtgttcgcctgtttcgccaacatggtccaacaaccatttcttcgtaatgcgttgataaacagtagggtcttctttagtaccagactctctgccggaaacagtaagaattttatatcctttgttacgaagcattttaagaaattcaattaccatttcctttggatggtctttaccacatttggccaagtcataaggagaacgatgattgttatctgctaacgtgccgtcaagatcaaagataactgcttttggcaatgattcgtctggaatgtacaaatcatatggatgcatcttagaatagaagctacgaagcacttcaataggaacagcattcgcgccacgatagaggttacgattaagcaattcagtccaaggaacatcaaatcgcttaatttcccacttgacaccatcaatttcgtatgccaactcttgccacttcttgatagtcgttggattaaggttagtatcagcaatgatgacacctttagtggtttccatctcgagtagagtcttcgccatagaaaactggcatacagatactgacttctcgcgaagcttagaatatttgtaatcattacgtttattaaggccaaagatgccttcacgcaaatcatcgcgagacaaaacataccaaccgggattagctgctacgtattcgttagcccaggttgttttaccagagcctggagccccttgtgtcaaaaccaattttttcattatacatccttaagagtgtcaataaaatcatgaagagccttagacttttcaccccaatttgcacgatatttttctttaattgctcgcaatggcttattcattgacagtatatcatttttgtcataattttcagctgcgcgtccaaacacgatgcacgccaattcattttcagcaattaatcctttaagtgtttcatactgttcttgattcactacatcaccattttagaaagattgcgatgcgccaatgagcgacgctttccatgtttcttcaaaaaattgttaacttcatcttgctctacactgccactttctacaaattggagtgccttaccaaattcaattgaggcatcttccaattcagaaattgcttccttcaatgcctctttacgctgaacaaactccaagaaatcaggatacatgaattctaccatgaatagtttaaaccacacatcaaacgaaattcgtgtttggtcattaagctcaaacactctttcttttaaagagccaggtacactaacacggactgtataaacatatccattagaaatattttctggtacaacagtagctttcttaacaagaggagttaactgacacgacccaacagctagcatatttctgagctgtgtatttttaatcgataaaagatgcgatgcgtcttttacaaagtaagaataaaaatgtgacggttccataatattttcctcttgtttagttttacttgatgcaacgtggttctttaagttcagaacgatagtaacatatcattccattagcatctttagtatatcgtaaaatgtcattcatccagatacgatattcttgcgactcttcaaacggcataccaacccaggctttaccgtcaattacttttacttcccaatgtccttcccatttttgaattgggtctggccactcaggatgtaaaaccgggacatctggtgcactagaagagcatccagcaagtaagctgataatacccatggctaatagacttcgtttcatctggtagcctcctggatatcttctgcaaacttattgaagcttgcattaatctgtttttcaactaatccaggtttggctgcaactacgtttccacgcttagaatctttattcatcttagcgttagaagtatcacgagctgctcggttttcctgatagcctttatatgttgtctgcagattttttatagaaacaccgatattttctatttcttttgcttgtcgatcagattcatcttggacgactttgaggtcagctttaagattttctacccgccacgaaagatatttcaatccaccgacggataatgctaacacaccaatcaacaaccaagttgtgtttattttgagcatagtttaaggataacctctacgatatcatcacgggataatcccgaaatgaggatgtgacgatcagaagtctcagaaggagaacatttaaagcaagcttctacatattctgccatctcagaataattcagctcgcgatgcataatgccaagacgatgcttgccataaatcgggtcaacgattacatagcatttgcatccgttagcatgaacgtttggctgggtgatgttcttgaacacctctgcgccatacttcgcgagatgattatctaggaaatcaatcatttcatctacggcttcaggaagggcttcggcacgctgctcgttcacacgattagtgtactctttttgcttcttacgagcagcttccttgcgcgccatgtgcgtccgtaggtcagtgacgaagcccaccttcttggtaccattccacacaaaaatcccatcagaatgagtaccatatttgttaacaaccatatctaaagtaattgcttgcatatccatttcaatatcctcatcagtttgtgtaagtttatagtatcacactctgacgaggatgtaaacaactattcttcagaaatttcaatttctttttcgtactcttttggaacatatcctgcccagtactttaagaacactctttcaaggtctttaagcagtttatctacatctacagttccttcgtacatgttcatgataacaccaaaaagatggcgctgattaaccgttgctttctgagcagcaatagcataatctttacgagcacgacctctgtattcatcgtagaacgactgacatagctcaagtgactttccgaggtaatctagataagcttgttcaaacgcagaaattttcttaattgcgtattcatctccagcaaaaagggaacgcaaatcgtcggaatttgcagatacgacagacgcaaacagtctttcatttgaagttattgaatctttagtgtgatgaagagcagagtaccattcggtcttaaccttaaatctctgtccagtgtttagaactgcaatgtacccttctacgccttcaagtgcacgaacaccttcaacccaagttttggggtcagaaattccgtaagcattaattaaataaggacgaatcttagcattagcgtacaaatcatcatatttaatatactcaccagttgtgttattacggacgtttaacacaaacagctgtggctcctgatatgctaaaacaacacgattattaggtgaaacaaattccatgtttaccgtataaccatctagcgctagctcaagaataacctgatgaagcgaagaatattcttcactgttaagcaaagctgaagcttgtcttgcctggtcactgtaaagagaggtttttgatttaaggtatagatacccatcatcaacataagatgatactagagagccatcagccttatccataatgtattctacatcgctaatatcaattcccattgtcattgggttttcattcaagttaaagaatttttccattggacgagaagcaattcgaattggggtatcgccatccatctcaaacatgatgccccggcactcaagagcatctggttttaaccactcgctgtagcttgcgtagtgatatgaaaacactctgaacttaccatccataggaccggtaaaatctttataaaagaattttgcaacttctgagctttcacacagattcattaaatttttatatagctctaacatttctttaccttatgttgtgtgttccatggaggattgaactttttaataaacataggttcttccaagtccatagtggatattgacatctcgccaagttcattattaatcaaaagattaaaacactgacgagcatagaactctacttttttgccagccattagtgcttcaaaaatcttggcagatttagccgaatcagaggtttggtctttccgattaatagcagttctataataatttatacgtttacgaagattttttgtcttaccaatgtaaacaagctcatcatcaactgcgatggcataaactacattcaacttgtttgctatcaaaattggtttgatggtaaaatctggttctaactcaagttgaacatattttataaaagaaaactcgttagcaatatcattcataataaagaggggccgaagcccctttccttataagtactttttaaatccaattagaacatcatcagtgacatcattgtcaatctgagctaccagataagaacttatctcaacttcctgaggagcagattggactgcatcagagttaagatattcgcgaatccaaggaataggatgacgagttggtgcatcagtaatcggacaaggaagaccacaactacgcatacgagatacagtcagatagtcaatgaagtcatgaagaattttaacgtttagccccggaagaccaccgtcgcggaaaagatgaatagcccagtctttttcttggcggttaacttccatgaagattttaattgcttcttgttcacactctttagcaatctcaacccattcttcgccatcagtgccagtttgaagttgacgcagaatgtactgtgtgcccttcaaatgaagttgttcatcacgagcaatgaacttcatgattttagcattaccttccatgatttccatatttttatggaagttgaaggtacatgcaaaactaacatagaaacgaatagcttctaatgcgttaataacatgtaagcaaagataaagagatttcattaaatcacgtttagcttctttaatttcgatattatcttgattaaagcagcgatttttggcattttcccatgcgcgagtcttcgctataacatcatcatagtaaacaccaattgactcagcgcgtttcatgattgcttcgtcaagaacgatttcatcaaaaattttagctgggtctacatataggttacgcatgatatgcgtgtacgaacggctgtgaatagtttcactgaacgtccaagtctggttccaagtatctaggcttgggtcagaaataagtgcagataaaactgctgctggagctcgtccttgaattgaatcaagaagagattggtatttcaagttatcagtgaagatattacgctgatgttctgggagtttttcaaactgaccacggtccatcataacgttaacttcttcaggacgccagaagaaactcaactgtttttcaatgagttcctcgaatactttatgccgctgaatatcatagcgtgcaattcctagaccagaaccaaagaacatcggttcggtcatgatatctacttgcttggtattaaaaactgtactcattctatttcctattctgtggtgttaaccatccgtggtctaattataattcccttttattaaagcttacaggccgcgcagtcagcagagtcttgaatcatatcatcgttaccggaaccatcacgggtgttatgatagtaaagagtcttaccgccaaagtaccagaaataaagcaagtcgtccatcattaccgacatttcaacttttcctttagggaaattcgccgggtcgtaataagtattagcagagatgctttggtctacaaatttctgcataatcagaacctggttcagataaggcttattaccctgtttcgcgagctgccaggcataatcataaagggaagcattgtgctcaacatttggaacgacttggttgaagcttccttcttttgattctttaactgacactggtccgcgtggtggttcaataccgttggtagagtttgatacctggcttgacgattcgcatggcataagcgcagataacgttgaatttcggataccgtatcgcttgaggtcttctcgcaggagttcccagtcacagacatagtttggagctgcgagttggtcaattctttcgttgtaccagtcaataggcagttcaccacgtccgtatcgagtttctttgtaaagcgtgcacggacctttttcgctagcaagtttaacagaggctttgatgagtgcatattgaatacgttccatcatttcgtgagtaatatcattagcatctgcgtatgaagcaaagttgcttgctaaccaagctgcatagttagtaatgccaacacctagtgctcgacggtctttagcttttaacgctttgtctacaggatagtcttggtaatccaaaaggttatccaaagcccttaccattacttctgcgatttcgttaacttcttcttggtcttgccagttgaagttgtcgagcacgaatgctgcgagtgtacacagcgcgatttcgccatcttcttggccaacatccgaagttggtaacgcaatttcgaggcagaggtttgattgcttaaccgtagccacatcacgaataaaaggaccatattcaccaacgttatctaccatgtacgggtaaattcgagcagtaccagcacgttcagtaaggaacaactcaaacagttcacgggctttaatacgtttctttcttacgtctgggttcttttccagctcttcgtataaagtacggaatgcttgtgcatcacggaagtattctgtatacaaagtaccaagacacacatcgggactaaacagagtgatgtaatcattcttaatcaaacgttcaatcatcaggttattaatctgaacaccataatccagatgacgaatacggttttcatctacacctttgttgttcttaagtacgaggaggttttcaacttccaagtgccagattggatagtacaatgtcgccgcgccaccacggactccaccttgggagcaggatttaactgctgtctggaagtgtttccagaaaggaataactccagtatgtttgacttcaccgaatccaatttttgaaccctctgcgcgaatcattccagcattaataccaatacctgcacgcttactgatgtatttcgtaattgacgcagcagcttcgttaattgaattaagactatcaccaccttcaataaccacgcatgaactgaactggcgtgtcggagtacgaacaccagacataattggtgttggcaatgaaatctttttagtagaaactgcatcatagaaacgaataacgtttgctaaacggttttcgccatcatcttggtgcaagcacataccgatcaacataaaggcaaactgtggagtttcatacaattcaccagtgtgacggtcttttacgagatacttctcgataagctgcattgttccagcataagtcatagtgaaatcacgctcatgcttaatataagaatcaagcaaagtaatttcttctgcagaccacttacttagaatttctttatcgtacttatttgcgttaacacaacgtgaaatgtggtcaataaatgcaggcggttcaaactgtccataaacacgtttacggatttcaaacattgctgcattggatgctacatattgataatctggctcatcaatagaaatgctattcgctgctaccttaacgatagtcttctggatatctgcagtgctcatgccatcacgcagatgggatttaataatttcatacagctcgtatgggtctactttagttccttcgcacgcccattcgaggactttaatgattttctgcatgtcaaattcttgactaacacctgagctcttaattacttgcataagtcctctaattcaaatgtatctttaaaaagtttattcactacaagagctattatatcaccatggcaaggaagcggtttgcaggtgcatcctaatctcattcctcttaaagtttctaagtgctctcgctttatttctccgttccgaatcttagcaataaaatcgtccttaaacgctgcaatagcatcaggacgattatcgcaatctttaccgacgtaatttccccacattgttccacgttggatatttacatcgaagtcggaatggtatttattaaccacccgacatatcttcatgttatatcaacttcaaaccaacagattaattgtgttttgcctatagaccattcatatgatttaacaatagacagaaccctttgttcggtcccatcaaaaactatcttgtcattaacttcaggcaaatcgctagagaatgcatcacacatctcgcctaatactgttttagactggtgtcctttacgaacaaatcgaatattcatatcgccatctttcctgtaattgttgggtgagatttatacccaactagttcaaaatgatgaggacgtgcaaattgttctaaccaacgaacctgagaactagtctgccaagtttcatacgtatctgggaatgcaatttcaagctcacaaagttctttcggttctcgacgaagaatttctttacattgctcaatatgattcaggtaaatatgagtattaccaccagtgaataccaaatgcccaggtttaagatttgtcattttagcaatgatatgaactagtgctgcatatgacgcaatgttgaaggggaggccaaggaatacatctacagaacgctgataccattggaggtcaagatgcccctgacgaacgttaaattgatacagcaaatgacatggtggcaatgccatcttatccaaatcaaccgggttccatgcagtcacaatctgacgacggtcatatggaagttgcttgatacgatcaatgatcaatttcagttggtcaacacccatgaaatctcgccattgcttaccatacacaggtcccagttcacctccggaataccccatgtcttttgcctggttttcatagttgtcgtcccagacagttttaccttctagtaatgagtcatgctgaataagacgtaattcatgcacattagtagacccacgcatgaaccaaatcagttctgcaatacacgctttccacgcaagacgcttggtagttactgccggaaatccttcttgtaaatcaaaccggtgttgagtaccaaactttgcaatagtaccggtaccagtacggtcatcagtctcgtatccattttcaaaaatatctttaattaattcttggtattcacgcattaaatttttcctgaagaggagtaaagaaaagctggtctccacgcttttcaaatcgtccaataatagacactacatcatcgttaaccgtcacattaccgtgtgacattccgatgaacatcttcttataatcacgctcaatttcaataggtatatttccatttcggttatatactgtagttgaaccgttataagtgctaagaccattataactgaaaactagaagatgaataccatgcttaaatggaaatcttttccacttcttttggactttgtcttctgatagctgagtgatatcatagtttgcgctcatagaccacctctgaaatgttagtcacttcatcaatatgataccagtgattttctttagtaatgaatcctgattctggccaagtaggagctgctacaaattcagcaggtagagtgacatcagaattcactctatgactttttctgatggttgtttggataaccctatctgcatatggatatgccttctggatgattccggcaccacctatgatagaataattaaggtctctattaaaagtgatagtactgttgtaagaagtatgagcggccataatgtcaccacccaagaaaccgataaattctaattcacttacataagcatctgcaaagaagccatttttagcagttgccaacgcacgactcatgtcttggacaacgattgtcttacgaccaggaagaggtttaggaaaactcataaaagtctttgctccgcaaatcaagatagtatctcgagtacgattagcaaagtttttcatgtcctgggaaatatgtttccatggaagaccatcgcctaaaccgaaagcattttcgtttttgccgtctacagtttttgtaggagcaaatgcataaactatttgaatcatttaaacctcagcaaaatttagacatataaaaataatcctaatataatgccgctaataaaagcggcagtaacagaaattaacaaaactactaattcagcctcaatcatttcttggccttagcaagtttaaatgcttttttgaattcttcaacatcttcaacaggaatccagaagcctgagccatacccatcttcatagcatgggcagttatcacagtaatcattccaatagacagtttcaccacccatagtgaatggagcttccatctggcacagtacttcttcaacacgctctaattcttctgggtttttgtcgcaaatgcagaaattccatttaccacgatattcagaaccaagtttgatgctttgacgttgaagtttcatttttattctccagtagattatggagctatactatcacaagcatagctccttgtaaacaattattcttcaaaatcttccataaagtaatcaatgtcgtcccattccagagattcaagatatgcaataaccttttctctagaaccgcggaggtcaatatttggccaaccaccaccaggtccatgacgcataatcaagtcaaaatcaataccatggtcagtgtcataaaaacgtgtaccatctgcatactccaaatctacacaaataccgtctttgttgataataggagttgctacgatatcaatgtttaatttacccatgatgttttcctctactcgttttgtttcgatgtagatatagtatcactcatcaactggcttgtaaacaattttgtgaaatattttttggaggaataaagaaaaagggacccgaaggtccctttatattagaggtcgttcaaaatatcattcagatcgtcatcgccaacactgtcaccagcatcgcccatgatatcgtctgcggaacgagaagaggtcggtttggattcaaaatcagacaggtctttgtcaaaggaatccaggtcatcgccaattttatcggcttgagctgctgcttttgccgcggcaccaccaagagctgctgtacccataatctgtttaaatttggcttcgttaacttcaaacgatttaaactgagatggagcaacaatttcgctgaggtcagccatattttcggtcaggaatttctgagtttcttcatcattgatgtttgcaatctcggactgaccaaggaatttacattcatcatagttctggaaaccaccgactttcttaactttcatgacgaagtttgcaccttcatacacgcaagttacatcaaccggagtttcacccatatcaacatcaacttcaaccatcgcgttgattttgtccataattttctgaccgaaacggaatttgaatactttgccttcgttttctgggttagccgggtctttaataaccaggatgttagaccagaaagaggttttacgtttcagaagcttatattcagctgggttgctgttataagaatcgtttttactcagatgagcacaaaccgggcaagaatcaaaatcaccgtgggtagaagtacaattttcgatgtaccatttaccgccgtgtttgaaaccgtgattgatcagttttacaaacggtagagagttttcatctttaccaggcaggaagcgaattactgcttgaccattaccagcattatcggtcttcagtttccattcgtttttgtcttcgttagagaaagaagaaccacctttcagaccagccagttgttgttgaagttgagcaggatttttacgcttaaacatatgattacctttttaaatttaacagttgttgttgcaacatgggtccttgcaactggacgatagattaattatatactaatttctttacaagatttgattatgctaataaagagtttcttagcttcagcaccgtcaacgtttaaaagttttttataagcttttaatttagtggagtaattactccaaactaaattatccgttgcagtatcatgagtatttattatatctaaaaacgagtcaagcatgatgaatgtctcgaaagatataacgtttgactgaagaagtttgaacacataagatgttccgactttctcattatattcaaaaatatcatgaagcttatctacattaactttcttggcaaaatagtaaatgttctttacatcttccgagaacgttgttttaatctgcttcaatttacctatatattcacgataaaacacgagggcatcagcatcactgatatcgccaatccaagcatcttggttagctacgaggttactcatgaatatcagtgttaactcttttaatgtatatttctcagcgagtttctcaaagaaatatttgtctctacgcttttgataagctttatcagagacccgcataacccagttatacttaacaacgtcatatcgaccggcaaagtgttgtttgagcattaaatataaaagataaacgctcttaccgttaacgtatctgttattatttccaggcatgcggagacgaatcataataaaaaatccagactattcgttttatgtgtttgactaaatgatggtcgaagcatattttcttctaatgcttctgacataattttttctatgattgcaggtggaatatatctattgaagtttccctcaggaatagaattttcttctaaccactgagttgttgcttcaagataccccattccaagttctgttaccatagactcaatagtaaatccgttagcttgcttatctaacagctgattaatggattcagagggggatacctccccctcgtctttaagcgaaaatagagtcataagcttctaccacttcatctttttcagtttcaaaacgatcgcgtgtacctttatggaacagggcaagcagctgattaaataatttgccttctacaccaagctctttcttggcgcggtctttaatgtctttgttaagttcaagatagctttctgctttcaacttattacctgaggcttctttaatcatatctcgcagagcctgtccatgtaccgcttcatcaaatactacttgctctttttctttcttagccattatattcaccttaaaagttgttaatttctttcattaatttagacagaccggatttaacaaagtagctataaattttaccacgacccggtaattgatagttattataacaatctaaaatgttagcaacaatgtcttcgcggatgtaatcaaaatcgattaacacgcggttttccaagaaacgcttatactgttcttcagtaagcaaatctttaatgttttcgccagcatcaagacattcttcaacaaatgtcattttcgttgaaggagtacgctcaccatcaacatgggtgtaccaaaaatctgaacgaactttaatagaagctacgttatctttcttgtcacctttaataattttaaccatacaatctaaagcaggagaaccggttttagattttaccagtttcttctgcattggtgaccattgcttaacattaggatacttatgcaattgagtaaagtcaccatccgaagaaacaatcatgactggatggccttcgagactgaactttttggttaataccgcaatgctgtcatcagcttcagctttatcaatatcaatgacataataaggcatatactgcttaaattcatcaattacagtacgaagaccttcaaagtatccatcccagtcccaattggattcttcacgggctttagcacggttctttttatagtaatatgctacgtcccgacgccaatacccattaactgcgttatcaacgcagatgacaattttagtgtatccatctttcttccacttaaaagcattaaattttaaagtagaaagaataagatgacgaaccataggagttgttagtttgtcaccttctttatacgtatgaagaattgtcgccattgcaatttgtgacaagtcaattaaaatgacgccttcttttacttggtcttcttcggcgaataagcaatttaaatcagacatttgaacctcgttcaattagttagtacagccattataaatacttctataatgaagcataaccccataggagactctatgagcgatttactgaaacaacatttccgtgcaacgaacggcttggacgcaggcggaaataaagttataaatgtggcacttgctgaccgcaacgttaaaaccgacggcgtctccgtcgagtacgttattcaagaaaacactatccaaaaatatgacccgacacgtgggtatctcactgattttgctgtgacttatggacgtcgtatctggattgcaaataaagatattccaaagcctgctggagattttaaccaggcgaattggacttctttacgtgttgacccgaactggatttataccgtccgtaaaggagagtttgaaattcaatctggtcagttcatcaacgttgactctaacgctgcaggtaatgctacattactgcttccgttagcaccagatgaaggcgataccattgtagttcgtgatattggcgggcgtcctggctataacggaatcttaattaaagcacaagatactggtgcgtctatcgtatttggtgaatcgcgtctgcgtgaggtaagacttacacgtccgtattcacaaattatgcttacgtttagtaatggtgcatggcgtgcgagtttaacagattttggcgatactgccaagatggtagttccgaacgggattgttccgacgcaagttcaggcaggtgataacgtagttcgtcgttatacttccaactcagagatttttattactctgccgttgttcgctaattcaaacgatatcatcaattttactgaccttgacggtacatcgccaattaaccatatgactgtgcgtacgtttgacccaactatctcaattgggactcctgggcaaacagaggttcaagtacgtacttcaggcaccggatttttggtatatgactcgattgacaaaatctggcgtatttttgaaaatgatttacgcaccagagtaagaataattacttctgatgttactttaatgcctaatgagcatatttctgtatttggcacagataacaataccgttaaaacaattaacgttactttgcctacagacgtagctgttggggatactgtcacaatcgcaatgaattatatgcgcaaaggacagactgtagtaattaaagcttctggtggtgatactatcgctagcaatttgaatttactgcaatttccaaaacgttcagagtatccacctgatgcagcatgggtgcaatcaagctcaattacctttaacggaactacatcgtatgttcctgttcttgggcttgcatatattgaagataaagcatccggaaaaagctattggattgtaactgaatctgaccctaccgtagaacgagttgatgctaaagacaatacaactagagcccgattaggtgttattgctcttgctacgcaggctcaagctaatgcggagtcaaacccagaaaaagaattagcaattacgccagaaaccttaaatggacgtcgttctactgaaacccaaactggtatagcaagaattgcaacttccagcgaagttaatcagtcaacaactgcttcttacttggataatgtaatcgttactcctaaaaagcttaacgaaagagctgctactgaaactcgtagaggtttagcagagattgcgactaatgctaaaatggatgcaggaacagacgattttacaattgttactcctaagaagctgctttatcgtactacgtcggattcacggttaggtgttattcaattagtaaaaactggtggtgctcctaacacaactgctgatcgttcttctgctggcaccggtatattcgatcattctgattacaaaaatgcagttactccaaaaactcttcgtgagtataaagctactgtaaaccaatcaggaatagtctggttagcaactgatagcgaagttagaaacggaactcctgcttcttcaaatattcctacggttgttacaccagaatctttgcataaaaaagttgctactgatggagcaattggtttaatccaaatagctacacaaactgaagttaatgctggcggcgtgactaataaagcagttacacctaaaacattaaatgaccgtacagcaactaacaatcgtactggtattgctcgcttcgcgacacctggtgcccagggtgaatttgaagctggtacttcaagtacagtaatggtaaaccctaaattactgttcgataaatttgctaataccgatcgtatccaagttaatactagttctggcttaactattactgggaacctctgggaccattataccatcaacatacaggaagcaagtacttctcaaagaggtacaaccactcttgctactgctgctgaggttagaactggaaccgacgctaagaaaatagttactgctgccgcgttacatgctaaaacagcaaccgaaggagctatcggtcttgctcagtatgctacacaggcacaagttgatgcaggcacattaagtgatagaattgttcctcctgcttacttgaaacagactattcaggtaacagagtcatggcaagctacagacagcgttagagggaccgtgaggctatctacaggcgatggaacgtggaaaggtaatgataccaatggctcaactcttccggataacgggtatgcctctaagggcgtcgcagtgtctccgtatgaattgaaccttacactgaaacattacttgcctcgtctcggtaaagcctatgacacaggaatgttaggtggtcaaacaccagacaaatatgctcgtcgcgatatagcgcagactatttctggagcttggacatttagtcaggacacttcatttagcaataatatttctgtcaagaatgttatatatgctaatggtggtgaagttaaaatttctccaactgctgacactggaattgtgcatgttcgttttcaaaatagagacggaagcgagcgtggtataatttatgctgagcctcaaacagcttcagccggaaacttaaaagttcgcgtaaaaaacggaacaggaactactgctgcaagccagacctacacatttggcggtaacggtacgttagaagttcctaacgaagtgtcaactaaaactctgaggtcttctggaaatgcaatagttggcggaactgttatggttaaggacgttcagatgcttgctgtcgagggattgaattcaatattcggtgcccaatcacagtccgcatttattcgttcccgtgacgctgatacacaaatttttgcacaggattcaactggatcgtatccaattttaactaccaaaaactacgcaagattagctgatggccgttatgtcaagaaagctggtgataccatgaccggcaatcttaacataaatagttctgctatcgtcattacgggttctgaatcctggtatgtgccaacgaatgaaactgtaataagacaaggttcttggactgctgaaatcaaagacgctactaaattgaaaggtcttcgtggttatatggttccaatcagaacaccgattgaccctggtaacccaagcactttagtagtgactgggtatgaagaaaaaactgcagctggtggtgttttaactcaggttggtgtaactacaaacaatacttatcagctttggacgccttatcctccgacaaccgaaactgctgataagcgtttcgcgcatactgtgtggatgaggatttataatccaaaccttaataagtttgatgattggatgcgagtatttacatctgctactcctccaactgcagctgatatcggagctccgagctcagtatcaactcaggttaaaacccttgaagttttggaatggattaagcttggtccagttaaaatctggccagaccgtccaaatcaaactctcaaatttgaatgggtaggtgattaatggctgaaccaattttaatggcagccttcggcgaggatttcgtggaaacacgaatcctctctgaggcaaactctgtgaagtattggctaaaagcttatgctacgcattctaatgctgttccgaataagccagaattgaatattaacggtgcctttgatatgacctcctccttacggagggggattaatgttgttcaagttaatggtgacaggtttattaactttaaaacatttgacgttaccactgatgataacaacgctaataacaaagcgtttgtagaatatgcaaatggattaacttcgggattgtatattataatgacacatgaacgatttcaatccagcccgctaatagacaggtggtttaaaaataagtggtctgcttcttggccaggttctgatttttccaaatcatttccaaactctgcttatgtaggagtgctcggagcagcaaaaggacgcatattaattgagtcattttacggaaatgatggaaaggttaaagaagattccagagctaaagtcgatactgtatatgataacgttggcgatgtaggatatacaggctgcccttatcgttccattgaagacactaatgagtactcggattctactggatatgaatataagcgatatccagttcaaaatgaatctataagcaaaatagctgattatggactatctcctggggattctgtatttttagtatgtgatatgtatgcatctaaaagtcttcttgatgctggttctactactagagctagcctgcgatggttcaaaggctcatctttattatcttcaaacgtatcattagaagttccaaaaaatggagctgatagatggttaagatttgaaagatttaccgctgttcctacagacgctgatggatttactattgtggtatcaagatatccaaaaacgtctgtagttggtgactctaaaatcaaaaaccttgtatttgttcaaacctctcatagcgaaaaactgaatagtgttgttcaagaatttggtgtgaatggtataagaatgaataaaggcgttgaaggaggaaccactatgattatggaacttccaaattcaaaagtcgatccgagcggtgttattccagttcaatcgttcagagaaacatcagactaaggaagccttcgggcttccttttttcgtataaatagaaaatatataagaggataaactatggccgatttaaaagcaggttcaacagttggcggaaatcctatttggcacgcgggtacttttcctcttgtgccggcaggaaactccctaacttatagaggtaagaaggtttatactgagatagataaacctcaagcaaatgataacgacttcgtgtccaaatcccgtggtggtacgtatacaggcgaagtaaaaatagcatatggcggctctggcaagttaagcatgggtccgttggcaaatgttggtattagagtcggtggtagtaatggtgaagttcttatcatcggagggaattcaacaattcaattgcgcggcggcggaacggaagattccagcggcatagttgaaattgctaaaaatggtaacttaactgcacagactggtagaattaccgctaacgtatttacttctaaacaacagccatctggcgtagacgatttaactcgtaaagattatgttgatggacgaataaatactgttagcaacgtagctaacgcagcagtcaagaaagctggtgataccatgaccggtgtacttagggctaacgctggcgtagttatagtaaataaagcaacatccggtgaatatgctcctagattagatcaggttatttcacgcggggtaacaatagattttggcacatactaagaggtagccatggccgatcaaaacttaaaacaaatacaatttaaaagaactagcacagagaataaagcaccaggtgcagatatcgtagcccgtggcgaaatcgcgttgaatacccatgggcgtactctcgctatctacaccaaagatgaagccgataacgttgttcagcttgcaggtaaaggtgttcctttcttagatactgcaggtaatcttaatgttgatggaactactacgttaaaagacaatgtaaccatttctccgaataaagcgatcaattttgaagcttctgatttaagtggagcattagtacgtcatatcaccggtaagtgtgctaataacgatggctggtacattggagctggtggcgcatctgaccagggatttcttgaaatcggtacgtatgataacggaaatgaacctatctattttgttcaaagaactggtggatcggcgcaagctgaagttcgtcgtttagcattattagatgggtttggcgatacctctatacctggggaccttcgtttaactaataaaacggtaaaaatttcaaacggaagcactcttactttggaaatgggtgtaggcgctaatgacgcgtacattaaaaacctgagaggaaccggtgttcttcaattaactaatgacagcaatttaacgttcagaaattcccaggtttattatgccatgaacggaagaggtcctggtaaatccggtactcttctgacgaatgtagaaaacaatcgtcaagcctggcaatacgtaatttctgctgcaaccgctggaactccgcgctgggttaaagtagctacaattaaacacccaggtgatgcgtcttcacagttagatttaatgattacaggtggcattgattctggacaaggaagacattatgttgattttatcacgttatcaggacgaaatttaacatcttggagcactaacaatttagataactgggttgaatggcgtcgagttggttctcctgataaaggaaagattccagagtattacgttgttaaaaatgatgctgctacagattcagaggcttcatttgatttttacgctaaagttcctcgatacggcaatgggctttatgttacagtgctaaacactgctggatacaacggccaagatagcggtaaagtaattatctatgaaaccaaccaagacactggtggatatggaccagctggaagtattcttgtttcaatgaaacagatttttgacagttacgcaaaaccagatttcggcgatactacgggtactcttccagttaaccgtggtggtacaggtgctactagcgcaggagcagctcgtaataacttaggtcttggtactgctgctgttcgcgacgttggtgaatctaacggaaacgtgatggaagttggtgcttatggcttaggcggtaatggcggtaaatcaatcgaaaacattacctctaatgctgatatgttgacccgtttaaaagcatatggtggtactttctggcgtggtgttactaaatctggtgttagtgttcaaaatggtctttatagccatggctccggtatttttatgaatgctggcgataccatgtcagctattaatatcgactacgccagcgctaaagttcgcgtatacgcagctaacgacagaagtcttgctgagggaaatgttagatacaacgaactttatggtacagcaaataagccatctaaggctgatgtcggacttggtaatctgacaaacgatacccaagttaagaaagctggcgacaccatgaccggtgatttagctgcacctaatttacatgcttccggcaccggtactgcatcagtgtatgttaatgcaggaagcggaaatgctcatgtatggtttagaacaaacgccaatgaacgcggtgtaatttgggcaactccaaatacagcggatttaggacaaattaatattcgcgcaaaaactactggaggtgtttctgctggtgattttagcttccgttctgacggtcgatttgatgttcctgtagcagttaaagtcggtggagcagcaatgctgactaaagacgggaatattacctctggttcgatgtttggtggtaaccttaacaactatttgacttccattaaaaacgacatcactgctggcgataataagcaagtaagtaaaactggcgacacaatgaccggtaacttgactattaacgctaacttaaaagtcgaaaaccctaatggaacaatggctgattttggttcagagaattcggataagtatagcagaataactcttgctcgcaaagttggtagcggtgctgccgtagcaatgcttaaagttactcctgaaggacacgtgcaatttggttatcaaactgcagtttctactccagctcctagtaaatatattctagttaaatccagcggtcttgaggtagaaggggatttagtttttaatcagacatatagcggcgctgaagaggcagttgatatttccgataagactatcgaccttaatagtctgattattagacgatcagatttaggtactcgtcagttatataaatgcgtatcttctggcggtggttctaagataacaaacaaacctacatctgatggtaactttgttcttgaagttctgtctttacgcaaggtttctgataccgattggtcatgtaagcagacctttactacaaagaacggcggtgttgaaggcacatatatccgctacggacaaaatggttcatggtctgcatggaaagaagttgtttctggtgttcagccaattaatttaggtggtactggagcaacttctgcagcttctgctcgtaacaacctcggtgttggtgaaggacaaactgtaaaattcggtaatttagttacaaccgatttaaccgcaaacggaaacgctagattagtcggaagactgaaccttggttctacttccgcaaccggtgtattacgggctaatgaatctggcgcagttgttttaggttcttctagtggtcaaaacatccacatcagagcaggaagcccagatacttcttctggtgaaacccgctttgagccaaatggaaacgttttagttggcggagttctgacgtcttcaggaagcttacaagtaaatggcgaagctgcgatgagcagaagcttgatcgtttctcaaaacataaagaatactaacgataacagttttattctgatggggaaagattctgatttaggtttcgtcaaaaaatctaactcaggagctaaactagcgtttgcttcaggaaaatcgtttattgtcgctaaatcgtcagcaactaccatagctaacccagcgacggaaacttatactgatgtgtttaaaattgatgctgatggaaaccaaaccgtttacggaaatgcccaagttaacagacagctaacagtttctagtgcagcaactgttaatggtattattaatgctaacggcggtattattgttcctactaccaagtatgtacaaattgctgatgctcctacgcagaataaccaagccaccaacaagaaatatgttgatgataaggttgcttctgctattagtaatgctggcgacacgtatcttccattagcaggtggtactgtaactggtaacttagatgttaaaggaactcgactcaaaacttggaagttagaggttgacggtggaggcgcagtactcggcggaactattgatgttgttggtaaagctaatttttctaatgagcttacggctaatacttctattaacgtcatgaatgatggaaatagtcatttgttcttccgtaaagcaaatggtacagaaaaagggctgttatacgccgatgaccctggtaatgttagtataagagcaggtggtggttctggaccagtatggaatttctggaacagtggttcatgtcaattcccgggtgctattagtaactataacggaattaacagcaccactaattaccctggtggtaataaaaacgactatttaaacacggcaggattagtgtctagatttagtaatggtgcttatacttcgttatatttccaagaatatgttggaaattatcaccaggctattcttaacgtcaacgggtatggccaagacaatagcttttactttagagctggcggtgatttcatatgtacccgtaatggttcattcgataacgtagagattcgttctgaccgtagagctaaatctgatattaaagttattgaaaacgctttggaaaaagtagagaccttaagcggtaatacgtatgagcttcacaacacatctggcggtactacccgttctgcaggtttaatcgcgcaggaagttcaagaagttcttcctgaagcagttactcaggataatgaagaagatggcggattattgcgtctgaattacaactcagtaattgcacttcttgttgaatctgttaaagagctttctgctgaggttaaaggtcttaaagcggaaattgaagaacttaaatctaaataatgcatggggcttcggccccatctttaaggagatatcatggcagtaacaggaccgtgggttggcagctcagcaaaagcaaccaccggcgaatcatggatggctcaagctggagcaaaattaaggttgggaacaccgttttggatgtccaacatgataggaagaaacgtctggaacgctagtataacgatttcaggtaacaaccctgcgacaggacctagggttcgtggtgcttggaaagataagaacagtgcttcatggaacgtattgctcgatgcgcgtggggctttatcaggaatttgggaaactgggtttaatttggttgcctttggattatcagagccaagcaaaacgactggttataacgacgcaattgttctggaaggcagtggaaactttaacgttaactggcgagttgatactgaagacggcaatcaattccattttaatagctcccgagaccaccgaggaagacgctgttataactgtacagacaacaatgctttttggaactggctttatgctaatgatggacgaactttccaactgtcgtttacagcatactaaacccagtaaagagagcaataaatagcttctgtaaggagagtaatatggcaagcaaacaatcaataccattttttgatatgtttcttgggttgctcgagctattgttcaaagatggagccacgggaagagttctcttttcccgtgtttttgttgtcgtacttttagcattgttggcgtttgctggttataagtcagatagtcttattactgcttacgtcgatagtacttatgataagtatgataaactggttcaaaaggatagggatgcccgatttgataacatagcactcgaacaactccagatagcacatatctcaagcggtgcagacttttctgcggtctttacgttcagacctaaaaacttgaactacttcgtagacttaatagcttatgaggggactttacctagcacggtagattctaaaaacctgggaggatatccaatcgacaaaacgtctgctgaatatagtacgcatttatcgggtagatatttttggacggataaggaatttgctttcttaccaacaaaaagaaaaccgcctgaaatatcgtacatgtttagctgtccgtatttcaatttagacaatgtttatgctggaactgttgaaatgtactggtacaattccaaacctgcattatctaacgaaagactaacatcgatatgtagtcaggcggttagagctcttggaagagctaagtgattacttattgctatgcatagccattgttcgatagatagactcaaatccctcgttgtattcttcaacgagaattctcttctcttcgtcagttaactcagaaaccattttacgaaagttgctctgatttaactgacgcccctgctcgttcttgattccaatttcattcaagaacgcaataaattcatctcgcttctccatgatatgttcagcattgaacttagtcagaatagaagcaacagtaacaatttcttggacaatttcaaacttagtcattatttttcctacaacataatggattatgtgattatagtatcatcttgataccgcgttgtaaaccagtttatgccaattcccagcgagaattcaaatcttccttggtagtgatatactcagcaccagaggacatccagagcccgtagcgaccatcttttactttagccgttaaataccattcctttccaattggacgaaccctacgattcaaccagtgacatacgtcaattgcctcctgaaaagacaagtcaatcagacttccaagcgcgattttattcattaacgcttcaagatatctttgtgattcaacgacagattctaagttatgactcatgctaaaactacctctccacggttgtctaaaacacgttcaatgtattcaactgcatttataatgtcacctctatccttggcttcatcttctctgcgtaaagcttcagtattcatagataatctccaatgtcataagcatcaacacatttctgaaattgttcaataacttcttcaggttcaacgttagcgataatagctacagtaaaggtgccattattccaatcatgtaccatccagtccccatatccggcattctgaaggtcttccattagttcagaatggatatctgctactaatccagaatggtcccctaatttcttatggagagcttctaggtcatcacaaataatagtcagagtagtgcatttagagttattcagaatacgcattttctttgcctttatgcttttgcttacgcttagattcctttgcggaacgctttttatctttgtgtgctccgcctttattaaaatcatgtttagctactagattttgcactttcaagttccttgatgtaatagtcaatatctttaatcatttcttctgtcattactttgtacatttcagcaagaaacggtttagcgccgccattaaatggatgactaaacggacagatgtattccttatccatgagagttttcatgaatttgctatctgccattttaaacccggcttcattggtatatgtaccccaattatcgtccatcatttctaacgaacgctgaagcgatttacgctgaatttttaaaagcgtaatgttattctttaatgtactaatcattagtataaatcctctgagaataattcattggcgggtcctgatttaggacgaactgtattaacttggcctgcatgtgtagcgatgattaatgcttcttcgcgtgtgaagtactcaccccactggtcaacaaatccttgattgtctccatggacatggtcagaaactaatttgtcacggaacatatctagaacgttcgccatatcaacagaataatggcgagtgcctggaactacaattgttccaccagttttcaattcaaaacgatttgctgcacaaacgatacgacgttgaagtaatcgtccatcccaccaatcagctactttaaagcagatttctggaatttcgctatttacattacacatttgaccaacttctcgttaaaggttttaataacttcacggccatggtctgcacctttcttacagtctgcaattgtccatgcttcaccgttttggtatttgtgaagagcccgggtattaatatctttcacaagattcataatcaaatcattaatttcttgttcagtcatttaaagaatcctttaattttctgccacaagcttttcttttcacgaataccaatttgacgaataacaggttcaccctgcattttctctaaccattccattgagttaacagcttccgccaatggaacaaatttagcaagagccttttggtaattgtctacatccatgatgtgtttaccatctgcattgtagatagcatagcattttgtgaatttcttatcaatgtatccgataaagtgcccacggaaccatacatcccaacaatcagttgggatattagcattcaagttaactttttctacacaacgctgaagttcattcagtactttaaacttgttcattacagttccttaatagagcggatgatggtttcaatgttttcagcagtacgggcgatatctaagtaagtattgcctgttgcagctacacggcaagacattccaaggtcagtgaagtgtttctgatgctcttcagaaatcttgtaaccgaagatgcggaaagtacctttgttgttaacttcaagactacgaataccgaaggtacgtttttccagaactgcgatatagttactgcggtaaacagtcagttctttcaaaggcaagatatcttccatctcgctaagaatgctcatcatcaggtctttgtgctcattcatatcttcagtcagaggacgagctttacgagtattgcgtttcttcaaaagttcaggcttgttctcttctgcatagataactgccgctttagagatgatgtcctgtgcttcaccggtgatgattaaaccgtcaccagatttctcgatgagacctttcttaatcaaaacaccaatgtttgagttgacagaacctgcgttcatggtttcttcaaggatttcacgcagttcagcagaagtgatgaaatcttttttagccacctgaaccaggatagcagcagttttctcgttcagagcatcttcggaagctttgatgatgtaagttactttagacattgtgattctccatgatgttttattcagtttgtttggtatgagactataataccatggtttaaagcagttgtaaaccattttattctgctctctgaaaattttcttcaaagagcagtaaaaatgttatacgttaaagatcaagaacttatcaccattttcaagtttaagcacccagaaatcatcgtatacacaaagaacgacttggtactcttcaccgtcttcatagttacttgcttgaattacctgacgcataggatactcgcgattaacttcgaactcatcgagcaccacaatgttaccttttacatagtggctcagtcgagtgccatcagcttgagtagaaatataaagaatgtttttgatatcagattttaatgatgtaatcattttgttttactccgtgttgttttgatatggctataataccacagctatgtaagcatgtaaacaactttgtgaaaataatttggggcattctaaggaaggattttggagggatatagatttatatggaaggacctggagatgacctccaggttccctagattaactgaggagcaataaaactaggcctaatacggcaattacagaacctataattaaataaaattctatcataattcttccaggtctttcagatactcggcttcaggagttgtcttttcccagtacttaacttcttgcgccagacgttttgcttcctgagcaagtttcttcgcttcatcatcagtgatatgatagatgttcattgaaacgagtttttcagaatggtctttgaatagttcattctgttcaatttctttagtcagttgcttgcgagttttaccttggataacgatgttacctgcgataacctctttgataaattgagcttttgcctgggcaagattaaacgcctgcttagtttcagcgattttatgctcgattcgtttggcagtgaatgtcttacggacttctacgaaatgacgaattaactcaccggaagttttgaacttatcgttcagcttaccattctcatcgatgaccacaatgtattgactcattttctcaatgagtttaaaatccttcatgattttagcatgacgctgctcagggtcttcgcttaaagcatagtctttacggaatttcaccttaaagccaaaaccagtcttagaacagtcatcatcataagtgatgtatcctgcatcttccagaggatcgagtactttctctacataagaagcacgctcaaacttgtatggaatttcgcttatatagattgagttccgtgaagtttctttatacacgccgtgcagctcaacagaaccgtcttctgtttgaacgatttttccgttaaatttaggaaactgtacttcaggttccatcatttcgccacgaagtgctgctttagtgcattccaaaacagattcaaaactatgcggaagaatagaagttgaatatcctgttgcaataccacgaacgccattcagaagaacagtcggaattaccggcagataatatgctggcggaacatgttctttatctttatgtgctggagcgatttctgtatctttgtagattttacggaagttgtcagaaatccggcagaaaatataacgacttgccgcagcagattgaaccagacgcgaaccgaagttgccttgcccatctaacagaggatagttgttattccatgtgtttgccatcaatgcaccagcatcttgggcagacgtttcaccatgatgatatcctaaatcagctacaccaccggcgacagacgcaagcttatggaatttttctttattaccgcgagctaaatcaagagcccgagcaataacaaaccgttgtacaggtttaaacccatcaatcaagttcggaatagcacggttttctacagtgtaaatcgcatactcttttgcttcattatcaatgatagatttcaaatcgcgatgacgaagatttgatgccttagccaaatcatcgatagaacctgcttgttttaatagagtgtcaaaaatatccattgtacctaccaaattagtgagccgatttgtactataacatcggaaatgaaaagcacaatataaatcattccgtaaatcattccatagtacaaaaccaaaagaatgatggaaataactacagcagaaactaggagtttcttaatcatttgtaaactcctgcaattttacaaatgcgctcaaacataataaatgctgcggtgaacgcaatgcttccaattactttagtggtaggcacgaggccataccacatgaatgttcctgagcaaatcattagggccatcagaaacacatagcccatcacgaagaaggttctcattagtatttctgcaaagtaaagatgaagttatcattcagaatacgattcagctcagagtaggtctgcgcgtcacttgaatgctgacgagtaaacgccaatgcaagctgacctttgccataaccagtggtgagtggtttcattttattagcaggaatccagaacacaccgtaggtcatgcaattcgagcgcagagtacgacccaactgagaacgtccagaacggatatgagaaagaacactttcaaatcctgcctttgaacgctgtttagctacaaagaaacgagcagatgcaccaatataacctgctttgccatcattgaacatcaaaaaataaaatccttcgcgctcagtaatttcacgagatggagcacctgctgcccaatcaccgttacgaatagaaccgatcagttctgcgccagcgttatcgagatcagcaaaagtcataatattacgcatgttaatttcctcagttgattaaagtttattctccgataagggccgaagccccttctactaccaaaaatatactactgccgttacaccaccaacccaaaacacaagaagacctaaagcaagcagacgatacacgatgtgtcgtttcatttttgaccttcccatacggtttctactaaagatttaaggccatcggtctgaataatatcaaccgcttgaatagcaaaataaattccgaacccgaatatagcaacaattcccaacgctaccgcaacgataaaagacagaacaacagttctcattaagttaaagcgacgatcaaagccagtatgaatcattatattttcctcagatgaaagcattaatccaaacgttaactaaatcccatgcgaaaacaccaatgaaagtaacgataaggcagaatactacaaagatgttcttcaaaatcgtaagtaactttttcatttttgttctccagtttagctaacaagattatagtatcaccgaagaacaggaaagtaaaccgttaaatgcacaaattacgaattttttcttccagagctttgactttatctatgtgttcatcgcgagctgcagcggctccattgggatacaatccgccgtaagttgaatcgccattatcacaagcaatgatagtataatgccaattcatagattcgagaatcctatactctttcaaaagttcagctttaatagaagcatttccgcgtttagctcgaagcgattttagttctaagtaactcatgttttactcccgttcagtttgtaaggccatagtatcatggccaatcccggaagtaaacaactttttaaaatttgtgcatgatatacccgccagcaccaactcgtgaaggttttactacttccatgaggtgttcgataccgccactgaacatcggtgtgtaccgtatgacattctgggacacttcttctgcaacgaatataattatacagtctgcaactttatgtttaaacatgggccctagatttattccacttccatctgggaatggaccgtctttaccagttgtaacattaatccatggcttatgatttgctcggtcatgaacaaagtgtgttttaacttcaactctaacaccttggtagtagggatgagctaatacgtcccaggcccattcatacggatcgttgttattatggtcaacaacttgatcgtttacgtatccatcaagaaaatccgctaccacatactctgccggtatagcaattctacatcttttaagaacatcaattctgtcttgagatgggtcgatatctaaactatatcttgcagtatcaatgatttttacttttgcttcaccccttagcttattcaaatctagggtaaatgtccgcaactggttcaatctctgcagggctttgttcatcaatgccataaattcctctgatatgtaattcaccaaaataaacacgatcgtcgtggttacaagtgtctggttccacaacaaaatcatcaccaagttctacaagttcatcacagtgcaaccaagcatagtgaacatcaccttcatgtttaactacatgatgacaaaataccgtagcagcatgatgagtaccacgaagattaacaactttagaatgagatacgttaaatggattaatcatgtttcacccataataaaagaggagcccgaaggctccttataattagcgaagttctgaaccccaacgatcagttacatcttctaatactacataaccacatgtacgcattttagcgtcgttgtaatcaaccgggatagatactacatcacgcggatgaactttaactgaaacaatacggtcagaaccactaccgaagtgaccgatgtaagatttagagcagacatgcagacctgcggaacaagtacgctgatcatcttcatctacctggttacgcggcattgtaacagttttacccggagagttatcaaatgtgtttgaagcacaatccatataagtggaacgaactactttccaaccaatgaagtgaccatcatcagtgatgtcgatatcgtttgcattcaggaaatcaaacagacgataaactgcacgacgagacgggttcagcatcaggttttccaggaaaggcagatagcgtttaaagtcttcgccatcttccatagctcgaacgatacgctcagtcagaccagatttcagctcgatatctttatagaataaagtaccatcttcaattcggacgttaccctgaacgaatttcttgatgccttgttccaggttaatgtggtcaatagcaccagcgatatcaccatctacaagtttctgcagtgcagatttaaacccaggatgttggctatcagcgttataagtagtacggccttcagtaattgaaatgaatttggaacttgctgcccatttaaattcacgctcaactggagcttctactttagcaggaacagctgccgcggcagctcgagcttcacgctctttaaacacacgccgaatagtgtcacgggaaacaccataattctcggcgagctctttcttagtgtacagaccgtttttgaagtttttaacgattgcatctttttggatttcagacagacaggtaacagccatttattcacctttattttcagaattttgagtagaagctccatcaaggagctccatgatttttacgatatcatcgacgagtttgctgtcagtccgccaagtatccaagacacttgcgatgacaggataatcatctttaaactgttcaatctttttatagaagattgtctcagcatcaccagacagtttattataaattttattacataaagctaaatcatcgttttcatctttgattttactggtacggcaaaccttagcgattttgtttagttttgtcaggaacggatttttcattccagacgcagtaaacttactcgacaagaaattcaatttatcgtaatgcgcaatatttccacagatacggtttccagtagcatttgatggcatgtactggtcataatctaccttatcaatacacttgatgtattggtcgataataaatcggtcaaatgaaagcaatccatcagcttttgccgcggctttcatagcacccggacgaattgcatagaatttcttaattccacacgcttctgccagagaccgcatatctgtgatgctcatattccaccaccaaacattatctgggaaagtgtggatttcatcacgattgcgaccgattgcataaccttcaagctcagcaatttcagatgatactaaagtctgacggtcttcttcccagtacccgtctttatcaatccaatgcagagaaacattaggagatttcggacgtttctcttttggaccagtgtcgtaatcaggaagagcttttctctgggcttcaagttcagacacacggaatactacaacttcatcagtatccatgattttcttcagctcatcaatgacatgtaattcatcttcattgtctttgattacagtaatgtgtgcccagattggaactaacccagatttacacagagcacgaaccgtagcaatacgcttacccgctttatcgtcaataagaacgaacgctttagttctatcaaccccgcaaatatcagaaatgtttacttggttatgacgatgccaagaactgcttgacactttacgacgagcaggttcatcgcatgaaacataaactgatacttcgttatctacatagtatgaacgaattttatcaagattatacttcgcaacaacctgcttgatatcacgatttccaatagtaacaccacggttttgaagaatagtacgctctttagaactcagcttattgaactcacgcaggaattcacggtcagattcatacgcttcaaacgctttaatatccgcagtgattacctcttcttcaagagcattaacacgcttttgaatattagcaatagtttcttcatcaagagaaagctcttcacgagatggagtgatatccaattcacccagtgggaaatgaacataaaccttgccataacgattaagcagccaatctgccttaacatctacaccgctaatcggatatacgatttttccataaactgcatacagaccatagctttcatacgaactattaacgctaaaccaatcagttttatctactgggaaatattcaatttcacggcgaagagaatctacctttggaggtacagcaccaaaggtacgcaaaatatatgcgatttcataatgccaagtatcaatatcttctactttaaccggaactgtaatttcaagaccagtttcttcgtcttctttcatatcatcgacaaacatcggacgaatagtaggttcacctcggtttttcatgacagtataaccggtggctttaccattatgatatgatactacattaaatgtactcgtgtagctcagtggagatttagaaccaagaccaagagcaccgatgaaatcattactgttattctttgtggattcaaagaacgttttatacatcgtcatcatgtcattatgattaagacctgggccataatcacgaattacaaagcgcgggtcaagacgagttggtgctttgatgtaaaatggacgattttcattgccattcagtttatgagcatcatcacagttagtagaaagttcacgaacaacggcacgagctttatacttataaagtttattcgacaagatgtcaaaagctttacccgaggccttaatagtaaacgttgaatcatcagcgtcagaagaaccaatgattacttcatcatcacatttaattttcattttattcctatcaattatgtcgtttaatgatttctgctacttcaaggagctcttcagcagtagcggtgttagttgtaaaaattttattatggatttctttgaagcgttctttgaattcctcagctgcttggatgtcaaagaaccgctggatgatacgatattcacgatatatagcatcgttgaataattcttctgatgggatgtaactacgtttcataatattttcctcagtgatttagggaaattatatcactataactttaagcaagaatcctagaatcatctccaagcacttcttgattaaagccatataaatccattcttataaagaaaaagggacccggaggtcccttagattaccacaccctactaactcgaccataaacctcatgtttagaaccatcaatgttttcaacccagatggttacccaagttccgggcagaggtttcttttcagcgaacagatatccatagtcgcctgagatcaaagtaatccaataacgttgcatgttaattccttctaagtaagggcaatagtacccttactatttattctttattcactcatccatgtcttacgtggtgcagcatcattacccataattaattcaaacagttctttccagttttcaggaagagtgactacatcataaaccgggtcttgaataacacgttcgtattcatcttcttcaagagaaccaagacctttaatataacgaagtttccaacctttgaaatcatctttatggtcttcatattcaccaagagaatagaaccaacgttgttctttacctttggtgagaataataaccggagttttcacaaagcggattcgaccttgttcaaataattctggccaattactaaagaacgccaaaagacttgggaaaattgaaccaacaccatcaacgtctgcatcagtcatgatagcaatatttcggtagttagtattttcagcaggctcaccaatcgtcaaaccggtgattgcacaaatgtcaaatacttccttgttcttcatagcatctgcggcagacattccccatgtattcatgaatttaccacgtagaggatatccaccatgaagttcacggtcacgtgttgtgagcagataaccaatcgcagaatcaccctcggttaagaataaagtggtgtcagcatctttgccatatttgttggctttgatgtgcttagctactttagctttctgcgctttcttggcggctttagtttctgcagctttctctgcagcaagtttacgagctaacattgcctcgataataggcatatgaatatcttcggatttcataatagcgttagcaagtttcttataatcaatatcaatatggctacgaatttctccccaaggagaagtcagacgctctttagtctgagaatcaaatcgcatgttagacatatcacgaataaacatgatgacagtcagacattctttaattcgtgctttattaacttctaacttgtacttacgttttaatgctggaatgagttcattgctcagttcatcgagaactaggtcaacgtgagtaccaccgtttttggtgtgaatgttattaacatatgaaagttgacggaacccgtcatccgaacgaccaatagcaatagcacaagtatcagaatcctgcactaccgcattttcatcatacatctgggcgtaagctttaaacttaccttgaacacgtttacccatgaatttgaattcaatatcaggataaactactgctaatgtcatcagacgatcatgaatgattgattggtcaacatcagtcaatcctgtgctttcaaagtgactgaaatctggaatgaatgatactacagtaccagtcttatctttgatgaattctttgtcttttgctggatgttcttcccaggagatattttctgagccgttagaacaacgaacgatgatttcatttttaccatcgcatgttgcaccagtaaaagatactgaaaagatgttagttaatgcagaaccgacaccgttcataccaccggttttacgctcagcatcatcaccaaagttaccacccgcacgaggacgagtccatgcggctactggtcctggaatagtttctccttcaggtgttactacaggagcctgcggaagaccacgaccgttatctgttacaataattttgttgcctttaatgtcaactgaaatcttattcgcatgtttgaaattagtacgaatagcttcatcaacagagttatcaatgatttcatcaatcagtttgataataccaggaacatactttactgattggaatttaccaaaaagaaaacggtcatgtgcctcacacgcagaactaccgatgtacattccgctgcgcttaatgatatgttctcggtcactcagaattttaatttcgttcttaatcattacatttcctcggttagtgaaggaattatatcaactattaattatagcaagtaattcttctttgatatacatcaatttaccaagaacctcatggcctcctttaaccgctttatactcgggatatcgtggccgctgtcgttcaaacatagtccattgagcatcactaacgttagcgtatgcatatcgagaatttccgtagtactgttcaatccggtactcgttgttttcattaagtgaaatccactcttcacagacttcataatatttctgcatccaaatagtacgaccattcacgtcattgattggccaccaagcaaacctgtattttccaatagctcgctctaccatttttaattgccgtttagcacgcctttgtgcagttgtcatcccaataatcataatgttctcctctggccaacaagactataataccaaaacacgatgtccatgtaaacaactaaatgacccgaaggtcatttattcataacgaattgtgctgttcttgagaaaaagccctgagcacactgttccgttaacaggttttcctgttggcccaatagccgtaaagcctgtgtgctgaaaatcatcctctgagcaagaaaagaacttatatccagtgattttgatatcagtaaatcccgcgttatctaacacgcgagttgcgttatcagcgtcagtgcatccaatcatcatgaaggcaagcgctgtaattaaaatctttttcattttaatttaaccctataagttatattacctactttaataacccggatttctccgggtttcatggtaatgcgtgctttagttcccatcaataatcaccactctttaatccatcgtagtgaactgccggagcagaaaccacccgcttcatttggccttcacacttagggttaaagcagttaacagtatagtcacgatgggaaattttacgcataatttctatcttttttccacagacttcacacttgtaatcatacgttggcattaacagcatccttccatttttgtgttttgaccatgatttgctcattcagtgcacgagtaaccatcatggagatttcatcatctgatacatgagtatcatttttatggcgatttctgaaatgcagccaaagtgcatccactacacagttaataacatctgcgcactcgccttcaaattcttctttctgccgccatggacgattaatccaatcacacatttctccagtttctgaagaaagttgtagcatgacattcccaatgctacgattaggaataggataagacatttttgatgcttcaaaaataggagctaaatttaacattgatatgcactctgcagtgctgcaatagcagcgattgcttgaccacgattatgaatagaaagattcataaccaaatcggttggaattacattcgcggaagttccaacttcagtaaagtatttgaattcgctatcaaaaattacaaggtcttcaccaccaacttcatcacattctgtgccattagcccacgtaattccggatactctgttattttggtggtcaactttagtaacagtaaaactcccgccattttcatggagttcatacacaaagtcttcattaaactcataacgtgaagaaaattcttcttccgcttcatcattgacgaatttgtactgtacgccttctttaaaattcattacacaatctccatgtattctgggccatcaactgtgattacacgagcaaaggtacgaactgggacgatatcaccatggttcgcgaatacatacaaccaagtccagtgctcttctttaccgaaggttttctctttctgaacaacgattaagtccgggttgaacagaacatcttcaaaagcttcagcagtaatttttacggtgttttcagttttcatgttattctcctcagtagttgataagataatagtaccacatccttgtggtaaagtaaacaactttttatactaaaccttgacgctgtgattccgtcggctctacatcagctttaggcagaactgcatagttgccttgaaacactacgtttactaaggttttaccgtcttcttcccactcatcagtgacaagaacatttttgtgcagcgacagattagtggctgaattagtagaactcaccgattgggtaataacattgtccagcgaattcacgtgtacccacttgcgcagatagctttcactagattcaacgaattttttcaagcagtggatgtaatcgccaaaatcttcacggtaaatcttatacccagatttaccgtcattacgattaactactttaacgattacaccattgtgaccaacccacttaccaccaattactttaacgttttcacctacaactaaatctttcatcgtgtttctctcagtttgttaatgtagagccattatataacggctctttcataaagtaaatagttatcggtgagaaatttcacacccaacatcgacgccgaacagatacccagcttcccagcccttagccatcatagccttggccaccagaaccatcgttggagagatttccgggaggatttcccggttgaaccactcttcgaagttttcatcgaactcaaactcttccattagccacgccccttaggtaaactcagtggatcggtatcttctggacttggtgcttcgcttaggcctagagcatagcgttgagcatatttaagcattagaatatctttggcacagtcatggatactatcatgcgcgataaatccatcgagcgtaccctttggaagaggagtagttgtcagaccacgagtcagaagcagcgattcaattgcagtacgaatatcacgctgattccagaacttacacggctcttctttaaatgtatcaatttcttcttcggaaattccttgggctcgttgaacatcgcgaagacaatcaacaaaaattggaaagtcaaagctctgtccacgacaccagccaaaggaatcccatgggtgaattccattatcaatcagatattgctgggcttctttaattccagcaattactgataaatcgtctggcgttgaggccaggttagcacgggcctcagctgattgtttcttccaccactcaagagtagacttaccaaacaaccgatgacctttctgggatttaaggtcaaacttaatacgatgaccacgtttaaccaattcatcgaagctttccagaacttcggggtcagaatcaaaggtgattagagcaaggtcaatcacagaagagcttgacacatttccgaatgtttcaaaatcaataataaagtctttagccattttgagcctctagcataaatttaatttcgcgtaactggcaaccaatatattcgctcagatacacctttgggtcatatcctgtgaaccaagtaatagcattagcattatctgctatatcacgaagctcattcagaactgtatcaattttaatgttaatagcacgcttaacattatccggtgcttcaaacttagattcttgtaagccaacaatcattgtttgaaggtcttctaatttcaattcaaacatattacctcacacataaaacacatcatatcgaccacgggtagtaccaacatataataactgctgtgctagagaagcatctgccatgtgaatgcatggagtataaatgaagcttctgtcaattgagataccctgggccttatggaaagttgaagccggcaatgctttcactttatgaaacttgcgcttagcatcccagaactcagaccaaggagctttacctcctttattccaattcttatatgtatctgcagtttttgccaaaaagaattgaaacttattcatttcttcttcggatgagatgacacagattttctctctagcgtactcttcatcgtcgccataggtttcaatatctaatacccaatgacgaaccagatattcacccggaacacctctggcacccaaaaatgatgtggtttcaactgcatctaatatgcgaacaaactgaccattattgaaaagaatttcgctgaatttctttccttcaaatttaagttccttggtaagaggttcttgcataacaacaatctcacctactacgaatggtcgttcagtttcgtatattcttcgtctgattatttcattcaatttatccacagatttattagtgaacgcaagcattctgttttcaaataaatcttctggtgttttaactaaattaaaataatttagcataaaatctttaagggcggttcctttagtaaaaccacggacgccatgaccatcaactacacagtcacgaatccacccaccgtttctgatttcagtagcgacttcaatgattggggcattactccgcatcacctcggtcaaatgaagttgtaagaaatctttatgagtgaagaatggactcagtgcaggttcattacttccaggttctaccggacgtatctgagccttatcaccaatggcaatgacaatacaccaggcaggaatagttgccatcaaaatcttaaacaacttacggtcatacattgaagcttcatcgcagatgagaactcgaatagatgccatatccggaactttcttttgttcaaacagaacgttttcttcatatgtcgtcgggttgattttcagaagactatgaatagtactggcctgcattccgctgagcttagataaaacctttttggccccatgcgtaggtgctgccaacgcaatgccagagataccctgagaaatcaaagcgtcaatgataaatttggttaaagttgttttacctgtaccagcaggtccattaatcgtaatatgttgacctttagctccttgtttgaccatttcaatgactttattaaaaatcgctttttgactttcttttaattggtcaaacgtaatcatgccacttttaccctcactacatgtagatttttaatttttgctttgagtttttcgcgctcaacatcgctaagtggctcatacactagctcagttgttttccaccaaagcattcctttggttttgcttttcccagtaaaattaccttttgctagtttgtctgttaaaaccgacattgtacgaatccgtgctttattggctgattcttcattagtgaagactacacatcgttctccatcatacatatcagttgtgactggatggtcaaatccgtctttatccttatacgctactacatatccatagtgttgcattacattttacctctcaaaagttggaagaaggaagcagtcaatggaagaccttttttcaattttaacttatctaacattgagcattcttctaaccgacgaagtgagctaacaattaaccgtattgattgcacacggatttcagcatctgatggacgattcggaactgacgctaaaatagcagataacttacgctcaactttagctaattcagacttaccaccgctgatacgagttctcaatgcattaataagttctaaatcagccgaggttgcagttccattcttttctttttgcacaaattgagaaagatgattttcacgattgtgtaagttagttttaattgatgcgatagttttttcatactcacgaatcttttcccaacgagacgcttctttatcacttgtaggtttaacagaatcagaagagcgaactatgcgtgccgcaatttcattcgcttttcgttcaaggtcttcaatcgtgttatttccacgcaatgcattatacttttgtttaacaggaataacattacccatcacatatcccaagtcattgttccaacgctcgagtgtcatgctatcaggatgatttcctttagcagttccaaacttttcgcctgagtatgcacagtgtgtctgctgcatgatgttaaacagatattctggcgtaagattgaactccttgtgccgacgttgagcagaacctaaagttgtaattaaacgagtataaactttagcggtttcagcagtaaatttcatcatgttttcctcaaaaatgctttcgtcttacggacggtataatgggtctaggtccctagttctagataatcactagttgactaagctatagtaacactaaagtagtccataagtaaaccagatttttcaactttgttatgacccaccactttgaacttagttcccatcggtagcatcttttctcgttctttatcaatcatctcgatgttagcgcttctgcgctgagcaacgttatcaatcaaatcatttgggcgaatgaattcagaatccggcgcggtaattaaaagtgatttcatgttggtatgataatcaaatgattgatgacaatcattgacttcaataaccacaaaggtcgagtaatgccatttgcctgcaaattctcgggcaattgtttcatctgttgtgaatgatgctacctttccaaagtcaaatttctcgcctttaataagggcgtcataaaatgctttagcctcacgacacgatagacctctatagagaatgtcactgttatcaatttgatgacgtctaacgatagagtcaagtttcttatgaaattcttcgccaatcttatcgttcatgcattgccacagaattgattgttctttacagtcaaacctattggctaatgcttcccatgcgcttaaatcatacacaggtaatcctctgtgccggcgtgcggaattcagaatatcaatagaatgaatgctttctgctagcatagcttgtgggtttaatgaaatagccatgatattctccatttttggttacgagaggtatcatatcatggctttttagaagagtaaactactttgtgaaattattttgcccacggagaccagggcggcgggtcagaccagattgaagctagttcatctagaagagcttctggggctttaataccatacttctgtataattatacggtattcgtctttgatgtccttagaaatcactggatgaacctgaacctcttcctgaggctcttccatcatttcaaacaaatccatcacatgaaccactcagtattgcgatacagacaaccactgttgttatatccatcagccgctttttgcaacagcgggcttggagcaagtttgataaaatctgcgcccatatataaccaaactaacttagtaaattctattagagaatctgtgctatcaatgataatctttttgcctcttgaaattatgtcattttcgtattcatataagctagtttcatgacatacattggtgtatcctttcaagtggagagcatgcagtatagaaacaggacttcctggaactgtatctacgtcaaagacatgagcagtcttaataatgccataatcttcagaaggacaccaaccaaatgcctcgaatttattaattaaatctttgaaatctttgtcgaacgtactgtatagagcaacagtaaaaattctatcttggtctagacgcaaagctccttttgcatcatttcttgattgaactgcgcgttgtaagcttactttatagatttttgcgtcggccacacatagctccttcagtcatgttgttgtcttcaaaccatttatcatttgctttaattaaagcaggcgcagcttttagtaataacgctgcagctcttacacctctgtaccaacaatcaaaatgagacttctttaatggcgattgataccagggcttagtataacatatcattttgttctcctcagttagtaggaataatatactattcccagtatagcataaaaggactcccggaggagtccttaatttttatacttctgcatcagatggaacagcttcaaacattttcgcgttggtggttgcccaagttgcagcatcatcaactactgttgaataagcggctttttcggatgggaaaatctgatactgtgcattagcaatgcgatgtgagtcagaatataccttaaaagctacagatacttcagtacctttaacctcgccatcagcagtggtatggtcaaaagttttgatatttacgtaagccattttaatctcctatttagtttacaggagtatttatatagctgctgtaagcgtctttaatatttctttatcaatttctcgagtgatttcttctcgaagggccaatactaaggccctttctttttgttttctgataatttttaaacgacgcttagatattcttttggccatcagtaaccactgtcttggcgagcaaagttctcggcgtttttcagataatacagcttaaagatttcttcagaatccagaccaagcgccataaacatattcagaacaaagtgcaggatatcaatcatttcaaatttgatttcaagctggtctttatcagacaggtctttgatataagtttcctgcatcttgacgtggtcagctttccatggtttccacacagcactagctgccttttcaccgttactcataccgccaagagacgtcagcaattcgcggaattcgtcatcaatgtaatctttttggttacgcagccactgcacgatatcaccggcttgggccaattcatcaggatgcatgttagtaccaggcttgtcatttgcaagacgaacctgaagagatttttgcatatcaagcattacttgcagagggtcaccaccaaccttacggacgatacctgcgtatcgagcttcagctttatctgcaccagcgatcagttgactgcattcgttaaaatgtgccattattttattcctttcaattaaattagataaatattatatcacttaacataaatagcaggaggattcatgtctgaagtgaaacaagaatgtaaagacaaaggaggatttggaagatatctttacgtcggaatcgccactgctgctttagctgcatggaattatgtggtagttccattagctagcacacacgggctagttcttcctccaatgccgttagaaaaagttgtgtcgtttattatgaccggaggattgctttaatttaaggggctttggcccctatatcttcgcgtatttgtcaaggcgcaatttagccattaaaccttgcgatatattttgattaatataatccgttatttcagaagcagttgccccctctttcataatcatatcatttatatctttgcttttccaaggcgacttatcccagaaaactaccttttcacccgcgtctactaaacgcttcatacgcttaatcgtatcaggatgacgaggttcatggtccataatccatgctcggttatcatgacatggaacttgagctaaatctaaagacccaccggtaattgcaatagcattatcaatgaacagcgaatctattggtccttccatgacgaatacgagttttgactcatcaatagtgtcgagaccataaattttggtcgcgtgttcgtgggctttgattgtgatgtatttttgtggagcattctttcgtagtgctcgtccttgaaacgactcaatctctcctttcttgttgaagataggaataaccaaacgtggttcgttcgtctcattcttataggttcctggattaacggagttaacaagagaaggccattggttagtaaaccataaccttttccaagaagtgcttggaatacatctggcagtcacgtatttaactatcggatgttccttaggaagtctatctaatcgctcgcagaaattaagtttttctattacggggagttttgcattaattttctcagacggttctacagcctttggcttatcaaagacctgctcctttcttttctcaagaagatactctcgatagaggtcgggttcattatctttaagatactgcgatagccacttgttatactcgcagttgaagcaatgacagcgtaatccttgacctgcatcaaaaatccagaatcgtgctttattgatatctttctgtgagtcaccacaaattgggcaacggcagtttaacttgaatgttgaagatgtagtaacgtgtctaaatttaggtaggtgagatattgcgcgaattgcatactcgttatcaacccaagacataatatttcctctggccttaaactaataaggccattttatcactttttcttggcagcgtctttatccgcttttcgtttctttggaagagtttcgggtcctttattgacgatgtccccggaagttgtacctgatgcaatattctgtggattgccgcccgcatcacctgcgaccatctcagtaacaaactctttgtatgttttcatagagcctcctactatttattcatgcgtaatacgtaagcatttatatgtaggatacagcgtcggagacattgattttggattgtctttgataagcataaactgcttgcctgtatcttcacacttttgcttaatcacggcttcatctttaccagtgaatgccatcttttcagtagacattccacctgaaccagtagatagcgccattattaaaacgtatgtaatcatcctaaaatccacttaacaatgttgaagttatcaaactgggcatcacagtaaagaacataattcaacttaagtgctgcgccgtcgtctttaagttctgcttgcacttctgtttgtttgctcgggtctacgttttccacaatatgaccaacatctgcacgaatctgctgagctacttcagactcatcagcagtcattgaccactcgcataagtctttgtcatagttggccatggcaggaactgcagagcaacttgatactgcgaacactaaagcaagtacaatctttttcattttggtttcctcaagcagcttgtacgttaagagcagaaatcaggcgataatcaccgtttgcgtatactaacattgacacattgccatcagtgtttttgaatggctcaacaactactaaaactgtatcgccttcatctaatgcttttcgtactacgccatcacaacgcagattagcatgtggagatttaactactttgcttccaactaccataccgcaatgcggtacagtttccgctgattcatctttactcttaaagactacgtctaatgctttttcaattgtccacatgatgttttcctctactcgttttgtttcagtaaggccatagtatcatggcctttggagaaagtaaactaccttttgaacaattttttcaacaaaatgtcagaggtcagattcttggtaggtaggtatgtagcagagttaacccagatgccatcgctgttatacaccttgacctctccatagtcgcatacagataggtctgctttgttatatgcctcaatgcctcgatgaatggtatctgtggctgttacaacaaaagagtgacctgactggtcacggaccgcgctaaacacaaaaatcatagaattccttagaattttaactcttctgccagagcatcaagcttagaacgtgatactcgttcttgacgattagattcggctacacggttctgtgcaccggcaccttctcggacggtattgcttggattaggcttagttgggtcgttttgctgctcaatttctacccaacgctgattagccttatgtacacccatagagaacttattgttgatgttcttatcaccgtaacgtgatttaatctgcttaattaattgttgcttcatctgagcaagttcaggggtttcaatcacagccaacataaagtctgctgtagcaggtagaccagcagattctgcaatatcactcatgtccatatcagaagcatcccacgctgaacgacctacctgagctgcggtccaaagaacagtttcagattctacagccaatgcacgaagttcttctgcaatagctttaactaacgtgtaactgttttcagtatattgacgaatacggcaagaagcacaaataccaagatagtcaatgatgataacagtcggtttaaagttcttcttgagtttcaactcattcagaagagctcggaatgtattagcgttagcaccgccagtcggatactgtttaatgattaaacgaccaagagtactagaactacgccatttttccattttgcctttatattcggcgtatgatacacagccatcatcaatatcgtcaagtgatacatcaagcaaattagcgtcaatgcgtttagcacaaacttcttcggccatttccatggaaatataaaggacattatgccccatctgaagatagtctgcagccaatgaacacaatcctaacgatttaccaacgttgacgccagccatcaatacgttcagcgtaccagtctcggcaccacctttagtaattttgttcagaatgctaagtttaaacggaactttacgagctttattctggtatgataaccaacgagcttcataatcttccatccaatcatgaccaatatagctatcaaacgatactgataacgcttcgcgcatgatatcaggaatagctcccatatcaggaagacgcttatctcgcttatttggctcaagctgggcattagcctgaatttcaataattcgagacgtagcgttatacatagccttttcttgaacgtacttttcagtttccttaactaaccaattcaaatcttcaggagcatcagataacttatcaataagtttctttgcgccttcatgttccgtttcagttatagacgaattatccagtgctacacataacgcagtctttgaaggaattgctgtgtattcattaacgtgtttcttaattatgttaaacaccgtctgagcaggtccttgctcgaagtactctttgtccatatatggccaaaccttcgtaaagaaagcctggttgtaaatcagattagctaagattgtttctaccactttaacctcttaaaagattttccataatgattttttcttggtctttaatgcactctggatttgttgtttaacacaagcttccacatgaggataaagttcatccttatgagcttcagatggtgtactgaactcaatagttacttcccccgaaggagaaatatttaatttatgaacataaaccaagtgtgattgaccatttaattttatcacaatttcttggataacagtcttcatagcttcttggattatttcatggcttttcttgaacactcgttcttgacgctcgaagtctccctcttccgagggagattcttgttcaaatttctcgagttcagattctaaatcaaactcagtcttcattcatgaagttctctaattcatcttcaacttcagcagctgatactgaaccactctcaggaagtttaacaccatcaaccttagttgaaacttttgagttaatcatttctgctaccgcttcatcaaccgcagcgtttgaatcaatagcacccaactgataacgggctttgatagcgtcacggaatggctcatgcttaaacagaggaccccaaaattccgtactgctcgtatcttttgcccgccaggatttttcttcacgaatcatctcaccggtttcaacatccaggaattctcgtgcataccatccgtttttcggtttaaccacaaatccgatatccagagccatatcaagcagaccactgtatggatcgataccgccatcgaatttaacatcgatgaagaacttacttttctctttgacagtacgcgatttctcagcgttcaggacaaactgatatccttcaagctcagtaccatctttaatttgacgtttaccgatgatgaacacagtatccgcagaatacataggacctgtaccaccagtcattaccgtcttactgaacatctcgatagtctcgattgtgtggttaaccgcgacacaaggaatgttcttaatagagaagtaaggagttacgatacggaagagagacttcagacttttcgcacgagtcatatctgcaacagatttctcgttcagagcatcttcggtttcctttttagacgccatgttaccaatagagtcgataaacacgatgactttttcaccacgctcaatagcttcaagctggttaaccatatcgatttttaattgttcaaccgactgaaccggtgtatgaattacgcggtcagggtcaacacccatagatttcagataagctggagtgataccaaattctgaatcatagaacaaacagactgcatcaggatacttattaagataagcactaaccattgtcagagacatgttagatttgaagtgtttagatggacctgcgaagatagtcaacccggactgcataccaccatccaacgctccactgattgcgatattaagcatcggaattttagttctaactacatctttctcgttaaagaattttgatttagtcagttctgctgtcattttagaagtggatgctttaatcaggcgagattttaagtcagacattcattatattccataagtctccattatatttttctcacaggttaaaggatagagtaattatattactttgttcttgaagctattatcagaagttccatttcttcttggtgttataaaccactgtttccatatctatttcatagtgtattttacatccaacgcacatgccatgccaccagcaatgcattccatctgagccagtagttccttcatgaacaaactcatcagatttacatacgaagcatctgaattcttcagccttgaatatattaccagctacgtcagatttatcatagatgttcataagaggtccttggagggctttcgccctcacagatatggttctaccttaccaaattcatggaaggcctgagatttcactcgagtgttaatacacatacgaattgatttcagaggttcattatcaccgaataacccacgtctttcgccgtctttagatttccaacgggcttgatttgggaaagcagcatgtagctgttcaagggctctattctgacgagcagtatcacgctgtgtagaacaaccaccaggagactgcactttgccggatttaacgagatacttaaacagagccagatgaggatgacccatgttaattaattttagaaaagcataagcatcttcgttaaggtcaataactccgtaaccaatatcttctgcggtaagtttagtcaaatcatagaaagtattggtgaacccaaaactattctcgcgataatgaccccagcttgatgtgattttgaaaatcggcaagcgagcatgaccgtgataataaccacaatccatagcagtctctacgtatttgaccatatcatcaaatacctcttgactcattgcctcgccggcaccaagtggaacacggcgatcgtcgcgttcacgaatttcagtcagatgaatggtcgtatcatcatcaagcatccaaattcgttgtcctgcatacatttcagtaatcagacggcgagttcctgcaattccatcaacatcatcggggacagtaacgattttagcagcatgaccgtgccaagtttcgtatgcttctttttctgattcacgtactacaagatgcggaacataaccttcaggaaacatagtcagggcagtaactgccccggcacgcttataacttggaattacaaactgaatcatttccactcacctttatagtctttctttgcaatatgagtttcaccagtataagcatagttatctacaagatagaaatgacgctcatacacgtgcaaagacccgacgttccaaataatgtcaccaactgaataatttttacctgatgcattcagaagtttggttaactgttccagaacatagagctgccacgcatagtcattacgatatccaaagacgacatcattagagcgcatgtttacaacagcatgaactttattatcacgaatcagatactgaacattgttagtacacatgaaatcactcatgccatcgcgctcaaaatcatactgcatttgaggtcgtgtataaatcataattccgcggcgagaatcaggattactgataagttcctttgcgcagttagcaaactgcgaatagttttgtgatgaccaaactgcccagccatagttagaattaatctcaccatgtttggatgcaattgctttccaaatagctggggtttcacctggaatatctttaacgaataaactttgagatttataccactcaagttcacgggcaatgtacccatcattaactgcaccaaaaatcaggggctcatctgcaataaatgatgcacctacgatttcaatagtcttcacacccgtcttatcaatcacaaattctttgttgagcaaagcatcagcgaattcttgacggatatcttgtactgtcattggagttacaatcatgagacctcttatttaacttgctggataataattgtattctgctgtgcgttagaagcagaccaaatcagcgcaattaaccaaccgataatggaccaaccgaatactagatttgtgataaagattccaccccgtgatttatgcttacgactgcaagctacaaaggtcggcaaaaaatagatgaagaaaagaatgattaaaccaaatactgcttccatgttaatctcctcagttagacatgcatttgttgtagatgtgattttggagagattttaactgctccatacgttgtttatgctcattataactcaatccgccgttagcaaaatcagttaaacgaatctggtcattcactgctgccgcttgagcagtgcatgtacgttctttttgagttttacgcagacgcttaatttcttccagctcatgcttattctgctcaatcatgtcgagttccatcgcagatagctgacgattaggattagctttttctttcgccaaccgacgctcaaccgcgagcgattcagcagagacctggttgctagcacgatagtatcctacagtaccgccaattgctcgcacctgtccaacagaagaagccgggacgatatcaccttgtggcatttgacaaccagtcagcgtgagagcaacgataacagcaagtaacgatttcattgtaatctcctcagtatgttatttcgagaacaatggtaccacatccttgtggcaaagtaaacaacttttttaaaaatcgaacatgtcaagaagagacgatttctcttcatagtctaaccctgccgcttcagacatacccgtcagaggtttaacaaacgatttttggaacagaacactgtggtcaagccacactagaacttcctgtcggatttcttgtggcagctcagtgcccgatggccatgccatgcatttctcaccgtacgggttaccttcacgcagcgggatgaccatcaccttctcgccttccatgattggtgttataccttcaaagcccgcggtagctcggttatacgctaaagcacctttgacgtgatatggcgtacctttatctggatatcctgcaccatcatcatacttaccgatgttgttggcggtcttaacttctgctattactttatagtcaagttcacgatactcagactcaaactgcttataatattgctgtaaagattcttcaccttcctgcagcatacgccgaatagattcttccaacgcattctgaacagcagttggtgtagaactttgctgagtttccatacccatgattttcagatgcggttctgcatatcgagtaccttccatatcatacacattcagagcatatcgtttcttcgctttccagaatccgccaatgccgtttgaccccaacggaggacaagaaatagcttcacggtccatgaacattaaatgttctttattgttcatgtattcacacatctcacgatatgattggtcaatccaaggttccattttcttcttgccgaattggttcaggaattcgaccaaatcgttagtttctttgaaacgctcaagacctaccttctcgataaccttatcaacacaaacgtaaattgagtcagtatcaccagctactacaaacgaatgtccttcagtaccacataccttgttgagatattcattaactttacgttcaatccattgaattgccatttgaccaaacaacgtgattgctgatgcgttacgcaaatcataataacggaagtaaatgttacccaatgcaccataaagtgagttgatcagaatcttacggtttaactgattagtattacccaagatttcagcatgtttacattcaaacatcagtttgtcaaggcactcttcggtatatgtcagcagttctgctttcatatcatcagagaaatcttcatagacattaacttctgcgaatttatcgatagttccaaacttcttatcattcagaacctttttaatcagttcttgatttcgtttggcacccatcattttatttttccactctttacgctgataaaataccttcgcgatttcaactggaatgacaccatctacatctttacgatacatccaaccattgggtgaacatgaatattcgtcagacggacgtggtgcagtcttgttaatgtactcacccaatggatgaagtttaaactgtccaacgatggtttctggtgaaatattaacttgtcggatgattgacggatacagagatgtcaagtcaaacgacatgatataacgatatgcagcaggaactggttccttaacatacgcaccaggatatgactgtttaacatgagaacgactttgcggaataaccttgtcctgttctttcagactgttaaagatgattgcgtcccatgttttaatcggactcattacaccttgatacggcatcttcgcataataagacatcgagatagccaggtcaataaatccgcgaacagcatcaatcgcttgtactgattcaacgtcgatgatgttatacgaaatataccgttggtggttagtttcacgcaatttattgattggaccgtcatatgctaatttacctttcttggtttcataataagcaatgaaatccaacttatacgtcggttggttcgtgaaactaaacttcttatacaaatccatgtaatcaagaatagtcacacccatgatagaataaatttctttatcaccatacatgtttgtgataatcttagatgaaactttattcagaggagagaaccgtttcatcgcacgctcaccaagaatctgtttcacacgattcatgatgtacggaatatcaaatccttcaatgttccagccagtaaagattgctgggcatttctgttcccaaagattgatgtactcaagcatcatttctttttctgaattgaatggcatatacaccacacgatcaagaatatgttgtggaacttcatcaccgccttcggaatctaaacgagcagcgagtttcttgtcccactcggaaacagaaccataaagagaatgcagtaaatcaaatacgtagaacttatcatcaaccgaatcgtaatgggtgatagcatcaatttcatattctgctttcatcgggtctgggaattgagatgcagtaacctcaatgtcacagtttgcaattcggatgaattttttattatagacgatttctgaaccgtaagtatcactgatataagcaagtttgaaatcatccatacccattgcttccattcccatatcttccatacgacgcatccaatcgcgtgcatctttcatagttgggaatgtattcttcttgcaatacttgccatagatgtctttgtactttgtttcttccatgcaatgactaaacataacaggagaatacggaacacgacgcatgcgttcctcaccagtagaatcgatataacgttctacaatgtcattgcctagagtttcaacgctgatataaaattctttcatgggtttcctttgtttatagaccgagttattagtctttaggtgggataattatactccgatttttataaagtaaaagggccgaagcccttttcttacgcaccgattgtgtacttagattttaaagtccattcatgtttctgtttgaatgtaattactcggaagttattctgcatctgtgcaagagtttgaccacgattaatactcagtagaccccagtcagagagcagttgtgcgattgagtctcgacgaatttcatcttctaagtcaatagtaacagggcgaccatcaagctttaacatctctttaaaatggacgatatagtaacgaccctgtttctgaagaatgtggcagctttgatatagtaccttatctttgttattagcaattcccatacgggtcagagtttctttaactttcaggaagtcttcaggctgtttcagtgtaatttcaatcatctttaccattccaatgctgttttcttaagatttttctgttctttcacgtttttcgtgattgtcttgaccaattcatcagtcacaagacctttcattttcttgagagcaggtttaagcttgtttttagcttccagggtctctctatacatcctagcatcaatcgcattgaccttgtaatatgtcattataacttgaagaatcaatgcatcctggatgttttctgttaacttagcccatttaccataccgacgacctctaggaacagaggccatcatatagttatagtgtgcttggtcagataacccttgaccaacaaggttcataacataaaccgcaggcatacagtcagcgtgctgagaaagagcgttttcaaccatgaattttgaataatccatcgtcgagatattcaaatgctcttgcttttcgttaatagacccaataattgtgaagaattgattttctgctttttctttatatgaatcagataattcctggactttcgtccagtctttacctaaccaagctatttggtgctcattatactgatcatcatcttcaaataaactcatcatttccactgcatctctacaacaagttgaataagcatataaaccaaatgtaattcaatcgaagctgctatgccatgatactggttattttcaccgatgatttcatacattctgataatgcttgggccagtaaccattgtatacagctcagaagaaagtttatctacaaaccaagtatagtctgctgcatattttggagcaagagcacggagttctttgatgttcttagttttaatagcttcgatgacatcttcaattgaaccacggtcattcagaacgatagacaagatacctgcatcaatcacacccttagaagaataatgatcaagcatgttaatggtcttacggaattctggaaaattctttttgaccaaagcagctacaactttcttatcttcaaccaccacgccttcattttcacaaattgcgagacaacgcttgagcatctcgatttgcattggcttaacatcagatggagatggtttaccaaaattaattacacggcaacgagactgaagaggtttaatgataccatcaaggttgtttgcagtaatgataatagtacagtttgtgctatacgcttccatgaatgaacgcagatgtcgttgagattctgcaagacctgcacgatcaaattcgtcaatcacgataattttctgcttgcctgcaatggatgcagaacttgcgaatgcagttaacggtccacgaacgaaatcaattttacaatcagaaccattcacgaacatcatttcagcattaatgtcattacataatgctttagctactgtggtcttaccggtgccaggagaagtactatggagaattaaatgaggaatttttcctttagctactaaagccgaaaaaatttctttatcttcagcaggcaatacacactcagaaatagtacctggacgatatttctgttcccacataaagtctgcttcgtttactgtcaatttcatttatatttcctcattcagattaaagatggggccgaagccccgaagttattactcaaagtcaaaggtactatctgcttccattgctaccacataagaggctgatgcaccttcaaattttgctgcagtctgtttcttggaaccgttcatttttgcccacagcatcagtttataatcaccgatggtcatcttcatattgctcatgttgatgataaagttaaagttaccttcgccatcataatcaccgagggtcagggaatacttcggacgggtcagtgcagcatcttctactttgttataaccgcgcagaacaattttaccatcaacattggtgatagcaattgtgtcaatctgcatgccacgagatactcgcatcagctgttgcaggtcttcacctttaaaatcgataattacgtttgccaccgggaatgggattggtttagtcgggaacacgattgtgctcgggtcagctgctggccagaagatagttgagcgagcatctttaattgccaggttaccatcttcctgcatgataatatctgcatcatcaccaaccagagacagaatgctcaggaaactgttcaggtcataaattgctacatcagtatcgatagtatcagagattgtggcttcagcataagtcgtaccattaacagcacgagtcatgataaaattgccaggtttcagcatgataccggagttgatggtggagaagtttttcagaatgttcagagtttctttagagaatttcatttcaataccttttaattaagttcaggataattatatcaagctgcgaatgtagcagttaattcttctgcaacaatctgacctgccgcaacgagttgctcatcagcatctacgcagtaatcattttctagacgttcgccaccatgacggtcagtaacaattttagcaccagccttgattgattcgttgtaatgcttacgcatcaattcaatccatttttctgcaacttcgtcgtcaatagatttatagaaagcaaagcgagcttcagaatctttaatcttatctttaatagctgctttagtttcttcagttagagccagaacccaagacttacgaatacgattttggttattcgggttggaatctgcacgtacgtttttaacctggatatctttcacatcaacaaaattaatcattatatttaccttaatcgtaataatcttcaaccatccaaccgggattcctgctggacatgactctattatattcatttcctgtaaaagcatctcgtaacatttcttctgttactaagtgtttttcatcagaaaacaaattagttaacacatatcgctttacttcaggaaaggccagcagatgctggccagttgtaaactcattcattccatcaccgtaaatcgtcctactttcttcatttgaagatgttggccatatgcctgcgggtcgtggtcacggtgagaaataataaacacattggcatctaccatcttattaagaatagcagttattgccttaacaccttctgcgtcggtggccgaatcgtagacttcatcaaggaacagacagtttattttaacaccagaaactttttcagcaatatcacgccatgtgaatagtaatgctatatcaattctggctttttcaccttgactaaacgaggcataactaaactcttctcgtccgcgagatttaatcgtttcagagaactcttcgttcaacgtgaacgaataatcagcttccataatttttaggtagctgttaatttgcttattgaacatcgggatgtacttcttgatgatagctcctttaataccggagtctttcagcatttcagttaaaataccacgacgatatttttccataaccaaattagttttgacgagaataattttatctaattcttcttgtagcagttcaatcttgtcagagttatcaatgaactcctgtgatgctttatcaattgctgctttaatacgacgtgctttatcaactgcagttaaagtcatctgtttcaaattactcatttgatttttgatgtctcttgcacgcgtacgaatagtattatactcgcgagctagttcatccagttcactctggcgcgtctttaactcgccaagaatggtattacattcttcaacatgatgattaatcttagtgattagagtgtcattagaatgcaaatcctgcaagcacgttgggcaatgaccgcctttatcatacaacccaagaacctttgagtatgattcaattttagaacgaatcttaaagattttaccttgaacttcttgaattgactctgctgggtcatcaccaatcacgagttcaagcagttcgctttgaagagtttctaattctgctttatatcctcgtgcctctttcacctgctcatcatacatcgcctgcaggcgagctacgttatcaccagaaagtttcttctgcttttctgcatactcatgatgagttttaatttcattagtcaatgcttcacgctgaacatcattaacctggatttgctgattgatttctcttatctgtgtcttgttcagtttgtccatatcagccaaaagagacacttcaagcaaatcttcaacgagctttcgtctattagcagttgataaccccatgaacggagtatatcctgccgttcctaatacgacaatctgcttaaacgatgtgtatgacatgccgatgagactttcaaagtaggattgaaaatcctttgaacttgcggcttcatcaagcttattgccatctcgtaaaatctcaaagacactcggtttttgcccacgtttaatgtagaaactatgaccgtcatactccatccacagttctactacagagtccttcttattgaaggagttaattaattgacctttcttaatatcacggaacggtttaccaaataaggcaaaagtaatagcttcaagcatagtacttttgccaccaccattcttacctgtgattaaggtcttttggcatttatcaagttgaatgtcaatggccgcttggccaactgacattatattcttatacttgacacgatttagtttaaaagtcttcactgattttgtgcctcaatgtataactgtttagacataacctttaaggctttgatatcatctgcggataggtcttcaagtgcttggatatattcttccattaaatccaataagcttttaacttctacttcttcgccatcttcagactcaaccgagttgtcaactttagaaacagttcttaattcatgtactaccttttcaagttctgattcaaacttaggaaggtcttcatcgaccgcagtgataataatgcgtactgcgagattacgaaactcttcaaagtcaatttttccagtaacaggataaatcagttttctatgccaagtgatttcattagggacgaaatcaaaggttgataattcagtgtcttgaacccagaagccacgtgggtcgttctcgtcacccgctgtaagcgtccaaggcgttccgatgtacttaacgtttgctgcgcttgatatggtgtggaagtgcccagaccatacttgtttgtactttttgaggaaatctggttccagcccatgagacttcattcctttataaaaataaaagccattaagctcccagtgaccaatacagtattcagcagacgattctttgatatgcttcatgatttctgacgtgttctcttcacacatccatggacacaagtcaatcaaagtcccatcaaaatccatagtcacgggcttttcaataacagtaatatgcttatacttaccaagaacttctgttgatgcattaggcgtcaacgtattcttgtagtgcatatcatgatttccgacgatcgtaattaagttaattccttctttctcaagagactccgcaatttcacgagcgaattccattgtcttatgagtgatagctttacgaacgtcaaaaatatcaccgtattgaatgatagttttaattccatgctttttggcataatcaatatgctgcttaattccgtgtcgttgtacatcctgtacccacgggtcatctgcgcggacacctaaatgccaatcgcctgagtgaataattttcatataacctctctagtagagtttaattttatattattccatgaatagcaaaaagggcccgaaggcccattacttattttgtcattaactcaaattgttctttaaagcaatgctcagaatcttggtgttctaccaggaattcaaatgctttatttcgctctttatcatagagcttctggtcagatgacagatgtttcattcgttcaaagacttcatttttattttcatcattcaaccacagaatgccagaatcatgagaagtcaacggctttccatcaacccggaatttcaaagcatcaccagtagctttatggaacacaggaatagttccacaagcgcctagttctaaatgcgtgtattccagcgaacgctcaaggaatttatctggaagacgtgacagctgataaccaaatccagactgagacatacgctcaagcatttcagagttaacatatcggtcaagaacttgaggattcagacctggtccagttttaacctgatgataatgacggcaataatcaatttcatagcgttctttgatgttaataaatgcaggactgcgttctaacccttccaagatagtcgttttgcctgcggggcgcagatgactttcatgaaagtcaaacatcaagaaatagcctttccacgtagtagtacgaccaatccaacgatgaatatcaaaatcaatagcagagaagtctttccaatacttatcacgaattgctttgatgttcatagcaggttgaaagttataaaccggaggagctgagtcagaatcatcaaagaaactcaacccgccgcttggaaaatattcttccattagcacggtattaaaatcgccgtttgagctatgactaaacagtacatcagcacgcttaacggtttcttcaagaccagcatttctacgaagtgacaatgctctatggtcatgttgatatacgactaccctaacttcaggtttaatgttctctatgagcttcttatagttatcaatcgctgcttctggagcattgatagcaggtactgagttaatgataagaatgtcacatgcgttaagcagagataaagtcttatcatagtcatctgcaagagacacaggaatagttacatctttatagctatgtgctctattacgagtaaacgctttatctttagcgtaaatgatatttacttcatggccatgttttactaaccactcacggtgctcgagactgaacttggttacgccgcatccctcaagtccgcgagccattaaaatattaatcttcatatattgacctttgttgttaattttggatattttaccattcccgtaataaagcaaaagggccgaagccctttaaattttcttgtatacaacataacccactgcttcacatatacgcttagcttcttcaaagcgtctaagcatatctaccttagcattatgaatcgcttcataatcgggagcaggtgcttctctccgagcagtatcacatttataacagaagtaactacgctttggtcctgtataacgttctgaacaattactgcaccggcacgtgtaatttccttccggccaatcatgtccaggattagaacccatcaaattcgtcatacatcccaattctcttcactagtaataaaatcagggtgttcatctaaatcaatgaatccccagttctcttcatttaccattcataccaccgtttaacttggaaggtgtcaacccagacaagagagttcttatcaattagcttacatccttcggtagagcctaacacgcgatattgattatctgctacctttactgccatcgtaccagtcgcagtgtttaaagtaaatcctgcgtctttacgaacacgtttaaattttacttgtaccagcatttagaatgtcccaaacagatttacgagaggtattccaacaagtcagaataatctcatcattaaaaggttgttttaaaatagtacgcagtttttcaatagcatacttgtaagcagggaaattattgtctaataccgcgtctccagcatgagctcgtaatcgctcaagttcacgacggtttttacgaacaactttgttggctcgagcaatagcttgttcttctgccgcttccattagtttctgttgcagctcgtcgcgctcttcctgggtaatattgttcatgttattcctttggatggtaatttatttcaaatgtgaattcagtatcagtccaattataactatgttcaattatagcagaatctgacctgaaatcagcgtcatgtggatttttcgggtcaatgtgaatatcaagatcaagcacctcccttaaatacatctttagcaaataagggatagcgtctaggtcttgcacatcttctaaaaacccgtcgaggttaatcttcagcctcatataaaaattccagattaggtccatcgcttgtaggttcgctctttttagcagaccctggcgccttataagcggtggattcatactgcgtcattttatcgtagatgtcctgaataaaggtttcatctgctaacgcaaccatatcatcgtcccgtgaatcatacacgttatggacaaaatagctgtatttctttgccatttctttgcgttcttttttgatacgctgaacgaatgcattgaaacaagcttgggttatatacgcatgcgggttatcatacttagtttcatcgaagttgattaagcctttaattgcggcttcaatcccgtctgaaatcatttcttgcttccaggattgggtgtatcctgaaaagttgaaacgcttactcagaccttccgcgatcagcataatagcaaggccgatcgtatcgttctgttttactactcgagggccgccagcagcttcagactcccggcacttctctttccatgcacagattgatttatacagttccttgttatttacataattactcatattgcctcttcgcttcaattaataatatctattatatcaaatttgggaagcgagaggattaaagcattacttaatcaattcagcgcatgcaattaatttcatcatgatacgatagaaatcgttatatgtaaactcagcagaaacattgaccgagcattcaaaatcttcgaagacacgttccattccgatgtctggaatgtcatctacatcagcgtaccagtacttgccttcctgcacgaatgttatttggtccttttccagatagaatacgccattcaatatttcgtgagtaagagttaactgaattttcataggtcacctttcatgatacgatagcactggaaaagtttttccataatacgtttgaactcaattaaactgatttcaaagtattcggattcatcttcttcatgcatcatgtttaagaatgaagtgtacagactttcataatgtttttcattcagcatagaagcatgagtttcccagtacattaattcgttggagaaccacacgcccatgtaagaatctattacgaattcacccataccttcaacagtgattgagatattatctatttcagccatttcttcaccgtatcgatagcatcttcaaatttagagaatgcatccacagaagtatattcattctcgccagaacgttcatagacccagaatgcatcaaaatcatcttcaataatgaattctccttctggagtttcaatcaagtttctgccgtctttagttttagacacgaaccatccgagtaaaccgatttctgcaatttgttcttctaccatttcagttctctcgctaatagaaaatattccattgaagttcctttattgatgcgatcaacacagaacttctttaatactgattctgatacagtatgaattaaagcagaatcagtaatgatatactcaatttttacaaatgctggtgattttccagcttcatcgtatgctaatcgttgagcgttacgaacatcttcttttgaagcgtttgaaattctgacgctgtcaaacacccaacggctggtaaaaatttctgtgtatagaataactttacgcatcaagatattcctcaagttcttgctcatttaaaccttcttgccacatctctgacggagacggaagttggctgtctagagtggatgaatcaattggaaatactctgataattacgctagtatcttcatcccattgatttgcgagtatccgtttagcttgactaatgtcaggctcagaatgagcccggatatacttaatccttctatgccatacaccggtaggaatagatgcgcacacgatatatgaaatcatttcgctgccttaaccgctttaacatcgcggaagcctttcttacgttgattcttcatcttacgaatagtgctttcagaaatttcaccgatacccggcgtgattggttctacaccaaaggctttaataccaaattcagacagaagataagcaaccactaattcacggatgcgggctttaccgattttttgaccttcttctttcatcgtaccgtgaagctcaacttcccactgatcaagcaaagacggagttacacaacgtccttcttccagcattgcagatactttatcataagcaaaagagttcagtacgtttttgattgcttgggacatattaatttcctcagtaacgattgttttgacagaggagattttaaatcaaatctcctgtagcaaatcaatctttgagagattttagctcttcgagcatatcgtagtattctttactagcaaccggagctacagtgcagttgtagctattgaattcatggtatttcacgaagcgttctaggtgccacttaatcagattgttaattcggtgaagtagaaccccatctgaaccaacgtagacaaccacttcaaattgaagcccatcccaaattctggtacggacgatatcacctacagcaaaagttttcatgcgatgtaccaatgttcgttttgccaagactcacccttgtaccagcgagtcatatcatatccattttcgtcacagatgactttgttcttcatcaagaagtattcgtcatcagtaaaatgcacatgctttactttacagcctttactcatagcttctagagcttcttgccaatttaaccagttcatattttcctctcgagttaaacggtatgctgttatccgttgatagggctatagtatcactcatcaactagcttgtaaacaactttgtgaaaggaatttaaaaataaaagagaggtcccataggaacctctaaatgaagggtatagaaatatacataaggtggtcaagatgaccttagaaaggaaccggttaatcttctatgatatctgggtcatgcccagcagcaataagattggttttgaatgttggaatgtcatactgcttaacgttatctataaaaatgacaggataccgaatagcaagcgatggatagcacccgatgcgtttagcaagtgactcaatcaacggacggtcataaaccggttgaccgtcaacctcgttgattacgttatagaactcatacggaagttgcagcttatcgagcaagtcacgaactgctttacatccagggcatctccaaacttcttcagggatgccatagatttctatcatttcatgacctgttggagtttagcagtcagagtgttaactcgtttctgaaattcttcattagataacttttcatctttcttggtaggattaatccaatctgcgatgataataaggacaatgaacggaattgctacgaaagcacctgccgttaatgcaaccaaagcgataacgttagaaataaatttacgaatagcattaatgaatttcataattttccttaaatagtaaagatgaacgctgtcatagccagaaattccggtccaaacagttcagtagccatgtggttcagggtaaacataattttgtaagtcagcatatctatttcctcaatcgtgtgtccaggtagaaccatttcttacccagagtctttggttgtcagaaccacgccagtttttagtagttggcagtgatttctcatatttcccatcaattataacatcgatgtgttgtagcaaatctaaatctttgatatcttcaaacttatatcctgtccacatccagatatctttctccggaaatcttgctttaacccaagaaactaaatttgaaatctcttcccgattctgtggataaagcgggtctccaccggttaaggtaagaccttgaatatacgatttgcttaaatgggatgcaagctctttaacagtattcatagtgaataactggccatttctagcattccaagtagatttattataacacccttcgcatttatgcaaacacccggtgacaaaaagaacgaccctgcatccagggccattcacaaagtcagaagggtagattctgtcgaaattcattgaaccttacctcattacgtgcttctacttctgcatcatatttccagggctcatcagtttgaatagccccagccgataatccactttcggggtcacgggttatagcaattccaagcgggtgcagaacctctttgttgattttccaaatcaatccccattcgctaagttggttccaatcaacttgcttcattggtttctctaacatgttttaccctatgcataatttctttgttcttaccaagattgaacccacgctcagaaggattaccaagatagccacaagtcctacggattgtattcattttctttggatcagtttcaccacaaattgaacacgtgaatccgttttcagtaggtgtcatctcatgagtagaaccacaggaaagacatttatctactggcatgttaacaccaaaataatccaacttctcgatagcatagtcccataccgcttcaagaccttcaaggttgcgcttcatgtcaggaagttcaacataagaaatatgaccacctttagcaatggaatgatatggtgcttcacggtcaatcttttcaaaaggtgacaggttttcttctactgacacatggaagctattagtgtaccagcctttatcagttacgccctttacatcgccaaacttggcttggtcaatcttacagaaacgatagcacagactttcagccggagttgagtacagactaaaggcatagccggtttcttccgtccacttgtttagcttagtgttgatgtacttcaggacgagtttaccgcttcctttaaaagtaagcatatcaaattcgtgaatgccaatatatcctaatgaaattgaactacgtccatttttgaatagctcaagaatttcatcatcaggtttcatacgcacaccaaaagcaccttcctggtaaagaataggagcaactgatgcagtaacgccttcaagggatttaattctagttaaaagggcttctttacaaatatcaaggcgttcatccaatagtttgaacagtttattactgtcatccgaacttttataatttgcatccagagctatcctagggaggttcagtgttactacccctagattattacggccatcaagaacgggtttgccagaagagtctctccaagcaccaaggaaacttctacagcccattggagatacaggagtttctgaaccggtaattgctctattatttcgagcactgatgatatcaggatacatgcgtttagctgcgcattctaatgcaagctgcttaatatcatagttcgggtcttctttacgtagattaatgccttcttctacaaacatcacaagctttggaaagattggagtaattccatcacgtcctaatccacgaatacgattatcaagaatagctcgttgaattaatttttcttcccatgacgtgcccataccaaatgtgatagtcacaaatggagtttggccgtttgaactgaacaaagtattcacttcatattcatatgcctggaaagcatcaaacacgtctttttctgtttttgaaatagcataatcttttactaatgctacttgatatttgcgagcatcacgtacgtgtttagcgaatgtcttctctacataaggagccaatactaaatcgacgttagcaaacgtagttccaccatattggtgagatgctacttgtgcagtgatttgcgccatgatagcagtagctactccaatactcttaggagtttcaatttgagcgttaccaagtttaaagccattctgcaacatacccttcaaatctaccaaacagcagttggtgaaaggcaaagctggactgtagtccatatcatgaaaatggataacaccttctttgtgtgcttccattacagaggcaggaatgacctgattggcgatatgtttagatacgataccagccatcaggtcacgttgggtaggaaaaacacgagaatctttgttagcattctcgtttaaaaggtccttgttggttttattaataagtccctggatttctaattcgatattcattttaaactcttacgaagctgcttcttgtattttgaagcaagttgtgattttccatcactttcctcgtatgtaaacccatgcaattccatttcagcaatcatctcaggcttaccaagacgtgaaaagcgtttagccatatcggcaacatattgcgggtgaatattactgtctttacgattctggcggagatagaccagcaaattctctaaccattcgaggtagtcaatatcttgaccttttaaaccagagcggttgaacttatgcttcatttggccttctgccgcattacacaggttacagagcaagcctctgacctttcctgcattgtcaccttctaacgcatggtcatggtcgaggtgattcttttgaatatcctcatctaaaggacgtttgcagcaaggacataatccgttctgtgcctgatatagtttttctttttcttctttatataacttaccggttaataacatactcttacctcagcgattagataagagtatttatagttaaattaacgagtaactactatagatgttatgattagactcttttatgcagaaagaagtacagaaagcatagatgccttcataatcatccgcattgaactcaatatatgaattagtttcttcatgaagaagactcattttagtccaagccattccattgatgtcatcgtcgtaatagcctccactaaattctactacatcgccaacttcataccaatgactgcgtaaaatttctcttgtaacacgatgaatatcagcgaaatcgagaatttttactgtaatagttttagtaatgcacgatttagacatggcgaactccaagacgttgttcaagtgcgacaatgtaatccgcagctttttgcattaaatcatactcttctgaatcacaattttcctgtccagcaaaggcataaagagctctggtaattggaacgattgcgccttggaaatggttaagtttaatttcagaaatcagaggaacatcttcaccttgaccaatttctttaatttggtgcatcgtatcttcgctgtagaaacaccagaaccaagattcgccgtgtggagttgggtcattaattgtgatgattttatttgtgagcaaatcaattactgctgtaatgccacatgtttcaaggtcatcttcattaactgcattgataacctgaaatttaaatccaggaacaaactggggaaattgttcagttaattcatcatcattttctataacttcaaactgcttaccaataagttccattcactttgtcctcataatcaagtagttcgttaatggtaggttcagaagtattataatcttcttcaggaatagcatcttcctctggctcgacagtttcccaccgagccgcataccaaggttttatgcctttgctgctttgcatggtgccggagcggaatcattaacagaatcgtattcaatacgccattcaacttcagtacgagtaactactttctcgtgacgagtgacgatatctacttcaggaggattataataccaatcggtatgatatgaacctgaacgagactctgataccatgaaatggacgccgcgtgctggataataccaaatctgagaacggctttgatacttatggtcctgtgtccaatctccatcttctactaaaacaaagatttcttcctcttcatcatcaccgttcggtggatattcgaaatcatagttgtcgtcccattcgccagtgacaccagcaatatgtttgatttctttaagcaattcagcgttagtcattttagcctcgcagtttttgtaagtcttcatcgtcaatccagctttctaaaccagatggaagtgagcattcaatttcccataacagttcttcaatagcatggagacgatcaatctcttcagctggaactgttaccattcgtggagtttttaaatcatcaatatcataactcataactcttcctcatgccaagaacaatcaacttcaaaatctggtccgagctcttcatcttcccaacgccaagaccctaatggattaccagcatcgtaatcaacttcaagaccaatataactccactgaacaccatgaatgatatttccttgctttacaaagaattcaccccattggtgcatgaaagcatactgcggatcagatatagctctttcaatcattgctttacgaagattacgttctaaatctacttggtcgccttcaggaaaaacaaactcaattgggtatttcataatttcaccatacactcgccgtatttccatttagacataaccttaactccattagagtaagttacctctacctttgctcggtgattcttaatctgcttaatttcaccggtttctaatccgccatagccgtaataaagagctacaatatcaccctcccgaaggagggttccgcgataatcatgcattgaatttgaatttacggagttcatcaaaaccgccgatatgtgtgccatcaggagcaaaaatctgaggcatagttaatccaacctgcgattcgcgacctagacgacgaagcaaatcactgataactacttcatcaaatacacctttttctggcattacattgatgaatgcatactcttgtttcttaacatcgagcagacgctttgcattatcgcaaaacacacacttatgaatgttgctgtcgtaaccaaaaaccgtgaacatcttcttctatttccttaaatacttgagcttgaacttggttccaatctggatggcatactgctttaacgtaatttgtcataccaagacgcttcattacttcgccatcaattgcagcttgggcaaaatttcttccacgagtcatagctcctttgagtttagaactatcaactatttgaccagtctcattataataaaccgaatacatgagtagcattactcgttcggcttcttccatatatcgtttacgagccattttcagccttagtagttataactaatgttttaccatctaacgcatcgagaatatctttgatgcaattatctggcattggttgaacgctagctaattgcttggcaatatcatcaggaattcccatgcgaggaatatttaatttgctaaaatcaattttatccattagcagttaccgggaagtgttctgccaatttagcagcaatggcagcgttaatttgatcagcgaaattcttattcattgcattaacaatgatttcttgaattcggagattagctctttcaatagacatcttaatacggccttcagcttgcttaacagcgtcatcaatagtttgacgaaccatatcatcaatagcatttttagcgcatgattgggcagcgttacgcatcatctgtgacatttcttctttagcagacatatcattccaaccgcgagtatggaacatctgctgaacctgcttcttaacttctgctcggacatctggaatagtcacagcagcaatattaacttcagattgtactgcttgttttagtttattctgggaatcttttaacaccatttctttaacgatgttattgattaccgactgctgaagctgggcacgagcttctgtaccttctggaaataactgtcgtactgcatgtgtatctaatttaatgtcaatcattttacctttttcactccaggaatattagagatagtttcaaatacttcgtcaaagttatctttatcaacggtgactacaatagtgcgagcggtctgtttctttttccaacgtttaaagaaagtggcaagactcaaatcatgggaagtgaagaaatcatcggttttgtaaacatatccgctttcaatttttactaccgcatcaggcgaagggtcttcatattcttctacttcaacatcatcaaagagtattaaagtgtcatcatgataatagccttcccagaaggcttcatcgttataaaattctttccaaagcgcgccagtggttttcatttaatcaccttcttccaagcttcgtgagcagcacacgctaatacttcgtcatcagtcaaattgaacttgccttcattacgacgagcaatcatttcattgaattcagtatcagttctaagcatcatgttaagaactgtaaaatccattgtcgctcgaagatattctttaagctgcatagggtcgatgccactttcgtatgcgtcaagaatcatatctgcaatgatgttatcaaagtttttgtcttttatgaggttattagcatactcgacaaaaaacttagtattagcaccagtaatagttttagtaatcattttaattttctctcaaatttatgcttacaagtccggcatttcattttcagaatatcggttgtccaatcaacaagctgtacttgaatactaccacatttttcacaaggcacaacttgtttagctgcagcttctcgacggtctaccatttcaagacaggcatcccaatcaattttaaattcaggtacaggtggatactcaaactcaatttcaaggtcgttatcatcaacgaccatgtcttcttttaattgatttttcacagtaagctccgggcatactcgagagattcataccgctctttgtactcattaagcgatttgactaaatccgccatcatcaattcatgcttacttaattcagcttcttttgtatcaataaaccgcttaactgattccatttcagctgtaatactgtttttggcaatttcaacatgatttactggtgttaacggaagaggcttaacaacattgagatacatatgcgctacatcttcatcaataacctgtgtgctcaatgttttaggaaaaatcttaaatgggtccaaatgtacttcaagaacagatgagttttcaccctgctgtttacagcatgattttttaactacatccatatggtctaaagcagtacgaacttgcgctaaaagcgcccgggccggatactttccgctggacaaatggctgttaatatgaattcgtacagttacattgtcaagttcttcggcacgaataaatgaaacacccttaggatttctagaactagtagaagatacctggtatttcacacggtcatcgcctttaagtaagcaaattgaacgattaagaatacgacgcaggtttgcattaaattcagagcagaagatttgggcagcgctgcggtcgtgtctttcttcagttttaaacgcccctgccgcaaagctataacgctgaccataaattttagcattgccgatagcaaactttttgagctgcttctctgctgacattgcacctaaccagcgagaacgacgaatgttttctacaacaaaactgacatagtttgcttcgtgtgctgccatgctatttagcacacgacgagctacgttaccagcaattgctacgttataagcagctggatttaaatcatgtaaagctgccaaaacctttacgtgcttctcacgctttgacaagccctttccattatgcttatcaaattcaccggctacaaacatctttaattcattcttattcattatcttttcctctattttggactgggctcaaagagtatctcaaaatctccctgaacccattatacaacaattattcctcaagcattataactttgcttgggcgcttatagaaagcatgagttttatcatctttcgctaattcaaatgtagcagtaaactgtactttgcctctgtattcaaacggaatactttttggaagggagccgtaaaccgtagctccattctcaagtacaaccatcatcttacattgtacgccgtaatagtcttcataaacttttactgacgttacggtaccggagacagtcactcgtccttctggtgcatcccctttattcttattcagctcattgaatatattatcaaagacctcttttgaatgttcctggatagcctctaagatgctcttatgggctctaacttctgccataacaacatccgttccgtcttgcaatttccactctttatatggaacgcgtacttcaagaggataaccatactcacgaagttctttatactcttcttgagttaagcggagtttccaccaaccgtggtcacctgtatactcaggcttatccagtgaatcaaattctgtaacatacggcaagtaactgcctgcgtgataagcttcaacttcacctaattcattttcccaaagataaccatcaaagggagcatgaggacgatcatctttgccccaagtaggagctacaactttatcaaagtattcacgaccgaaacgggtcttcgcccatccagcattcaactcctcggcgcgtttttcaactttcgctcggtgtgcttggcgggctacacgattttcttcaacaagtgcagagataatctcggttaaagttttcattttattctccagtttggttgacgagaccatcttatcaacagcctcgccgaaagtaaactactttgtgaaaaattttctccaaagcagaactgcatctctacgagatacttctactgctcctagagcaactgcttgcttgcgacgaacatcgcgcaaatcatagtgtggaactcgcttatcctggaaccaagaacgtttcattccgatggcttctgccatagcgtgtaactcatcaaggttgtcgctaaacatatgacagttctttacttgatgacctctcattttccaaccatgattcatcaagacatctacgtatactgtcatttctgattctcgatgtaggtttcaatgatgaactgtgctaaacacagaagattatcttctgaaggagaatctactaaattctcaaccatttcagaaatagttccaaaagcttcttcagtattgaacatttcttgaagttcgttccaagtaggtgctttcatttcaatctcctcattagttaacgaagctatcttatcatggcttttctaagatgtaaacaacaaaagggcccgaaggcccttaaaaagatcggaaatcactgttaaaccatggcgactggtgctgtcgctgcttaagcaatttcacttgatgtttcctattgtcttctataagcatcttagaggcttttagctcttcagccaataataactgtttacggtccatcaggatgaggttctgggtcttctgagcaagtgtctgaatacctttgagaccttccacagattcctccatccctcgtttatacttggttcgggcagcatttaactgcccttcgtaatacgcatgtatagacactatagtactaaacacattttacctcaataacatctaagataatatcttcaacgtcttgctcagggaatgccacgccattggtctgcccatgctgaaatactgcttggtacgctgacggcgcagaaattcgggttgaacgttctttattgtcatagcatttgccatcaataaagcgtttaaatttaacttcataggtttttaacattattacaccttagcataattgacgatttgttcacgatcagcgggccaatttaaatcagaacgtttcttgtttgaccacgcaatattttcttcagcccaatgaagtttagccgatacgctcttttgtacgtctctgatggcttcttcaagataaatgcctaaatctctcgggttagttccttgagttttaaatgcattgagcaaaatatttcttacaacttctttaaattgattttcaacttccgggtgaataaattcacgatatccgctgcacggatatccaaaagcatctaccatacgagcagtactaaattctttgttcataatccgagcgcctcgcgttcatcaggatttaatttagccaaagcggcttctttaattttttccaaccgtttacgcttagcttcaggtgtttcttcctgaacactaatagcagcgcttttaggaaaagtccatgattcgccattttcatcggtgaatgtaattagttccgttggcttacgattaactgtaccatctgagccccaccaagactgccccttaactgcttcttcggcaacgcaatatgaaccataataaccaaacaactcactacggcgatcgtctggagagacatacgctgcataggcttcactttctgtcattacccatttcattttagcacctcataacgaataagttcaatacggtttttaagctcttggtatgatttacgccaaggcttataataggcatttaaatcttggtgttgtttatgcatttcgtctaaatgctttactgcatcctgcacatttgcaaggaaagtatcaaatactttattagcgtattctttcctgagctcaatgaacggaggagcacgaaatacgtttaccattacacgtagttcatgataagaagaatggacttcagctaatacatttttcttatcgccaaagttaaacttataaagtttttcacagattgcttcacaggctttctctgctttacccttgggtttacctgcaaagatatgaccaggcggatatactttaatatcgtttaaccaacattcaatatctttaatagctgctaaactcattgtacccacgctccattttcatcaatgtaattaatccactcgttaatagtccaggaagaggtatcacctttaggagtatcaacgatatacattccgcctttaaacaaaacacgttttacatcattagaaattaaagtagccattatattttcctcagttagggaggatttctcctcccattaaaattatttcagcattgttacttcagcaatttcacgccagtttttacggtcagtcgcgacgaaatcaccaatataaagagcagtacggagagatacgttacgcagacgatttacgttatctttcataaattccaaaacttcaataacttcagaatttcttaacccacggttctgtaacatagaagtagtcattattacatcttgaacacgaaccataatctcttcattagtgtgaacaccaaggtcaagataaactgaacgtgataccaaggcttgaagatgcggagcaagtttagaaccgcgctctaattcacggtcaatatcaacgttagtgataaagaccacagtaccttcaaactcaaactcattaggaattcctttatcttccaagaaagaagatgcagtgctccagcatactttacgtttctcccctgaatccaaagcagctttcagaaggttcaaaatatccatatcagagaatacatccacatcatcaatcagaagaactgaatttgcttcacgtgattcccaaagacggcagtataaaccaattcctgagattttgccgttcactgatttgtaatcaatagcgttagtatcatgagcatgttgtaatgctttatccaaagagtaagtcttaccgatacctgctgctccggagataatcagagaacgaatattcccgtggattaagccgttagtcattaatcccatgacgttaaagcgtttcttgatacgctctttcatttcatcaacggattcaacaacttcaattttagcagctactccgtcaattgtgatatcatctttgaatacccaaacaccgcgctttttgccattcagttcaacaaagactttaccatcaccctggcgagaatcttcagcacttaagctatccgggaaccactcaccgagtaactcataagtacctgaaatctctttgccgaagtaaatccctttcttgatggtgatagttgacattttattctccgttactctgttttgttttgatggagctatagtatcaccagctcgcgagcttgtaaactacttttttcattcttttgaaacaaaaagaggagcccgaaggctcctcagttatgcgtgcttgttgatagcattttctgctatacgttttggaagtttacctgcccagcggaagaacatgataatcgctccggcaataaacgcagggaaccaaaagatgagataaaaccaatactctcctgctttctcgatggttccatttttgattagatgcttacagacagaccaacccacgacaaagtaaattattgcaacaacgattggcactactacgctccacagtaaaatcatatttcagcccaataaagtgagaaccggagctcttctccggcccatgacataaatcggtggatttgttttcgagttggtcgagcagagaatttagcattttctctacgaccagtctctctgcaaactgcttccaaataccaccgtctacctttatgaggtcttccgtaattcaagaagaccttcattgtatcatttgtagtaagaattgtggttttcaagataaaccttctcgacgaaatcgtcccagaacttcatgtctactttcttaggcattccgttcttttcagcagtatgagctagaatttctacttcatctactacagactcgagaagctcctgtacttctttgaacggtaactcacctgctttgaccatcttgaccattttagcatgggtcagagggaattgaaggtcaccagtcatatagatttcctgaagctgcagacctgcacgaagagcatgactcagtgctttccagtcaacgccttcgttagcttctgccttacgagcacgttcaccatattcagcatcaagtttctcaagagaatacttcatctctttgatagtgatagtcgtctggaatttacgacccagaacgttataaaacttctgctcgcctgatttgtggtcaacgaaggtggtccatttgaggaattcacctagaggaagtttctctgcgatatcctgtactttccaacgctcattgatacccttctgctgaggacgatcgtcatatttccattcaggaacatctctgataacatccaggactttatgtaaatctgctaaacgagaacccttaacgccatacttacctgcttgcttacggacatatccaagataagccttcatgtcagtggtatagaaacgagctcggttgtcttgaatgaatttccatacttcaggaaggtcagatgcaactaccaattccggtggagtatgcagcatatccaacgcgacagtttcaccgtcagcagcgagcttgaagaaatactttaagctgaacaactcatggtcaatatcgtctttggtatttttggttgcgctgttgttagtattacgattggtgtggttcatcgcctgacacattagaatatcacgcggatgaggtacaaagatttctttaaaatccacatctgactcgggagttgaagtaccatacagatgtgaaccaaaataagattttacgattgttttcataagtaaatatgattccctttagcgaatttaactaatgcattagaacgcttggctgcttcttctgctcgagttttatctgtagttctttttgatgtacggtaaacattaccaattttttgactggtgtaataatacaccacttcgtgggtatggtactcttgtccatcaggatgctgttcacgacaggtttcttcacgcagtgtggtttcatacataggaactaatgcccaatcaattcctgtgctaatgattgccacctgaatgtcaagtctgttccagcgaaatgcattgatatatcctaggacccgtgattccgggtccatcattgcgaatttaatgttttcggctgaagctaacggcatctgtttcacaatgctcatactaagttttttcttagtagttacgatttcaatttccatgacccgccctcataatgtatgtctaaatcaatgttatctttgccgctgtacttgccagtcaaaggaataaatttaaccgtaaccttttcgccgtcatcaaaagtaaattcggcaatagggtatgtagaaattataccacgttcggttttagcacgaaatacggcccgaaggccgttcacaatataaacttgatcattcttcactaggttcacctactgtaacatcaagcatagatttaacgagcgagatgtcatttgtactaaacacgtgagcttttcttttatcgttctgacaaaacatgcttccatctgctgcaattgctagtacttcatagcagttattagttgtagagaatttatcacccactacaagaggaacattaactttacacttctcataaactgtgtatttaaggctgctgagattaattaccgacttagaactacccggtaaaagtttgcagatataaaatccatcgtctgccgattcatttaggtaatcatcgatatacattccacggtagccgtcttttggatatactacagtagttgtttctcggctgctatggtcgtaatatactacgattttgctgtctttacttttaaagaaaatcgataccgtatgcgctgagctgcatttgaagatagaaataaattcaacttcaagctcaaatcgattgctttggttatcaaacccaatttctactttatcaccaacctttaagggtttttcaataaggctttcttcaaatttcatgcgaataaaacgtttcatttatcaccttctacataatcaatcattgggcagactttccgcttacgggcttttaaatactggacaaataccgatggttcggcttctgcaggaagacccgcttttactcgagcaagtttcttcgtaaattgtttatttttacggtattctttaaatttttctaaaccgaaaataaatccaaacgctatagctgcaaataaaagcacaaatgctgctataaccactgcgccaactggtactgctacaacgtttaaccaaaacgcggataaactaatacctatccaagagagaattcctgtctctgccacaatcggccaaccgaacatccatgcaacagaaccgatgaacgtgataatcgccgaagaaaacacaacatgaagaactgtcgtccagaagtatccacatagagtttttggcattttccacatgctgccagatttaaaccacaggttcattttgaaatgccaagagtttttattaatattcattatcagtccttcatagttggaatcatagttacaagatatttgaccagttcaatagcgtcgcttttatcaatagctacacaatctccgtcacgttcaatttcgatgatagtattatgttcatacgtgtggaataccgtaagatacaaatcaataacatgcgggctttcatcttcaattactgcatcgcctttacgggattttccgtcccatactaatttactcgccatcttttgcctctatcaagaattgaattaatgaatcaatttgtttagtatcaagatgaattatatcattgccttgttttagcacgatacgactcaactttttagtgaaatatgaattcacaacctttacacgcacatcactgtacggattatctaaattggtactatcaagaatactttccataattacctcaattgtgaatcttttgaaccacgacgattataagcagaagtcattacaatgtcccactttccttgacattctacacaccgttgacagcctttaaccaacagacgacgagctactgggatttcctcatcacaatcaacacagaactcttcggattcccgctgttcttggagttgtttctgaagacgggcccattcaatcccgtctgctattgtagcttcgcgagttgcaaatccgtcatctgatgggccccatccattcatttcaaactctccagaatcatttgcaccaaattatatgtaaacatcggatgctggtattgtaccacaatgtagatgataagtaaaacgtttctcattcttcgccatcatcaaagtcgtagtaatcataatcacaactgtcaagataagaatccataaattcttgttgacggcggaaatcttcagaaggggtcagtctgtctgcatatgcttgatcatctggatcgctgaacttgtcttcctgaagttctttaatgaactgttcagcttcttcacgcgtccaaaacccacgattaagattatgaaccgaacgcttttcacctggcttgaatacgcccatatcatgagcagaacgctcagttgaataactttcagtttgaccagcatagttttcatattcacaaatcacccggaagaaaggagattttcgcgaatatacaccgcgaagaccgagttcaacatcatacgtgcctgaagcaacaatgtaacgcgttatttcgccgcttttagtttctgtgcgattaacaccacacacgtgataaaagatttttccaggttgaagctcggtggttaacttaatcataatgtttttctcgtttggttgttgatatgtctatagtatcatgtaatgaagggaagtaaacaactttttgaaaagaaaatgcctcccgaaggaggcggagggtattactgcaatgataacaaatacttagtcttgtagcatagacctgtaatgtcatccagaacactttggagggcggcaggaactgacttgtagataccatcggccttagccagaatgaggtctagcatttcaatggtgtcctttggcagctctttctgcgatggtaaagccggtgtataactcttacctgagaatcctaaccactgctcaccaaaagcatctatcaaatctggaatctcgttaaagaaaacttcatacgctttatgtctggcatacgatttggtatcaaaatgcgctgaatgaaaatacgcctgagacgccataagtaaaccgatgaattcatcttgtggagtaagtttaccgtcctttacaaaatcattgaatttcattatcgagttgtatcctcatgcggttagcatattcttcacctgctgaacgtcctaaagaatcgcaatctttagaacaagactcactcttccatttactttgtataaaagaatagaactgttcagactcttgcttactaggctccttaaatttagcataaacttgtagagctccctcaacatacgagttataatccgaaatgtcgttgtgtgatgcagctgggagtgaaatcccgcagcccaacaccagggctaagcaaatgtgattaaaggccatacggcctcctattatttttgtccagtattacgtttgtgctgaagtacagccttaacttctttgaggtatttgtccagcttacgtttacgggtataatctgcttttgaactgtgctgacgaatttcttcctgaaggtgcgaaataccatgcccaatctcacgacgaagttcgtccagttgttctacagtaagattacgaagttgcttttcacttaaatgctgcatatacacctcatcagttagtaatagtatttatataagtatgtgttacttaatcccaaagccattcgcagatgccttgctcaatggttctagcaccagcttcgtcccagttatattcttcgtcatacttcaatgcgcgtttaatttcggctttatgaaatagacgtgggatcggcatagcataacgggtccaacgtagagttttccagaatccatcgcgctttgatttagcaatcagtttcttggcctctagcggtctttcccgattttcagaaatacgcagttcaacatatttctgttgggtttctttatctttctgagttttaacgtattcgttatagcttttaatataagcaaattcgttattattctgatcgttccatttggaagattttactacatgccagcctttacggcgaattgttctagacattattacctcgttaagttaaagtacctcaacgatagtaaaatcctgatttaaaaaatttaatattcatgaatagatgaccttacatttacatttaggacattcaggttctttatttttaagacgcttggtagctgtctttggagcagtgttgtaatcatatacatgaagacaacggtagcacatcacatattttttcatattaaaccatcaacgaaagcaatattacgtacagcaagaatccaactacgaatcctagtactataccacccgctatagcaaataagctactcatgtttaatataacacccattcatattagcaataaagtctttaccctgtgccaatactttacattcggaatcaagacgattttgaagttcttctcgtctatcgctttgaatagatgctgctacacccatccaaatgaatagcatacttaaaactagcatcaggagagtattatacgttcttggcttcatcataagcacctaccagttcgcaccagtgtttacgacaaagagaaacgtatttgtcttcaccaccaagttctactacttcaccatcggtaatagcatttccgttttcgtcaatacgagctaccattgtagccttacgtccacagtggcaaacgcccttgagctcaacaagtttatcggctacagaaagaagagctttagaaccttcgaataactcgccgcgaaaatcagtgcgaagcccatatgccattactggaacatcatacaagtcaacgattttacatagctgaagaacatgttcagcagtcaagaattgtgcttcatctacaaatacacaatgaatatcacgttgtgtttgtgcccacttgaaaaactcaaggatatcaatagattcgtctactgtattagcttcatgacgaagaccaatacgagaagtaacttccgttgccgaatcccgagtatcaatagcaggtttcagaatgagagttcccatgccgcgttctttatagttatgggctgctgtaagaaggttagctgatttgcctgcattcatactcgcgtagttgaaataaagctgtgccattaaagtgtctccataaaatcagaaatagcattcttagaacgaatgagttcatcgtattcttctggtagaccatttccgtaaatggcactaatagctactacttgctcggcacctgcataatcgtcaatcaactgccacagtttatttttttgctctttagtaatcatctatttacctctaacaagacgtatttagcttttagcctcttcatattctaccactgtaatgtcaatatcaggggttgctaaattaataagtttctcaattagttcccaatcaccgccagcaataccagcaccaatctttggaatgtatagaggacgattataaacaatacgaccagaatttagttcatggaatgcattaaaaattgcgccgtaatcaacatttggacctggagcatactgagtatacaaattatagcaatatgcagtgccattcttgtgaatggctcgagtatgagttccaagcttggctaaattattgtcataataacggtcttcatcgatgtcaatatcgagaattggaggatatgctttagcaagttgtcctgctacaccagcacccattgtagtaaagcaattacatccatgagcaatatcgcattcatgcttcatgaataattctacaatattacccttaatatatccagtaatcatttattcacctatggaattttatatgttgcatattcattaagattattgtatactcttaaaaatatagcattgttacaattaaggatagggttcagcactccttgttctttaggatgcattactccgtcaatagaaacgccatcgctctgcattccacatccgcgagcattatattcgacaagtggaactattacctggtcatctttatcttggtaattataaaatgacattagcaattttctactgctaggcacaaatgctatttcaatattgttcttgaatggaccgttgctttctattttagtcccctgcgccgctagtacaggttcaggatagcctgggagcttttcccaggcattaactgaaaatgcgcagcataataaaatagctgcttttttcattttgatgatagtcctgacatataacgagccattaattggtcacgatacattaaacatatattttcgttaggagcattgacacataaatctttcatgctcttagccttacgatttattagtgttgtccactgggccgggctacgtgaatcttttactccatcgctgaatgctgaatctaattcaagcgctaatatatcaacacattcagagttcgtattgcaaaatgttttagcgatacgaagtgaatctgtcattgaattttcagcattagcagagaatgccagtaccaatccaagaagcgcggcgtactttaccattattccacctttatatgtagcattttatgtttctttaagaaattagctttctctaggacatctgacgcataagagtttccccttttgacattccatcctgcattataactagcaagagcttttcgcatattgccgttatgtatatttaaccaatatgaaagctcaatatatgcccattccgcggaattctgtctagatttaagcatttttcttatttcagaatcactaaggtttttgccttctaatttagctctggctttaaccgtaggcaagtaattttgaaataccccataagaatgatgcccctttcctgcttttaaattggctcctgccgaagattctttccatgatatagcagccattatatatcctaagccgttattatcatatcggttatgcggagatttttcctttccggatttttgatattgctcaccaaaattatatgcgtaatgtaagttgtcaagttgaacattactgaaagttggctcagacccaaaggccgttgaacataaggccattagaccgataagcgcttttttcatgtttacctcaattaatgtgtataacttttgtgctgattttacctttcaaacgtttatcattaacgaatgccatacgacactttatactaggtccttttcctggtcttggaatatccatggtaaaccctagccacagatttccatccgtaatttctaaccgcattggcttatactcgatgttttcatcaatgtcttttgggtcaattggaagccaaggcattgctaagaattcattaatttctttaaggtgattaggaattttggaaagaacagagaatacatactcttcatcaatttcacgttggatagcacggtccaacaaatgatcagagtacttagtgaagaaaggctctttaccctcggctttcgcccgggcacgaacagataaattcaaagagcgaaatgcttcctcaaacttacgacgcagtttagttctgcggatgaatacttctgggttagttgacatagttcattctcctttgtttgtagggccatagtatcatggcccgtaaggaaagtaaactactttttaatatttttcttctggctgaaacactgaacgacacgcccacatagaagcttccttcaagtgttgaatcgcgttgcgaatttgagtaatacgctcatgtgctaaatcaaattctttgtcgctcattgcgctaacatctaaattcatgtacttttcaacatgctcttcttctaatgctttaaaaattaatccaagacgaatttctgcgtctttgatagcattcactttaccaatcttttcatcggtatgtggcttatatcctttgatatcttcaattgccattatagtgcctctgtgaaagtacgggcgataacgtcgcgctgctgttccggagtcagggagttaaaacgtaccgcatagccagaaacacgaatggtcagctgcgggtatttttccggatgctcaaccgcgtccagcagagtttcgcgacgcagcacgttaacgttcaggtgctgaccgccttcaatttttactgttggctggtattcaatttctacttcacgcgccttgtagccataaaaagtttcagcatccgtaatagtatcttctttaagaacttttgaaacgattactcgtgcgtcatcgccatcttcgatgtaaatggtgcctttaagttcaccttcaagaatttgatatgctttcatatttcctcttaattagattctttattccaaccgtgcatatatgcagtaactacactcattttattccattcgtctgaatggaacttcgcagctgcttctagataagttattttatcttcgtgataagtaacttcttcatcagtttctttatcgtactctacaatttcaataggctcgtcaactccatatccgcgagtgcctatatacgttgtggcttcttcccactgtttggttgtttcattccaagttccattctggtgagcttcataaaaatcttgctcaccagaattactgaaccattcacagaagctctcgactaggtgtggaggacaccttataacaatttcagccattgcattgttttctcttgaatgcgttggtcatatgtgattaagcttgaactaatcacaccttttagcttaccagatataaactcaattctaaaattaggataacgattcatccacttcgtgttaggagcattagaaatgaattctgcgcctttaaagggaccagacagaaacttgtagcgcttgtactcaagcaggttgccagcagtaaccattgttattaattgcttcatatcggcaaatcctgtattttccattactgtaatcatatcaacaatttctgtctgtgtcatcattgcattcctatcacgaaaaataaaggtaaggtatcattaggcatagaccatctgatagcttcctggtacatatcatagaacttcatcatatcgggaactttcattggttcttcaatgataattaatgctcttccaaactttcttcctctgaacttgtaagaggaatcgttggatagaaattccctgattgtcatcggaacaattgatttagctatctcgttagccggtaatttattaattaaatgtgatgaattatattctcgtagaataccttccatcagttcagatgattgtgtgtatcgagtagataagattataaccgaaccatcttcaagcaaccaatcggtagcgaattggcataaggctgcggtctttccggtttgtcttccaccatctagacgaagggtaccgtactctcgcataaggcaagacggttcataaaaactgtagttgggattatttaatcgtctgtctgcagcgtctctgaaagcatgcatcagggtcaaataaatgggagttaagtgtttcattttagattccagttaaaggggccattccttggcacatgtttaatccatcgacacactatgtaaaccccttaccgcattgcgctcgaccttattacaggtaggaaaagctacttcactcagaggactcgacgttcatgaggagaggtcgtgttcggctttattaggaattagttttaattacgggctgcattagcaacggcgtaagcgtactgaacattagcgtctttaaacgtacctttagaggtatctaaatctgccttaaatccgcctttagtcataatctcggcgaattctttacggaaggccatggcgtcaagatttttccatgttgatttgtgcttggcaaattcacgaccagcgaagttgacagccttagccaatttattatcaataacccatttaccagctttaggcacaaacaccgggcctttctgcttagagaatagttttaaattccagcggcgaaggtctccatcggctttaacaaaatctgcgtccaagttactagcaacaacatcttgaatatggccaaatttaagtccatcagcttcaatatttaggtcgttacgccagcgaagtccttcccaggcgaaggctttaaagtctgaagcctttgtagctaaataccgctcaataggagctgttttagggtcaaagccgtttcctcggtaggtccactcatctttattaatgccttggacctttcctacagaagcttcagcgataaattctttataggttttcattttatatcctttaagttaatgcgtgttttaataaggctactataccacattaccgtctcaatgtaaactacttaattgatttagcgtaacgaatagcgccgcgatcgtttacgaatgcaattttaccattacgcatgtacattgtaacagtacgctggtaaccgttagaagttttgccagactgataacctactaatgcaaagttatcttcaccaggtttgttctgcttagacttaatacgcatatgtccatgggccattaaagagcgtgcatcgccagatgctactgccttacgagaagattcatcttcaaccgaagagacaaaatcatcgaatgaatcaaacttagcatggctcttattatataacttgccgtctactacgtagttatatccaacaacgtccatttcaatttctgtaccatcttctagcgtggcggtcatcttctggccttttttaaatttcagaagattacttccaacagattcagtcattacgccaactgttgctaaacgggattcatttaaaaattcttgataggttttcatttattttccttgataagcagaccaagttccggtccgcatagtttcaattacacgacgagcacgattaggtgtctgacgataccaacgtgaatttgcaagttccttggcagcagcttcccactttttagcgagtaataacttcattgaagctgggaacccggctacaccagacacacccatttggaataccatgttaatcagagcagctctacgaacatcatctaatacattatataccgggtttaatgtagcattagcaacaatacctttaattgccttctcaacatctttggcaaaaattacttctgcctcagcctgagtaatttggccaccggtagaacgacctaccagcttgtccaggttagaaatagccaaagattttgacgggtctttagtcagtaagtggccaataccaatggtccaatacccttcggtatctttataaattttgctatcgtatccttcatcaatacgcagcatgccaaaaatatccataaggacctcctattaattataggagtatttatttggccctacacttggctataaacatctcaatgctgcaattttcatacggcgtccatttatctttccaccacacataatctcttttatcgtcctcgggcaattcactaaatcccggatatagctgttctgctatataatatgctgattttgtatactcgccgtcaccgaagacgtatcgtgatttcattagtatacgcgacattttatctctaggatgaaatatgctaacccattttccatcgtgaataaatcgtagctcatgcttataaatgtgtggaatgcctaattcaacggcttcttccatagtaacctcactgggctgtgctatacatctgtgtcatgattttatacaaacttggtcccatcacatatttccattgagaaggtttaattaaagcaaatgcgtcgatttccgggaaaggaattccattttcatctttatggtaagttgtgcaacggcaatttctgaacatttctgggctcacagggagcatatatccaaacagatagatatccttattgctagcataatcatgtcgtccaaggtcatataagaggtcctggtcaaactcagtaaatccagtctcttccttgcattcgcgaatagcagcctcttttggtgtttcaccaggctcaacatgtccttttggaatatcccatctagagcctctgccctggatatatgtatttgtcatacgacccatgaaaagccgtttgtcatcggtaaagaataagattcctgcactgagctctttcattggcattcgttccaactttcttcaagaatatcttccatggcagtatagaccatagactctaatacaccatcacagttatatgaaccttctaccgagaaatcacagataggtccattaataccaagcagttcttctttaagtgaaatctcgataccgctcagtgattcattatcgctgtaacacagaaggcgagtatcaccattttcaaattttacatgcactgcaacagccattatttcatctccttaatccaggataaagtttcattacgagaatcatctttagatttttctttctttactttgggcttatcaaatacgccccgctgtcgctgggaaacgaattgcaaccaacgagcaagcattgcaaaccaggttccaacccctgacatccaacctagatagtacagcgtatcaccaaatactggtgaaaagaagtagaacccccagaatatcccaacaccaacaaatgttgagaaggaaaacaggataagcagaaataggaagaaatacaagaaatcatcatctttaatcattccacgataacaagttttaatcattttctgcagctcctaatccaggtgttgaaatcttctttttctttccacttcttgtatttcatacggtaagctaaaaatgtgcagcaattaatcaacgcgataattagcatccacatgaggctgaatgcgaaaacacctaaaaataaaagcataatcataaactctgagacgttcaatccaaagaatgtccctccaacaattacaaaagcacaatataaaatccatgtcacgattccaaaagctggcgccagcccatcttggttccaaaacccgtcaggtttacattcattcattttcttctcacctctttaataaactcaaacgactttttgcggttccattcaagagttaaattcttgcactgttctttccattcagctttacgcttataattattgcgagaccatttaacccatcgggaacattcaattaatcccatgatgagcaaactagttccccaccatgcaagcagaattccgaataacactgccggtgtaatatcagttaaatgcatgatatcaatcgcggcaaaggtacacattgcgccgacagttgcaccaataccaggaacaagggcataatcaatctgatcaaatttatagacataattataaacgggaggttcacttggcagatataagttactcatttctgcaccctctcacggcagtatttgataaattcatcaatgattaattgtttgcctaccatgttgttagagtcaaacatacccatgacttttggtggtaattcattaacacagtaatttaaataattgctataatcatcctgagatgtcacgtatttaaccagattaataccgagacgataactagttttattatagataatctcgataactactgtatatgttgtggagctagaagtaaaatatccatcggcattagtacgagctgatgttagatttgatggagaatcgttgaaagaataaattccgtaccgaagtgcaaagatatctacaagcttaactccgtcggaaatagacgaaatattagaaattaagtttttcagcttggaatagtctttaagaacgatagcccgcggtaaaactgtggtgttatacccgttatagcgagttttccaattttcaggccgagtatcagaataagcaaatttctcaagaatatcagtgatttcttttgggaatcctgctgcaattaattctttaatttgaggtgttgccattggaatatctccagcgcattcatataacattttattatccaagttaggggcccgaaggccccgataaaattacttcagactttccagatattcctggacatcagcagtggtggtttcaataccaggctgagtaccgctgaaggtttcaactttcatcatgatgtcttgtacatctactttagcgagttccgcgatttcaatcacgtcatcagcagaggtaatacccagagcagaagcattacgggtctcacggatgtattcgagtttcactgccaaatcaagacgttggtcatcaagcttaactacggtttcttcaatttgggctcgcatttctttatattcggcagctttatcacgtaaagccttagcagtacgacgatacagaagacctagtttagcatgggtttctacattcataccttctgccatcaagcgacgaatttcacgctctttggaagcacctgcctggtctttttcgtcagcaagtttcagcagacgcttttcttcatttaccgatttaacatgcgtggtacgcagtttagtgatttcatcaataatacgatttgccgcagtggtatactggtcttcaacagaagtgttctgtgcaacaaaggtaccgaatttagaacggatgaattcaacaagttttttcagaatagacattttatttcctttcaatagttatggtggttttattcgtacggattaatccaatcataaacatatggtttaatgattagaccctgttcatttttgctgcgctcgaatatctcgatgtaatcagtaacgtatgactctaacccgagaataagaacagtttctttgccttcttctactgttgccttaattaggcgctcgatagctattttagcttcaagacgtatatcagcaagagtttttggaactatatttgctgtatccattactatttcctcagtaggtggggagttcattataactccccaaaattattagcagttaattaccgcttcaattcgtttggttaaagcactagcagtttttgcgaatttaatttgaacagtttcggtagcagcttcttcatggtaaactcgaacgtagtactcttcaacagcaggccaatctttgcgaacatgcttaatcaaatctttcagttcacgagtttctgctacgttgaacactgcgtgttcatgttcacctttaatccaaatcgcgcgataacgatcaggagtaccgtaattgttataaccacgttcaatttggataaagttgaatttagacattttattctccgttactctgctttgttttgatggagctatagtaaccgagttgatagaggaagtaaacaactttgtgcaaaaattttagggcatctggaggaactttctggaagttagaatggatttatacagccggggatacaaaaatgccctagatgaattctagggctgtaggattacattttattatacattgtacgataattctgtctgacgactgagttcaacaaggtgatgattcagtttagctaaaagcgttttcacttcaccgatatgctgagtttcacgtgcagaaggtttagcaccttgggattcacgatacttccacagattatcgaaatagaattgaactgccttataaagaggaccattatctcttactagcggaagagctttatcgatagctttaaacagttcacctgaaccaatgatgtctccatggtctccactaattttaaggccaggaatatttttaggtttcgctttaaccggagccggttttgcggccggtgcttgtgccggagaagctccacgtgcaggtgtagtaacctttccgcctaaactttcaaaggcagctgctaccttagcatagtctttaggatcgctaatcccaataccataaatcttttccacagaagccgcaaatttgctaaaatcatggcgttcaccacgtggaaccaataccagagcgtcacgccatttcgatttagtcatgcggccaggagctgcttcaaaaagctcttcttcggttaaaaaatctttaaatttcattgcaaaaaaatccttagtgtcgattaaattactatttatactaaaaagccccgtccgaagacagggctctaataatcgacagcatcacccactggcagatgacctgcgaaattcatttctttggactcggaggcatcagtctcatccaaagaagtatagcgtcaggaggttatgcttgcgacagtgaacaaccgactagcggcaatggacgaaccattctcttctatctgacgactcaacgagggtatacgcaagtttcccttcgaattacattacatcgtattcttcaactagatactgataataggaatcgtttgcttcaagttcttccgcatatgatgttgcttcggatttagtgtgaaaaatcttaagaggcaaagaatattcttcatagccatattcacagttccagttattttttactacagcatatactttcatattttcctcattaatttttggtatgggtaggaatcgaacctacaagccattcagcaccagggcctcacgctctacctatttgagctatcacataccagaatttggtgccgattgcaggagtcgaacccgcggcatcttcattacaagtgaagcgctctaccaactgagctaaatcggcatatttggtgaagaattacctacgtcactaggttggctgttctgtccacttaaggcttgcagcaggaacaccatggcttttcaccattgatcctctcacgactgagacattcttcataatttggtgcaccgagagggattcgaaccctcaatcctcgcggcgggagattttaagtctcctgtgtataccagttccaccatcgatgcgaaatggtcgaggcagaaggattcgaaccttcgacctgcggattagaagtccgctgctctatccagctgagctatgccccgagattgttcaggcaggacttgaacctgcacgactgattccgtcagcgatttaccaccgtcgccagcatatgatgcaatatgcgagctcaaaaggtgtccgtcaccatgtctaccgatttcaacactgaacaagataattatattactgattatttatagcatttcttaaacgataaagttgattacagaattcgcgttcagtcaaaatcgtttcagaaattttatttttacccatactgtgagtgagcgtagcattccgggtagcagccaaagcttttctgaatccttcatttttactaagtgcatcgtatgctcctgttagtaaattctgatacgcttctgaggcacggtgaataggaacacctttccaataaagtgtttgagttggccaccaccgtttctttttacctttgaacttagccgatttaccaactaatgtacatacatgtgcttgcatttcaggcgaagaaaatttgagggactgcaagaatccctccattgaggcacattctacgccatcatagataaatttatgaggagcaaaattactcaaagcacatgatggatatgaactacctgaaccaatatccattacttttccttcacgtatttcaaccaatcaacttttaatgggctttctttctgcttatacgtaattccaatatggaatgcaaccggagcatcaggaatacgaatttcttctttaatgtcaaagatttctactttctcaaatactcgcatgaaatcatagtcatattcaattggattacctagccaagcctgaatagcatacataacttcatttgaacaagaataatgattatctaaataagcatcaaactcttcgtctgagcaatcatatgcaggaacatcaacaccaaagaatttcttggaaaattcaggagttacatacttctgttcagtatgaagcttttcaagaattgcttcatggttgtaatcattatttccaaggtattcaccgcggcgaccattagaagagaaccattcaagaacgtgaattacttgattaatctcttctttttctaagccataaaccatttgggtagaataccgatcggcatcattttcccaagtggtaattgccattgctaagcctttaggaataacttgtccaaatttaatatgcatttcaatttcctcagttgataatttggtgaccctggcaaagactcgaacatgcaaccaatcccttatgaggggaacgctctaccaattgagctacagggcctttatagaaatcttatgacttttataaaagccctccgaagagggcgccttgtcgggctatccacctgctaggcagaattactcacacataaaatcagctacttcccagaagtcattttcaactgctactttaactaccggagaaatttcagacgttttaatagaaacaattacatcacctgcgacagtttctaccagaccaacgattttctcgctgcgagcaacaaatttactcaccggatggaatttgccggtagcagcgaacatagcttcttggtcaacaatcagtgcgatacgtttcattctttttccttgtttgttttgatgtagtaataataacaggttattcttgtagcattaaatctcgaaaatcgttccgttttcccacattgttgcgaacataggagaaaccttaacgaatgatttgcttcgcattgcaacgtagtcgttatctactttagccaatcctgaagcaatatcagtaatacgaccgcagcgcatagaaccacgaccacctttattatatgtacgttctccgtagaaaacgatatcgccaacttgtacgtctcgacctttagaatctttcatcatatttcgcctgataaattcgtttaaaatcagtaattagctcttctacatttgaagcattagtaaacggaataacttgacgcagtttacttactttacagccagaatgataagcaataacttcttgaatatcacgctcactgaagtactcatatttgattaatgcttcgtatctgcatttaatccagacccacatacctttgcgttcatcaaaagtatatgcaaaatcagcatgaagcattaaatcacgttcagatttacataatcctaaagcaaaattagttggacgattccattgtaatttcaccgtaatagcatttactttattcgcaacaccaataaaaatattcattctatttccttcgcttgtttttggccttcttgtcgtgcacgagaacgtcctgctttatgcagtgattcgtaatatgctcggcgtctatcaatgttttctgtacgatatgctttcccgaaatgggatgttttgaagccgtaatatttcataatataattctcaatggcaagcgattggacggtatgcccggcctcgaaccgagtcacattgactttgcagaatccatgtgtttaatatatcacccatactcgatagcatatctgaacgagactgcaatcccgctactcagcttacgccatcttgtattgtgtcataccgttaatttggtctccatagaatgactcgaacattcgacctctccatcccaaatggagcgctctaccagactgagctatacggagtaatttggagcatccaaagggaatcgaacccttatcaagtgagtggaagtcacctataatagccgttatacgatggatgcaaatttggcaggccctgaaggaatcgaaccctcatcactgggtttggagcccagcataatagccgttatactaagaacctgttatttggtgggagtaactggactcgaaccagtcaccgctcgattatcggtcgagagctctaccaaatgagctatactcccatggaaagctaatcatctgattgttgatgtaccactgctatgggcagcgtttaactttcataaatttggcggagagtaaaggagttgaaccctcaccgtttccgatggcccggatttcaagtccggtttgctaccactagcgctactctccattaattggtgaaggaagtgtcatatagacacaattcgcttagcgacagccacagcgttttgcggaccgtgtatttttccaccattccttcattgttggggtgaccgatgggagttgaacccatgactacgagaatcacaatctcgagttctaccaactgaactacggccacatcaatattcactccatccatcatgaggacttcatacgaaattaagagaagaatgatcagttcaacccctgtagacgcgttgaatgaatattaatttggctggactatctggattcgaaccagagataccggagtcaaaggccggtgacttaaccgcttgtctatagtccaattatttatttactaattttcttcctttataccatccttctggtataggggaatcttttgaaatctttttagcttctattccattattaatccacattgtgccaaattgtgaattttttgaaccggattgagctagtttcagtttatcagaaatttttcgtttagtttcagaagagtgtgttttacctaaaaacggatttccatttttagctatattagctttaactgcgtctgcaatgcgggaacgtgcatctggtgtaattccagatttaatcttatccgaaaaattcagtttaaatttagaatcatttctaattttattactggttgaatttcctccaagtattcctcttgctttcatttttgacggagtccaatatgttgagttaacatagtcaaatccaccttcgccaccaagttttaaattatatacgtttcctaataaaaattctggtgtaactatttcagattcctttaaatacatctcctcagatgattcacaataatgaataacttccttggtaaagttctcaattccgtattttagaattgcctttttaattaatacacctgaacccatgtagccatcattgatgtcatcagttttatgggctccaacataatatttaccatttacgttattggttattttataaatcaaatagtacataaattattctccataccaactatgtgataattatatcacatggtacggataaagtaaacaaaagaggcggaggcaggactcgaacctgcgcgtgtcgggatatgagcccaacattctaccaactgaagttaccccgcatttatccgggttcttgaagtactaacaagtagcttgatgtagaacacgctaaagatataatcttacgaatatagagcttattccgtgggaacaaacagcttcgtcctcggcattatcttacaggactcaaactcatcttcaagaactgccacgttcttatttggcggacctaacggggatcgaacccgtgctctctcccgtgacaggggagtattttaaccaactaaactataggtccataattcgctttcagagatactctggcacgatgccgaagcaaaggggaacagaactctcatcaccttggtaccagatgaatcttgtttagcactctgttctaagatgtatccctgaaagcgaactttcaacgccgtaagaaattataagcacgtagttatcgttgagggaactcgtacacagggaattctatgccgacgatttatcagaacgtcttctgacttcttcatttggcgggccgtgcaggtatcgaacctgcctagtcatttctgacacggattaacagtccgtcgcttaccctctcagccaacgacccgaattggtgggacaccgaagatttgaacttcggacacccggattaaaagtccggtgctctaaccaactgagctagtatccctaaatttggtggggagtgatggagtcgaaccacccgagccttttgagcaacagatttacagtctgtcccgctacccctacggtctaacgccccaatggatatttttatttatactgccctgaaattaatcagagcagttgatagattaataataacaaagaaaacctaaagcatattacacaatcggtgagctctttgatttaaccaggaataccctatgaggtgaatccatatgagagagcaatacccggtgctcaggaattggacttgtatggaacggaaccacacgataacctttaggagtaaatcctagcaaaataccaacgcttgctgcagaaagtgacccaccacagtagtatgatactaaatcaccaggctggatttcattgtcaagagaatcggttttgacatgcttaggcgtaactaaatcattaggaattggaacgccttgtgcatcatagtattcatgggcaagaagcttataattctcttgatagaaagtattaaatgcagctctgatattcatcacaatttcctcacaattaatctttgtatgcttcagttgaacctttagcaacggtttcaaatcgggaattcagtatctcaaaatagtcctgatacgttccctggagggcttcatagcattcttctaccgtagagtagacacctctgatttggtcagagccaggagcaggataataattagaccaagttaaaagtgcatacattacttacgtttccagctataatgagccaacattagaagtactgcaattgctaataaagatgattgcaatgctgccagtagtgcacctagtcctacacccaaagtaacataatcatacttagttacttcttcacggtttaaatcatagtttttgatgaaccactgcttaatctttttcatgtgctattttatccattatgaaagaaatgatacccattagaaatgcaacacttaacactgatactgtttcaggaagagacataaaggctgcacctataatgccaaaacctaacgctcccatgcagatggttgatgcaacatttctaattaattcacagcgtttcatgtttttatcctcatttgttttgatagggctatagtatcatagccctcgaggaaagtaaacaactttttatttataaagttccgtgaaatcgcgtttgaaagttggatgaaccatgatagattttaccagtttatcaccaaagcgtttcttgacactttctgcggattcatcgtaatctaacttaatgtttttaactaccttttcgccaccggaaaaagtcattttagcatcatacgactttttagcagagttgtaattaataaactgtacattaactttaacactaatgccagcatcatttgacatgtcagcaccaggcttgacactagcgataggaaatttaattacgtagccattttttacattaaagcttttttcaatcgtgtaatctggcagagtagactccaaaagagcctcagtttccattaaaaattcttggtatgacttcatttcaggtcctctgaccaatttagtttaagtggttctttatactctctatcaagcactactggtacttgaacttcaccctcgaagtgagctggacctacattgtagctgagagtaatgtgcggtgagtaatctgggaaatcatgagttgctcccaaagctcttgcatattggtgacggaattttaagtattctgaatctagcttaagaactagcgtacgtccgtcttgtgtgtcccatacttcaagtttacctgatgtagcaacttcaaaacttcctgaagcacaaacgtatggaacatgaactcttgaatagcatatcgtcgtatgaatcttatgacgaggaactggattagggaccttcaactcacgctgaaggtcctcaatagcatcaagagttttctcagagaatttagcagctacatatagaccagtgctaaaatcactgaagttcattaggcatcagcttcttcagtagtttcttctgcgaactgtgcttcgatttttgcaacgaggtcatcaagtttaacctgaccgtcttcgccgatttcaacgccggatacagcaatcagcttctgcagtacttcttcatactgtgcacgcagagcggacagaccttggatggtttcagacaggtcaaatacacgaactttcagagtatcgacttgggcttgcagttgttcagtagtcatttttgaattcctaatatagtgttgatttttgaataaagttcttctagagaaccgtcgttagttattacgatatcgccttcgcgaatcggaagtccacgctctgtgacgtgagtatcttttttagaaccttcttgctcaggacgaactacatgaataactgtagcacccatcgccctggctacatcaagttcatggtcttggcgggtatctgggacaatgaaataatcataatcaccaaaagtatcagccataaccaaagtaaatcgttttacccaatacatgcgatcgagcttatcacagacaatgtcagtcccaagggtctgcatgagacgacgaattgaccatggctcaacaggtttatttattacaacttgacggatgacttccatcgtatcaccgtcaagtattttacgcttgctatcataaaccaccccaggtaaaggcaaatcatgatggacatattcaatggcattcgccataatacgaatcacgtctttagtagacagatttaaatcctgctcacgatcgtaatcaataccttcaatcattgaccgagtaatgcgaggaaactgacgtgatgtatcgcgataccactcagtaagcatagcatcagctagtgcatctttaattggacccgctaactgatgctttgttgcgttatagttatccataatgtagtcagcagttgtatctttgccactacgttttttaccaatcaaaaataaaagcttcaaattattacctcatagaaggatgcattcccataaccttttgctgatactgggattcgcgagtatcattgacagaaggtctaccagtaattattataccatctttttcaacttcaatgtatttgtactgcaaagttgctacacataccattgctgggtcggattcttcggttaaagaatactcaatttcagataaatcactcacccaacctccgatgtagcggacagttaatactatatcatgtttatcgttatcaagcacatgcattaaaactgcgccaggaaatccttcaccgccattattccatccagacttgtctcggtcaatgtagttttgacaacttaacatccatttgtacatttgcacccatgaatcaagattttcatctactaaaaatctaacaggaacagcgtcaaactcaaaagtagacccaggcaatttagcacgatgcatgccttgaggcgaacctacagtatcagtagcaggaatatgaattccaggaactacagctgtttgaagattagctttaaacgcttgggtgaggcccccatcagggacctctaatataaagttagttgtgttagtttgattaaacagtccagtagacattatgatttccatacagaagtagcagagtagcgtttgcctttcgacatgaactgctgcagtggtaacatgactacattcgcccaatcagccggttttatctcaattaaagcaccctttatattaccaggaatatatgctttaatcattttgtcagcgccagcaaatcctttaacttggctccagtttatctttaatctggtcttattagatatcactggcgtattagcatactgtttaagaagttcttctaaaaactgctgacgagcctttggcggaatgtagtgaaggtttaacccatacatcaatgtggttgtaccttgctttccaagaccaagataaactatcaaaggaaatttatcccagaatggaagagtgtctttgtgcttagcgtcatacatgtaagcatatagctttccaggttgaggcttggttacagaatgaccacgtatatttttctttatagtttctgcaaaccatttagcagatttattgtttactgctgcgccttcattacgaattttatctttgatagagcttcgaaatgaatttaccatcacaagagcgcgctcttgcttggtcattttattagcaggttttttctcaatttctgctactttaattgctgttttaattcttgacgcatgacgagccattgctttactgaacgtagcaggatttattcctttgctttcagcaaatgattttgacgtcatgccttttttacgagcagcagagtattcaactcctaatgctacccattgattttcactacgggatttagctttaggcgattctgcagcttcagtgataaattcaaatatagccatcagcctttccatcctaattttttaagtgaatcttcggtaattaacctaaattctatacccattttactggcagtagcttgagctgctttccacttatcaacgtttacagaccaagtgtaaatttcatcaatgtaccgtttcttcgctgatgtcgtcaactttgtgggtttgaccggaggtctagtttctttctttggcttaacttcaaaaaagaactgttgaccattagaaaacttagcccagaaatccatgaaataccggcgtttctttccatctgcattactaaagtatggaatgactacttcttcgctattccattggactacatctggatgattgtcaagccaacgcatcatgtactgttcccatgtagaacgataagtaatctttctaaagtcgcctttatatttgtggagattctgtggcatgaatttgccggaatatgccatagtggcctccttataaatactgttattaatatttataagaggataaactatgctcttctcattttttagtccgatagattattctgcaaagaccgtaaaaggtgctaaggcaaaagctatcccaaccgctgacatatttcgtaattatcgcaaatatttcgacactgtagcagaaaactatcttttacaaacatattacataagtggagctcctagaccagaagaattagcatatattctttatggaaatagtcagctgtactgggttcttttaatgtgtaataacgtatatgacccgtttagagattggattaaaacccaagatgcatgctatcaatttgcgcagcaaaaatatgcagatgtaggtggagaccaaatactctatcacgtggatgcaaacagcaatcgctattacaatctcgagcaatatcctgaaaattcaggtgtttggtatgataaaggggactttaatcaccagtaccctcaatatactggggctttagctggtgttgacatttacgaagattctattatagaaaatgaaaaactgcgccaaataaacattatcaatcctagtgatattgaagcatttctttctgatattatacgagaaatggaaaaggctcctgacagcgaatatgaatcaggtcgatataaatcccagactaccatcggagaagttttatgattgaaatgaatgattcattaaaatggtttactggtgttgttgaagacagacaagacccattaaagcaaggaagagtgcgagtacgtgtttatgggcttcatccgtttgaaaaggtacaaggagctataaccggtcttcctaccgaagaccttccttggatgtcagtgattcagcctacaaactcagctgggatttctggagttggctcatctataaccggaatggtagaaggaacatcggtatttggtttatggcttgatgaattcaaaacagcaggattggtaataggaacatattctgcgcatagaaaaacgaagccaaactacacggaaggtttttctgaccctacaggtcaatatcctagacaggtcgggtcagatactaacccgttagttcaaggcgatgaaactgggtatagtgctataccaaatatcatccaggacagaaatttagacattggcattaatcctgatgatgctgacttaagtgatattcctgaagacccaaatcctgcaattacaataacagatatgcttaatagggatgaaggtcttagattgaaggtctactgggacacagaaggatatcctaccataggtattggacaccttatcatggcacaaaaagtacgtgatatgtctgtcattaataaaactttatctaatcaggttggtcgtactgttacaggaaatcccggtatcattacaatggacgaagcagttgcactatttaagaaagatcgtgataaaatgctttctgacattaaaacaaattcacgggtaggaccggtatatgctaaagtcaacaaatcaaggcaaatggctttagaaaatatgagttttcaaatgggtgtaggtggattagcaaaatttggtaaaatgcttgatgccatgctcattggtgattggaaaaccgcttatacagaagcaagaaactctgtttggtttaatcagacaaaaggtcgtgcttctcgtgtttccatgattattctaacgggtaatatggaatcatatggagttcctgctccaaaaccagaaggaaaaaacctgtctgctgcttacgtagaaccaaagtctggaggtaatcctgaagacccatggactccggaagattcaagaattcttttcaaagaacctgagtcttcatataatggtcagtatccatatgttcacacaatggaaacagaatcaggccatatccaagagtttgatgatacacctggctatgaacgctatcgtattgttcacccaacaggttcatacgaagaagtagctcccgatggacgccgtaccagaaaaactgtagctgatttatatgacatgactcagggtgatggaaatattttaatctctggtgataagaaggttaacgttggagggaacgagacctattataacatgtataatcgtcgacagcaaattgatggcgataacacgctttacgtacgtggaaatgaaactaaaacgattgaaggcaatggtactatttttgtcaagggtaacattaagatagtcgttgaaggaaatgctgatatccaagtcaacggtgatgccactactaaagtagatggcaaccacgacgtgaccgtcggtggtaatttaacttggcaagtagcaggtactgtgaattggaatgttggtggggcttggactgaaacaatggcttctatgagctcaatcgcccaaggtcaatacactgttgatggttcacgaattgatgtaggttaatcatggctgatatacttcctattaatacaacgttacgcgaagtaatagaaggtgaatatgttgagcagtactttactgctcaattatctactaacgaaacattaaaatcaataaatattatcgactatcaaccagtatctgatatctctgtgtctgaaacctattataaaggtaattataactcagtttttacttttggaaacgatgtgcttaaataccgtgaaggcgatgagctgaagtccgcttcagcgtgggaggatttacctaatcccaaaactgctgatttatatctgtggaaagcccccagaacactagagaagacatttacctatacagttgagataatatatacagtgacagaagaatcgtctggaggttcatccggaggttctagtgctccaatcataacagaacataaaaagcaaaagatttactctcaaacagttaaaggcaactggagtagatggggcgaccagcttcgtgcttatgtatatgcggggaactaaatggctggactatcatttaataaatgcttaactgccgggcatagtgcgtatcctccgacagaagtaaatgctacacaaagtaaagtattcactggtggaatagcggtattagttgatggcgactcaattaccccacacaccaagacggttgaccctcatgatacgcatggaggagttgttcaacctcgcacatccaaggtatttgtaacaggcaaaaaagctgttcaaatggccgatccaatttcttgcggcgacactgtcgcgcaatcaagctcaaaggtattcatacactaatggctattaaagaacctttaaattatcagttaacgcgtactgcaaacgctatcccagacgcatttactggagcaacattcgatgaaattaaaaatcagcttattaactggcttagcggtcaaaaagagtttcaggactttgattttgctggttcgcgtttaaacgtgctattagacttattagcatataacacgctttacatacagcaatttagtaatactgctttatacgaaagctttattggaacagctaacttgagaagttccgttgttcaagcagctcagcaaaacgggtatttgccaagttccaaatcagcggctactgcatctattatgcttgaggtaactcatccaaatccagagccagcaataaaaatacctcgtggaaccaagtttttagcatatgcacgagattcatcagtagacccatacaactttgttgttactgaaaatgttattgcgctaagagatacttcagcaccagaaggggttaatagatatcttcctattgtcaatttggcgcaggggcgtattattcgtactcagttgtcatatgacccgaagaaacctattgttattcgcgatcagtcaattgaccgcaagcaggttaagctgtgggtggatggcgctgaatggactaactggacagaccgatcaatggttcatgcttcgtctatttcaacgatttattatatgcgtgaaaccgtcgatggaaatacagaattcttctttggtgaaggtgtggcagaagcatctgtggcaggaggagttcttgaaagcaacttcatcggtggattgaagcctactaagggtgcgcaagtcgttattgaatatattcgtactgatggtgaagctgcgaatggtgcgactgatttcagctatgctgataccctacaatatatcgtagtaaacaaaatcattgaaaactggtcagattctcctgattatgttggcgctgatggcggtggtgaacctgaagacatcgagcgtattcgtgagctcgcccagattaagcgcgaatctcaaatgcgttgcgtgtctaaaactgactatgaatcattcgttagttcacgctttggttctatcgtacaagcagtacaatgctttaccgaccaagataagccagggtatgcgtttattgcaattaagccaaaatctgggctgcagttaaccgctgttcaaagagaagacatccaagattatcttcgtccattctgtcttgctcccattaccccttcggtaatgagtccagactacttgttcatccgtcacaatattaaagcctcttacgcgctgaataagttacaagaatctgagcagtggttacagtcaaaaattatagactcaattaatagatattacgttgatgaagttgaaatgtttaacaaaaatttcagtaaatctaaattattgacctatattgatgatactgaccattcaatcatcggttcttctgtggatattcagatggttcgtgaaattgtcaactatttcactcttcctagcgcaggtattaaatactataatactattactccgcggacgctacgttctggtgatttggtctttactgttaccccaactgctgaaccgtattcagttaatatcgttggaactgacccagataaaaatggcaaaggaaatatggttattggaccgtttaagccaggtgacattaaagagaatactcatatccagccatatactgaaaacgattttgatagaactaccgtcggcgaaagaactcgctggtataaaatcggtgaagtagattattatggtgataatatttactggagccttggagctattggagccgatcctcttcagtttgaagaccagagtattgagctttattctactcctacccaggatatcgtcttcgcccgcgatggaacacttatcgtatttgagaatgaccttcgtcctcaatacacaactattaaattggagcctattactcaatgacaattgcaccgttcgtcaccagcttacgaattcataagctatctgcgaatcaggtcaatattcgttgggatgacgttggtgcaaacttctactattttgtagaactggccgaaactcgaaacagagcgggggaagttatccccgctgataacttgagttggtcttcactgggttataccgcggataatgattggttcgagcaaaatcgtattgaaccgcttacttattataaaatgcgtgttcaaactacgtcagcagggtttgagccgtctgaatgggttgaaacagaagagttccaaacttttgaagaaaacgcatacacatttgagcatatgcaagaattcagtttagtgaaagaattcattaagcagaagttttctttaaataacatgtcgtatgttaacttcaacacatctgccatgatggcatctttgatgactgagtcttttcagtttagtcctgaatattctcatttatcagctatcgaaaacttcgttgtaggtgaatctggatatcatgaaattcagggacctattgaagcagtgtgcgttgataaaaatagaactatgctgggagaaatagacggaattttgtatctgtttgaaagattccaacatatggttaaagtatcaaatgataaaggacagaattggcaatacgttcagttatttaatgaccgtgtaggaaatccggtttctagagtggtaatttatcaatctaaaactacttcttatgttttaggatatgataaaatcttttacggaaggaaatcatctgacgtacgttggtcatcaaatgaggttaagtttagcgataacgaagttacatttgctaaattgggagaccagttaaagcttggctttgaagtagagttattcggaacgtatgcatcattgcctgctgacgttaccaaatatgctgaagcgtttacatgtaatgatgactatttgtacgttgttgcaaaagacactgtccgtaaagttaaattaaaagatgctccaatagatactgaccctttaagtcctacatttggtgaaaaagtgttcgaaaaagaagcatctcatataacaggcaatcctaaatctgtatgctttaaaatggattctgtcggaggcaaaatctttgcccttattaccggggaagttaaaaccttaggattagacccaacagacccaaggaacgttgtggattctgcaactaaaggcgtctatgtttaccaggaaggcacaaatacatggaaacgtgtattcggtaatacagatgaagaaaaacgtcgtatagagcatttatggacttctatgtcaactgacggaaaggaaatattcttttcatcagctaatttcaagacgacagagtatgttcaggatattgaacttgagacgaaatacccagaactaatttctaccgcagtaaaaaatgttaacccaattcagtatcactctgataagcattatcacatgatgagtttccgagcggatgaattttcaagatgggaaacatttgttcctggaccgatgaggttttatgctgaaccttggtttgtctggatggctcgtgaaggcaacagatgctggataagtacagctgaccacgcagttgtcatttataatgatattctttatcagaaaagaatagatatggctgcacagggaactaccgagcgtgttctttcagaagtgtgggataaaggtgacgcaacgttttattgccctccagtttcatttaatggatttttgcagtatgcttctggcatcatgtttcacgaaccagacggaaaactgataggctattatgcatttgattatcgtgttcgtgaccaggtaacgcttaactggaaaccaactgatgtaatgtttaaggcgtttctgcagaaccaaacccgtgaagaagattggactcctgaacatactccaggcttgcgtgacccggatttacgtccgtatcttactaaaatgatgccggatagttacttgttacaagatagtaattttgagcacttttgtaagtactatctccaattcctttcagatggaaatggaacgcattacaacagtctcgttaatcttgttaagaacaaatatcctcgtgaagaaaatgcatgggaatacctgtggtcagaagtttataaacgcaatatttatctgagtaaagacgctcgcgatgctgttgtccgtttctttgaagcccgtaagaatgatttctatgctactaaaggaattgaagactcatacaaattcttgtttaaacttctttataatgaagatgttgaaattgacatcgagtcaaagaacactaccgaatatgacattattgttgaaagcacaaatatttctgacgatttagttggtcgtacgatttatactgcttcaggtcgtagtaatgtgacttatatcgagagagaataccgggacggtcgtctgttgtggcgtattactattcataacttatcaggacggttcattgaaggccaggaaattaaatcagagcgtactgactttgagggtattatagttcaaggtgttcgcggaaaggatatgttaagtaataacattgactatataaaccgcagccgttcttactatgttatgaaaattaagtctcagcttcctacttctcgtttccgcgacgatgtattaaggtttgttcatccggtaggtttcggtttcattggtataacattgctgacaatgtttatcaatagtggcttaaatatgaagcatgttgagactatcataaataaactcaagaactataaatgggatgcaggactgccatcagtttatcctgatagagttgctattatcgcttcagatgatacaatagaaagagacccaataactaatgagcctaggtattcttcacgtgctcaagctggtgaacctttcccgttacctgctaactataatcaagaaaataacaatagtgttatcgctggacaaaacccaggacaacgacgtaagccgttgagccctacatttgaccaatcagcagtaacgtttgctaattatcgcgatttagttaaccaacgtcttaaagacgatgcaggtaatcctcgcgatcctgaaaatccgacacaggtaaaaattgatgagtaattcaacaagagcaagttcaacgcgtagcacgatttatcgtgctatcattacatctaagtttagaactgaaaagatgtacacattttataaatcaattggtccgggaacggaccaaaacacattgtatgtttcatttggtaaaagcactccgtggtcagataacgaatctgaacctggatttgcacctccatatcccgctgataatggagatggggtagttgatgtttggacaaatatgatgggggcagtcaaaattgaatcatctatgcttgattgtgttgttccaagaagagactggggcgatacaagatatcctaacccgcgtacatttttaattggcgatatcgttgttgctaactctgcgccatataacagaactgatgctggatttggatggatggtatatagatgtattgatgttccaaaggatggaatgtgttcaattggcaatcttacaagcaaagaagaatgtattaagcttggaggtaaatggacaccatccactatttccggttcagcgcctcgtgggcgtggtgatgcaaatggtaccgtcgatttgggcgatggatatctttgggaatatctatatgaaattccagccgacgtatcaattaacagatgtacaaatgaatatatcgtagttccttggccagaagagattgaagaatctccagctcgttggggatttcaaaacaacttaacttggcaacaaaacgactttaacctaatctatcgtatgaagtgtaatacgattagatttaaagcatatcttgacgcaatttatttcccagaatttagtcttccaggaaatactgggtttagacagttgtcaattataactaatccgcttgaagttaagccaatgccaaattcacctaatgttaaggctgaaaaaggctggtatagtgcttctggtcttgaaagacagtcaggtgaaatgatttacatggaaaatcggcaacctattatacgttcaatggaccaaacggaagaattaaacttaattttcgagttttaattatggggagccttcggctccccatttttatataaataggactatactttgatatgaggttaacctatgtatacagataaaggtaaaaaaataattgacgtcggtgaaattggtaacgcttctaccggcgacattctgtacgatggtggtgtgaaaattaatgataacttcgacgccatttacaacgccttcgccgaccaacgattatttgcagctggcggcggagcattgaaccaaaaaattcatgcaacaagctattatcaaaagataaaatttggtgatgctaactcggccggtacagttccaatggggtcatgcatagatgctgattgctcagaaggggcagttcaaattcgtctttcaaaaggtaaagcgggagaagctgtattcgttgtaaatagtaatggctcagcatcaaaagctagatccataaaaataacaacaaacggcgaaggtgtagcagatgcatttaaagatggatcgcgagagttgattatcaacacgccaagatgtagaattgaattgtggtgtgttgaagtcaaagctaacggtgctgcagtttgggattattcaatttcaagtatgtttggcagcacatattcgccgttagaagctacatataatttaacgagttctcctattaatatccgcattggatataatgatgattactctactgttaaattgttattaagcttcagcgcaaatccaggtggtcaaaccatcaaaaggcaatcatctgaagtcatgcttatgattgacccgactattacttcatcagcgccaaacggaagagtatttgacactgaatatgcagtgttaagaagtggtgaatcatctgaaaatgaaaagatgtattctatttcatactctattaacgcgcagaaagatttaatatgcacagcttcaacatcttatggaaacgcacgtttggcagttaaagttattgctacacagaccgtaggggtatctcaataatgaaacaaaatttgatagtaggccaatcagtagatgatgggtctggtgattacctccgtaaaggtggtcttaaaattaataacaactttgatgatttatattcagagttaggtgatggttcagttccattcgcagcaggtgcatggaaaacttttaaagctagccctactggaactactttaaatgctaagtttggtcaggcctttgctattaatacccaggcagcaagagttaacgttcagcttccaaagggtacagccaatgactataacaaagttattaaacttcgtgatgtttggtcaacctggcgattaagcccaatcacagttattcctgctcaaggcgatacattaaagggttcagcttctcctaaaattttcaatactaacttccaagatttggaattggtttattgcgcccctggccgctgggaatatattgaaaataaaactgtagataagctaactaatggtaacttaagtactgtagcgaaaaaatcaattattgctactgcgggtcagactgactttcttaacatttttgatggcgtagaatataacgaagactcgcttaatgtatatcgtcgtggtaatattttatattacggtgaaaccagcgttatggataaagccaatgctgattacggttctcctggaacggtagcgggtcaattggtagaattaaacggtaaagacattcgtttaaaagttccatgcgttgaaggggaagtaataacatttgaaaccttcttagatggaattggtgtatatcgttcttcatacaacaagttagctatccagatacgagattcagcccagactacatccaagacgattcctgggtcaatgatagtagataaccttgctactctccgcagaatcactctggatgacatgggtgtacttccaggcgtaggggtaaatcctaactcgcttgaaatttcattgaacggaaaggaattactcgaagctggaactgcaggtcttcctttattttattgtgaaggtgcggaaggtggatacgcagaagactgtataaacaatggtggtcaatgggtaaattctaaccaagattatagactggaatttgactcaactggtactaacgtcgaagctattatttttggtgaggcgtttgaagataaagaccttcttaccgtccgttggttcaataataacatcggtactactatggatatcaatgatatcatggcagaaaccgaccaagtgtatatgaatgctgagcaattagtaactctaaaaaatcgcattgaatacacaaattatgatgaacctaatcagaaaaatatgcgtcctgtcgctgatgatgttatgattaaagtcaataacattgcagcattctttgacgtaatttatccgattggcactatctacgaaaacgcccataaccatgcaaaccctgctgattacatgggatttggtgtatggaagctttattcacaaggccgtgttactgcgggttggaataatgattcatctgatccttatttttcgcgtaacaataataacttaaacgaaaatggtcagccatcattaacagcaggtggaacggttggagatttgacgtttacattaggaaaagaacacattcctgagttaatgtcaagagacaaagttctaatttcagaccctgaacatggcagcgtagttattggcggatgtcaattagacccagacgcacaaggtccaggttattctaaataccgtgaagacactgttgcggtaaacaacggtgtagttccaaatgacatcactaaaattcagccaacaatcaccgtttatcgttggattagggtaggttaaaatgacgattgaaactaaaactcgtgaaggggctaaagttaattcaagattaactgccttttcagaatatcgcgtagacccgcagaatattgcggtaggaaataaggctcctatagggagcctaacctttgaacaaatggatttaggtgtttggtatccaaacactgaagctgctattaatgatttaatgtcattacagtcagcagaaattggaactattatttgtaatgacaccggaatatctccacaaccagcacagcaaattacacgcgctactttttcaggcgtagtttcgttagaacctaaagaagacggttctgttggcgacccagtaataattcacattcttggattgccaattagaattgcgaatggtgatgactttgcagcagtagctaccaggtggtatgataaggtaaaagaattagaagcagttggaaaagtggttcaacaagttactcaatcacctgcaactcctcagtatgttgatattattcatctggattatcagaaccataattttgaaacatataaaaaatatggtttaactgttgagtttactgttacttcacctgctaaagcgggttatggacaatgggacgctattggtaacgaaactaaaaccttcggtgcaaacacatttacattccactattttagaaggatgggataatggcccagaataactataatcactacagtgatttggccaaatatacgatatttgacccagcaaatacacaatggccagttgctacaaaagacgtccaatcagcgctagcgttgattggaagctgggcaagaactgacattggattacctgcagcatctccaaccgtagcaggtataattcgtacagctacgcaggccgaagttgaagctggaactgtaggtaatgctgcggttaccccagctacattaaaatccacaattacccggcctgaagcaactaccgcaattcttggcttaacccgatacgcaactaatactgaagccgcagcattaaccgcaggaaatagaactattacagctgctgctcttggccatgtgtttaaaaccgtaaaagcccaagaaaacgtagatggaactgttaggttaacgactgccgctcaagctcaagcaggaactgatgaaaccaccgcagtaactcctaagcgtgttgtagaaatgattggaaagttcagcgttaatcctcctacttatacttctgcaacagaaagcaacttgggattagttcgtgtcgcaacccaagcccaggtagcagcaggtgctgttcacgatggatacgcagtaactccaaaaaccttcatggcatcaaaagcgtctgacagcgtatttggtatagtaaaatttgctaaagactcagatgtggcttcagctacttctaacaatttggctgttactccaaaaagtctacaagcgttaaaatcaaccaaggataaatatggattaacccgattatcaggttctccaacatcagatgcttcacttgctgcagctgcgactgatgctgtctttaaaactcgcaaaataaatggaaaaacccttgataacgatataacaattaccaataacgatatcaattgttatacacgccctgagtcggatggaagatatatgccagctggaacgcgtgtcggtaatattacttgggtagaaggtggaacttatattcctgctggaaactggtttgggtgtaattctccatatgaagccacttctagattggcgctgactctcacaataaaattccaacgtaataacgacggctatgacaatagaatttggagatttagaataactgtcaacggggaaaatagaggagaacatacactcaatatagagaataccaagggcggtagaaatggtcattcgtggagatttgaaggatatgctacaggctcatatattataaatgatgttcctcctaacgccagagttcaaattgagccatttgaaaatatccgtggcgataattattcagcgtcattaacgttttgcaccaaccgatagggaattatatgacaaaattagtagactcgcttccgtttgtagacggaattccagacgattttcaacagagaattaactggataaaaaatacagagcctcttaatggggcttcaacccgctatggaaatgatggagaactgaatagagcttctgtgcagattcagaaaaatgtggttcaggtacataacgatttgaacaacgttggaactgctgtagaaaatattcaagtagatgtagaccaaatcaaaaaatcgttagaaattacaggttcttctgacgccattgagcaggtttatatcaataaaaagaatattgaaaagcatgatggacaaattcttaaattagaagaagacaccgaaaaacttcgaactgaccttgattttctcgaagaggatgtaggtgtttatgattctagtaaagatgattattacagaacagttcgtgataatatagtttgggttaaacgtgaaattggtgcgtatcctgggcaagatgttaacggacagcctaagcaagacgctccgggttctggtatgaaataccgaatcatcaacaatgcgtcagctatagtaaaacatgacgagcgtattcaggcgctagaggatgcatacaatgattcagacgtaggttctctgactattgaagtaaacgacctgcgtaaagaagttggtcctaaatccggagctacgtcagcttcaatttatgcaaggcttgtgaataacgctgatgctatttccgcagctaataatgaaatctttgctattaaccaagccattgattttaccaatccagtaaaaattggagctcgtactactagattagaaaacgattatcgtatagttgacgcaacacttaactctgcacaaaccgggttagttcctcgtgtcaataatattgatgctcgtttggggtcttctgataagcctgatactattgaaggaaaaattagttctctttcaactgaccaagggtacatttctgatgttgtaggacgtgatacttcatcagggcttcagggtcaagtagcatggataaatcagcaagttggtattgttcctggcggacagccgattcctccggggtcaattttagcgagaatgaccaatgttgaagggatgcaaaactctcagcagtctgctatccaggacattcaagtagaacttggcaataacagcgaagggttaaaaggttctgtatttacgttacagactcaaatgaatggtgacttttcgtcagaaaatccagttcaacgggatggtgtatacgctactgtagtagaattgcaagataaattcgtgactgcagttactgacgtagaacagactggagcatacctccgtaaacggggcgaatggtttaagaagccttcatcaataggtgaattcagtaaagaagatttcactgttgatttaagttctgatgcattggtaaatcctaactcattggtcgctgcttcatttaatgctggcattcgtattgttgatgatattattgttgatgacgatggcgtattttgtgtagaaactgatacagttatcgaagcttctgattcagataaagctgtccaaattgttattctcgtcaataacattgaggtgtttacttatagcctaggtgttaaagcagtaaccggcgagcaactgttgaaaaccaagaaacttattaagttttcgtctggcgatgcaatcaaaattgtgtatagagctgcttcagaagaatcaaaagttcctgttagtattaaatcattggatattactattcatccagcagtataatgaaagggaccttcgggtccctttttcgtataaatagaatataaagaggagcttatatgtcatacaacacatacaacccaaaaacgcttaaagacgctatacttcgacgtctaggagcgccggtaattaatgtcgaagtaactgaagaccaaatttatgattgtattcaacgagcattagagttgtatggtgaataccactttaacggattgaataaaggctatcaagttttttatattggaaaagatgaagctgacaacgcaagatttttaaatggtgtgtttgatttgcgtggtcgtaatgtatttgctgtcactcaaatcgttagaacaaatgtaggttcattaacttcaatggatggtaatgctacctatccgtggtttactgactttttaatgggaatggccggaattaatggcggaatggggtcaagctgtaataagagttatggaccaaacgctttcggtgctgacctgggctattttactcaattaatgacttattggtcaatgatgcaggatttgcttgccccacttccagactattggtataactctgataatgaaatgcttaaagtaatgggcaacttcatgaagggggacatcattgtttgcgaatgctggactaaatcatttatgaataccgacatgatggtaggtaatactgcaggttacggcttcgctggtgaacaaacttccgaccattggggcttaggagataggtatcagaatcctaaccttcgcaataacggccaatatgcaggtgaaggtaatacaaatagagaaggtgcttataataatcgttgggtaaaagattatgctacagcactgactaaaaagttgtggggtgaaattctgtttaaacaccaagggctacaattagccggcggcgttacagttgatggccaaacacttaaagtagaggcccaagaagaaatcgagaggctccgagaggaacttgatttacttgacccgggttgtcctattctgttggggtaaaagatgactacatttaattctagtttattcgctcgccttgaggattaccgaggatacaataaaactaatgagacagaaattctcaatccttatgtgaatttttataatcacagaaatagccaaacgttagcagatgttttatcagctgaggctattcaaatgagaggaattgagttttatttccttcctcgcgaatataacaatccggatttgcttttcggagaagacccatcaagtaaattcaccaaggcttggaaatttgctgcttacttagactcttttgacggttattctggtgataacacgttcttcagtaaatttggtatgatggttaatgatgaagtcaatttgactattaatcctaatttgttcaagcatcaaaccaataattcagaaccaaaggcaggtgacctgatttatttcccgatggataattcgctgtttgaaattaattgggttcaaccatatgatccattttatcagttaggtcaaaatgttcaacgtaagattactgcgcagaaatacatttattccggtgagcagcttcaaccagaattgcagcgcaatgaaggaattatcattcctgagttctctgaacttgatttagaaccaatcaaaaacattgattctcttgctgatatttctgacgtacaatacgcagaaagcgatgcaattaataaagaagcctctgaatatgttcatccgtattatgttaataacggaagaggacttgagtctcctcctaaagcagattcgtttgatgacggattttttgaataaataaaataaagatgggacctttgggtcccttaggagaaatcatgtttggacattggtataattcgtccttacgccgatacattgtattgcttggagatttattttctcatgtacaaattgctcgttggcgtgaagacactggactaaaatatattaaagtacctatcacttatgcttcaaaggaaaagttcctttctcaactcggaaaatggactgctatccagtctaccgagaataaagcaaagatagaaactgttttgccaagaatgaatttgcacttggttgatatgcaatacaacgcgatgtataaaacatcacagttgaatagaaccaaatcatataaaaccccttcaaaaattacatctcagtataatcctactccgattaagatgatttttgaattgggaatttatacacgcaatcaagatgatatgtatcaaatcatcgagcaaatcgttccttattttcagccgcattttaacacgactataactgaactttacgacaaagacacaagctttaatcgtgatgttagaattgtattacagtcattttctccggatgaagctgttgatggagataatatcactcgtcgtagattagaatggtcgctgatgtttgaagtcaatggatggttatatcctcctgttgccgaggttgacggcgaaattagaaccatttatttagatttcttcgctaacagcaaagagctaactccagaaggaaactttgaatcagtagatagcgaagtcactccacgagatgttcaacacgaaaattgggatggttctagtaaacaaacttattctcacgatattcctattccggtaaatccggaggctcctggaccgagaggtgaaaaatgagtgaattacaattagatatggctaaattattagacatcgaaggaattcctggaatagaaggacaagaaattccagtttatgaaaaacttgaattagttgaagttaaatctaatccaaatgaccgtaaacctgacctcgaagatgactattcggtcgttcgcaagaacatgcacttccagcaacaaatgttaatggacgcagctaaaatatttttggaaactgctaagaatgctgactctcctagacatatggaagtatttgcaactcttatgggtcagatgactacaaccaacaaagaaattcttaagcttcataaagaaatgaaagacattacttctgagcaggttagtactggaaaaggagctaatcctcaacaaggaatgaatattcaaaacgcaacagtctttgtagggtctaccgctgatatgatggatgaattcggtgatgcctatgaagcacaagaagctcgagagaaaatagtaaatggaacagactcaaccgtttaacgttctgagtgatgcccatcctttaaatgacgggaaactgacggttattcgtcacccgtctgaaatggaaacgaaaatcgaaaacggagttcgtttctttaaatcgcaatgggatgataagtggtatcctgagaaatttgaagactatcttaagttgcatgggatagttaaaattcgtttgcaaggtgaagacccagctcatttccaaacgtttaaggacaaaaataataagcgcacccgctatatgggattgccaaaccttaaacgagcaaatattaaaatgcagttgactcgtgaaatagttgcagaatggaagaaatgccgagacgatattgtgtacttcgcagagacctactgtgcaattacgcatattgactacggtactatcaaagtccagctccgtgattaccagagggacatgctagaaatcatggcggctaaacgtatgacttgttgtaaccttagtcgtcagcttggtaaaactactgtagtagcaatctttcttgcgcacttcgtgtgttttaataaggataaagcagtaggtattcttgcgcataaaggctcaatgtctgcggaagttctcgaccgtactaagcaagcaattgaattacttcctgactttcttcagcctggtattgttgaatggaacaaaggctcaatcgaattagataatggctcatctattggggcatacgcttcgagtcctgatgctgttcgtggtaactcatttgcaatgatttacattgacgaatgtgcgtttattccaaacttcatagatgcatggcttgctatccaacctgttatttcatcaggtcgtcgttctaaaattattatcacgactacaccaagtggattaaaccacttctatgatatttggactgcagctgttgaaggtaaatccggctttacgccttatactgcaatttggaactcggttaaagaacgtctatataacgacgaagatatgtttgatgatgggtggcaatggtcacttcaaactatcagtgcttcttctcttgaacagtttaaacaagagcactgtgcggaatttcatggcacatccggtactctcatttccggtatgaaacttgccaatatggattggattgaagttactcctgactcgcacgggttttataaatttaaagaagcggaagcagaccacaaatatattgcaactcttgactctgctgaaggacgcggtcaggattaccatgcactaaatattattgacgtgactacatctgaatgggaacaagttggagtattacattctaatacaatttctcacttaatcctcccggatatagttattaaatatctaatggagtacaacgaagctccgatctatatagaacttaactctacaggtgtttctgtagcgaagagtctttatatggatttagaatatgagaatgtcatttgcgattcaatagttgatttaggaatgaaacagacgaaaaggtcaaaagccgtcggatgttctgcactaaaagaccttatcgaaaaagataaactcattattcaccatcgtgctactgttcaagaatttcgtactttctctgagaaaggagtatcctgggcggcagaagatggatatcatgacgatttaattatgtcactcgtaattttcgcatggttaacaacacagcaaaaatttgctgatttcgtggataaagatgaaatgcgtttagcatctgaagtttttaaacgcgaattagaagatatgaacgacgattacgctcctgtagtgttcgttgacgccgtgaatagcgcagaatatgcgcctcaagaacatggtctttcatttgtataaataataaaaagcaaacaacattgaggatatatcatgcctttagtctctcctggaattgagctcaaagaaacgagcgtacagagcacggtagtacttaacgctacaggtcgtgccgcaattgtcgggaagttccaatggggtcctgcatatcaagttactcaaatcactaacgaagttgaactggttgatatgtttggtggtcctaataaccaaactgctgattactttatgtcagcaatgaactttctgcaatatggtaatgatctacgtacagtccgtgtagttaatcgtgaagctgccaaaaacgcatctccactggttgataatattgagtgggaaatcacaactgctggtagtaactatgaagttggtgataaaattacggttaaatatgcagaccaaactgtagatgacactggttcagttactgaagtagatagtgacggaaaaattatgtcggtgttcattccgacggcaaaaattattgcatatgcaaaaagcattaatcagtatccggatttaggtgattcatggacaactactattacttcacagagttctggtgtttccgctgttattactctgggcaaaattatttctgattcaacagttctgttaactgaacctgaaactgcccatgaagaaatgacaaaaactgaattccagactgcgcttgcgcaatataaaatgcctggaattgtagctgcgtatcctggcgagctcggaaaccaactggaaattgaaattgtatcaaaagccgcttttgataaaggcgaacagctgacgatttatccgagtggtggacagcgtgcatcaaccgcaaaagccgtatttggatatggtcctcagaccgatacacagtacgctatcattgttcgtagagatggtgcggtagttgaatcaacggtgttatcaacaagccgtcaagataaagacatctacggaaacaacatctttatggacgattatttctccaaaggttcttcacgttatatatttgctaccgcgcaaggatggcctgaaggattttccggtgttattcgtctgggtggtggggtttcagctaatgaatcagttactgctggcgatttaattcaaggctgggatttatttggtgaccgtgaagcattgcgtgtaaaccttctgattgctggtgcttgtgccggtgaaaccgatgaaatcgcaagtacagtacaaaaacatgtttcgtctattgcagatgagcgtcaagactgtttagcactcatttcgcctccaaggtcaacgattgtaaatattcctctgactcgtgctgttgataatttaatcgactggcgccaaggcgatggaacttatgattctgctaacatgaacattaataccacgtacgcggcaattgatggtaactataaatatcagtatgataaatataacgacgtaaaccgttgggttccactggctgccgatattgcaggtctgtgtgctcgcactgatgatattgctcagccttggatgtcaccggctggttatcgtcgtggtcagattctgaactgcattaaacttgcgattgaacctcgtcaagcacatcgtgaccgtatgtatcaagcaggtattaacccggtaacgggtcaaggtacaggtgaaggtttcattctgtttggtgataagactgcaaccactgttccaactccgtttgaccgaattaacgttcgtcgcttgtttaacatgctgaagaacaacatcggtgattcttctaagtggcagctgtttgaattaaacgataactttacccgtagttctttccgtatggaaaccagccaatacctcgcaggtattaaagctctgggtggtgtatatgacttccgagttgtatgtgataccacgaacaacactccagcagttatcgaccgcaacgagtttgtagcgagcttctacatcaaaccagccagatcgataaattatattacgcttaactttgttgctacagcgactggagcggatttcgatgagttgatcggaccacaataaattgtacattttcgctaaatcctgatacaattgcacatatgaaatattatgtgcaattaaggaaaaccaagtgattatctctaaatttgttaaagtaaaaataattcctaaaaattttaaatacttttcggaacttggatacaagctgcctcctctgggttcgcctaggcatggattcaaatattattcaattgatatcagtgttgaccatcttgagcccgggtcaaacatatatgttgattgtgtttgtgataaatgcggtgaacaatattcacagcgttattgcagagacactgacgtgtgctatgattgccgtagcggaaaatttaagataggaaatactattggaacagctaataagggtaaagtgttgtcttcgatgacaggagaaaaccatcctcgctggaatccaaacaagacagaatataatgaatatgctagtaaagttagaagagaaacttctaagcataaaccaatttattctacatgggaaaattttgataagattggactatgtggaatacctggagcgtatcaattagaccataaggtttctgttgcatatgggttttacaacaaagttcctcctgaaattataggaagcattgataatttagagataatcacttgggaagaaaatcggtcaaaatcaaagaaatctagtattgatttatgggatctattgaaatgaaccccaggacattctggggtcatctaacctttagatgataaattatattaccgcacactttaatagcctctacgatgatgtagtcaatcaagaggctatataaatatctataggaaacaacgatggaattaacagacatcacccgtgcgtttgaatctggtgactttgcacgtcctaacctgtttgaggtagaaattccttatctgggtcgtaacttcagtttcaaatgtaaagcagcaccgatgccggcaggtatcgtagaaaaagttccagtcgggtacatgaaccgtaagattaacgttgccggtgaccgtacttatgacgactggactgttaccatctataacgatgataaacatgaagtacgtaaggcaattattgcttggcaggctcaggcccacgctcaaggcaatgatatctctggtatgactccagccgattacaaaaaggttgctacggtacgccagtttagtcgtgatggcaaaactatcacaaatgaacacaccattaccggtctgtggccaactaacgttggtgaagtacagatggactgggattcgaataatgaggtagaaacgttcgaaactacatttgctattgactggtgggaataatgttatggggcttcggccccgtatcgaagttctgtgagttatttgcttaaatatctgacaaaacttcgatataaatatacttatagataatttcggagactccaatggcctttcatattttggacttattcgctccgtgggaaaaacgcgacgaagctgaatataagcaacaaatcaacaatgacctagagtcaatcactgctccaaaatttgatgatggagctcgtgaagttgaatcaaacgaaaacgaaatccagtataattcattcaaccaaatgatgtttggttccaatgaacctggaatgaaaacaaccgctgatttaatcaacacttatcgtagtttaatgaataactacgaagttgacaatgctgttgaagaaatagtttctgacgcggttgtatacgaagacggtcatccagtagtttctcttgatttagattctaccgacttcagtcaagcaattaaagaccgcattcttgaagaatttaatacagttttaacatgccttaatttcgagcgaaaaggagccgaccatttccgccgttggtatgttgactcaagaatattcttccacaaaatcgtcaacaccaagaaaatgaaagacggaattcaggaactgagacgtcttgacccgcgcaacttacaattcatccgtgaaatcgttaccgctgatgacgctggcactaaaatcgttaaggggtacaaagagtatttcatttacgatactggcaaagaaagttattacgcagatggtagattatattccgccggaacgaaaattaaaattccacgcgatgctatagtatatgcacattctgggctagttgattgctcaggtcaaaacatcattggttatttacaccgagccgttaaacctgccaaccagttaaagctattagaagatgcgttggtaatttatcgtattactcgtgctcctgaccgtcgtgtgttttacatcgacactggtaatatgccttctcgtaaagcggcagcacacatgcagcatattatgaacacgatgaaaaaccgtgttgtatatgatgcgtcaactggtaagattaaaaaccaacagcataatatgtcaatgacagaagactattggttgcagcgtagagatggtaaagcagttactgaagtagatactcttcctggtatgtcaggtatgagtgatatggatgacgtccgttactttagaacagcgttatacatggcattgcgagttcctctttcgcgcatgccagatgcaaataatcaaggtggtgtgcagtttgatgctggcacagcaattactcgcgatgagcttgattttgctaaatttattcgtagattacagcataaattcgaagagattatgcttgatccacttcgcactaatctaattcttaaaaaagttttgtctaaagatgagtgggaagacgaaataaataatattaagattgtgttccataaagattcatatttcaccgagttgaaagatgctgaagttatggagcgtagaatcaatatgctcacaatggctgaaccgtttatcggcaagtatatttctcataagacagcaatgaaagatttccttcagatgtctgacgaagaaattgaacaagaagccaagcaaattgaattagagtctaaagaggctcgcttccaagaccaagaaaatgaagaggatttctaatggaaaattatatttccgcaattgaatccagagacctcgtagcagccaaaaaagcttttggtgcaattatggctgaacggacatctggtttaattgaagagcgcaaaaaatttatcgcagcgtctgtcatgattgagggtgaagagcccgttgacgatgaagatgaagacgacgaagatgaagataagtctgagaaagacgacgacgaagaggacgagtaatgcttatactgcctgaaaatcatgaattagttatcgacgctgtcgaagcttttcttcctgaagcacaggcacgttttgataagttgtccgcagcgctttctaaagatgatataaataaaattgtagagaacatggttacttctgagcctgatttagcaattgctttaggttcaattaacgaatctctacaattaaatgaatttatcgttaagcacgttgattctaaaggtactattacacgtactaaggatcgtaaaacacgtgagcgtaacgcgttccaaacaaccggactttctaaagctaaacgccgccaaatcgcgcgtaaagcagtaaaatcaaaacgtgctaatccatctgctcaaattcgtggattacgtaaacgtaagaaagcacttaaacgccgtcaggctctggggctaagttaatggaaaacctcaatgaacaacttttaattgagcattggggtcaaccgggcgatgtaattgatggtaaacccatgctggaatctattatcgttgaaggcgaaaatgaatctggcttaaaacctggtctgtatatcgaaggtgtttttatgcaggcagaagtagtaaaccgtaataaacgtctttatccaaaacgcattcttgagactgcggtaagccgttatattaaggaacaggttgctactcgtcaggctctaggagaattaaaccatccacctcgtgcaaatgttgacccgatgcaagccgcaatcattatcgaagatatgtggtggaaaggcaacgatgtttatgggcgagcaagaatcatcgaaggagaccacggtccaggtgataaattagccgctaacattcgtgctggttggattcctggtgtatcaagccgcgggctcggttctttgaaagactcaggaaaaggatataacatcgtacaagaaggctttcgcctgactgttggtgtagacgcagtttggggtcctagtgctccggatgcatgggtacaaccgaaacaaatttcggaaaatacctcggcacaagttgccaatagtgctgatgatgcttttatggctctcgcagagaagttaaaagcgttataaataattatgtaacttaacacaggacatcaaaaatgcttaaagaacttttaatgaccgaagctaaaactatcgatgcttccgtcgctcttgacagtattttcgaatcagttcagctttctccggaagctaaagctaacttcagcactgtattcgaagcaacagtcaaaaaacacgccgtagctctggcagaatctcatattgaaaagattgctgagaaagcagaagaaaaagttgaagaagaaaaagaaaaagctaaagaagaagctcgcgaagagctgaaagaagctgcttctaaatactttgaccatatcgctgcagaatggatggcagaaaaccagctggcggttgaccgcggtattaaagctgacctgtttgaatccatgtttgtcggtatgaaagagctgtttgttgagcacaacgttgtaattcctgaagaatcagtagacgtagtagctgagatggaagaagaacttgctgagcaaaaagcagaaactgctcgtttatttgaagaagtttctaagcgcgatgagtatatcaattatgcccaacgtgagtatgctatccaagaagcaacccgtgaactgactgatacccaaaaagagaaagtagtttctctgacagagggtatggattattctgactcgttttcaactaagctgaaagctattgttgaaatggtgcagggttctgtagagcagtctgtaacggaatctgccgatataaatactatcgacaaagaagcagacggtttaaacttcacaactgaagcagtcgaagaaactcctgcgactaaaaccccatccgttatggatgcttatgtagcccaagcggctcgtctttcttaatttaaaaggttatacaacacatgaaaaagaataaacttatcgaaaaatggcagccgctgcttgagaacgaagctctgccggaaattgttggcgctagcaaaaaagctctgatcgctaagatttttgaaaaccaggaagctgatattaatcaggctccggaataccgcgatgaaaaaatcgctgaagcatttggttctttcctgtctgaagcagaaattggcggtgaccacggttatgatgcacagaacatcgcagctggtcagacctctggtgctgtaacccagattggcccggcagttatgggtatggttcgtcgtgctatccctaacctgattgctttcgatatctgtggtgtacagccgatgtctaacccaaccggtcaggtattcgctctccgcgctgtttacggcaaagacccgctggctgctggtgctaaagaagctttccatccgatgtacgctccggatgcaatgttctctggtcagggtgcaaccgagaagttcgaagcagttaaagccggtgatgctctgactgttggtgatatcgttgttcacgatttcgcacagaccggtcgtgctcatctgcaggttgttgaagatttcactgtagacgctggcgctactgatgctgctaaactggacgctgcagtaactgccgctctggaagctggtaaagttgtagaaatcgccgaaggtatggctacttctgttgctgaactgcaagaagcatttaacggttctaaagataacccgtggaatgaaatgggcttccgtatcgataaacaaactatcgaagcgaaatctcgtcagctgaaagcacagtattccatcgaactggctcaggacctccgtgctgttcacggtatggacgctgatgctgaattgagttcaatcctggctaccgaaattatgctggaaatcaaccgtgaagttgttgactggattaactactccgctcaggttggtaaatctggtatgacccagaccgttggttctaaagctggtgtattcgacttccaagacccgattgatatccgcggtgctcgttgggcaggtgaaagctttaaagctctgctgttccagattgacaaagaatccgctgaaatcgctcgtcagaccggtcgcggtgaaggtaacttcattatcgcttcccgtaacgtagttaacgtactggcagctgttgataccaacgtatctccggcagctcagggtctgggtcgtggttataataccgacaccactaaagcagtatttgctggtgttctgggtggtcgctaccgtgtatacatcgaccagtatgctcgtcaggattacttcaccatcggttataaaggtgctaacgaaatggatgctggtatctactatgctccgtatgttgcactgaccccgctgcgtggttccgatccgaagaacttccaaccggtcatggggttcaaaacccgttacggtatcggtattaacccgttcgccgattctgctgctcaacagccgaaaggtcgtattacctctggtatgccttctatcgtcaactctgttggtaagaatgcttacttccgtcgtgtatgggttaaaggtatctaataccaataagggagccttcgggctccctttagttgttttaatggatataaataaacttataaatccacagaggaaagcgcaatggctaaaatcaacgaacttctgcgcgagtcaactacaacgagtagcaacttaattggtcgccctaatctcgttgcattaacgcgcgcaaccactaaattaatctataccgatcttgttgctacacagcgtactaaacagcctgtagcagcactgtatggtattaaatatcttaaccctaatggtgacctgacgtttaatacgggtgcaacttatgcaggtcaaatcggggcgccagaacgtgagtcaattgaagaactcactatggcaaataaagactcattcaataaagacgatatgttcaaataccagaatgtggtctttaaagtacttaaagatagcccgtttaccgatacagcagaaaccgatgaatttggaattgtatctgaagcagtagcagctaataatattcgtatgatgtcagatgctgcagtcactgaaaaattcgaaggacctgattcagacccaatcaccgaagccagttttaaaattgataaatggcagacccaggttaaatcgcgtaagcttaaaacggatttaactgtagaattagctcaagacttagaagctaacgggttcgatgctccagagcttattgatgatttacttgctactgaaatggcagaagacattaataaagacatcctgcaatcattgattacggtttcttctcggtttaaagtagctggtgtatccgataaaggtgtattagatttaactaagcaggattctgccccggaacaaggtcgtactctgtatcgtttcatttgtgaaatgaattcagcagttcaacgtaatacttcttattctggcacctacgcagtagcatctactcgttgtgcagcggtactggcagcttctggttggttaatgcagaagaacgatgggactattccagaaaacgcatatggcattctgaataacggccttccactgtattgtgatactaacagtccgattgattacgttattgttggtgttaaggcagaatttggtgggaaggaaactgtaggttcattattctatgcgccgtataccgaaggtcttgatttagacgaccctgagcatgttggtgcatttaaagttattgttgacccagctagcttgcagccttctgtagctttactggttcgttacgcgctgtcggttaacccatatactgtaggattggacgaggacgaagctcgtgtgattaatgctgcggatatggataagatggcaggaagaagtcagatgtctgttatgctcggtgttaagttacctaagctgattgcggactaatttatgggagccttcgggctccctttttgctataaactaaatatgtcaaacttcggagagtattcctcctcgagggatttaaacactttcttatcgtatagattaacacattctatcccgtgcctgcgagctatatcaacagctactctcgtccctccagatacactcccgcatcttttctcaggcgcccaatataataccttatctacaggctcagtgcattctaggcccaatacctgcatagaattccgtgcgaataaagtctgcactatcttcgagcattcatcccagtacgacgtaacttctctcgccttaatgatgcttttgattttggcttcgtttgataattcagaccatacaacaacacctgtaccaggaacatggccacaaaagccagaataaggaataatcctacaagaatttgacctatcgtatttcgccaaccacgcttcatctgaacctggagctccacctgaatatgaaaaatgcccctcttccgagaggcgttgacctattgtagtcattagactcagaactctgcgtggcgcttctcgtgaaccaataagcgccaatctcattattctacaacctcatgccatttactacgaatagtattttgaatcaaagtagtgatttctttcttaaccgcagaaggattatcagcgaataacatatcatgaccttcacgtgctgcttcgttaatgatatctttcatagtcagacccataacacgaccgaaatctttagcagttacagtaccaatatgagacagaacgttacttacgcggttccaggttacatattcggaaaagatttccagaacacgcttatcattctcggtgagttcaaccttcgctttaataggcttatcggatttagccttctcgctgaacttagagttcttacacttaatagcaacacgagtaccattattgaagaacttaggatgaaccggcttaagaacatagccttcagctacgccagtttcagaagaagcctgtgggccgaacacatgtttatttgcatgttcaaggtcagtcgtgtcaacaagctcattatagtaattgacaatagatttaaagtcattcacatactgagatagctcggcaaatgaacctcgaccaagaagtggagctaatttaagaccaagaccagtagcaaacgattctactacataatcgtcccaataaactttttcgttaccggaatccgacaggatatcaaatacgtagaaatctttctcaccataatctacgcctttctgaataccaccgccagcaaattcgccgaagatttgaacagatactaaatccatggcgttcagcatgttctgcatcttaacgaaagaatccttatacttcttcatgataatatcatgaccgaagaagctttcaccttctaaaataggaccagtacgcttagcaggaacgatttcggtaggagtaataatcacactaaagttagtgccatgaatcttctcacgagccacccactcaacagtatgcatatcaaaaccagcaccgcgaatcttctcgatgaacttaccgttgtaatgattctcgagactagaatattttgcaaacattataatttccttagaatgtgattttcataaagtcagtatcaccattacgctgggcactggtataatttgtaacaaatccttcatcatgcaaataattaagaacacttgtaatatgtttcttaactaaactgctaggatacataattaactcacgttgacccgctaaagcggttttctcaatctgggttaatacttcttcttttgctgcactcaattcttctgtagcaatattgatggctgtattagccattctatcggcaaggttcataatttttctctcaataaataatataaaaccaggagtctatcttggtcaaaatggtatcagaggatttcccctgagcccattataccacatcgatttttaaagcaattaatagccgctcggcacgaagcgatacatgatatatccgcttttagttagcatgatttcaaattgacttttgcttccaacctcaagtactaatggaatatctttatccatcagcatccaatcaatttttccataccgttcattaatcaaatccgttattttacgtgcaccacttttatagtagtaagaactctgaacagccatcattttactaacaaatttagatgcaaacaaccagacatttaccccattagcagctggcgtaaatttcttagaaagcatttcttcaaatcgttctactacaattgggtctactttaggcattttcataataacctcatgtgtttaacaagtttcttatgacgagattttataccaacgtttgttaagcgtttccgataaacgactttttctttttgcttaaaccgttcgtgtgctttctcaactgagacccacaatttagcagcttccgctggagtgatatctaacgcccttgcaatttcttgaaaatcctttccgctttcatgcatcaagtgagcttgtaatgctttcataataacctcatctatgtgacgaggacataataaaccaatccgtgaatagcaaaaagggagcccgaaggctcccgaatattacggatagataatacctgcttccagcgcagtacgatgaacaatgtatccatttctagattcttgtacatcgacttctggataatcatctagcattttagctagagtataccgatgcaggtaataatcgctgtcagggtcgtcgagtttccaatctttgccctcaacagtcattcgttggatttcatccattacccaccatccacaccagatataggctgttccacggaacggtagaggatgaatatacggaagttctccgtctggctccggggctacccttttagtaatggttacatcgccagttttagtgactgtaatcggggtgtaatcttctgcggaaacctcaacagaaacctcaatcacttgagaccctatatcagacgtgtcaatcactaacgtgcttgttgagccttctacaggagaaccgtctttggtccaagaataaaccccagttgcaccttctggagcaccgataacgttggctttaaaagatgcttcagacccttgttcggtcgtaatagactcaggagtcaaagtaacagaaacaccgctcatggtctttttagtaaaagcgacagcaatacctttagttgcagttccattattatagtctggggcagaaaccgttacttcacaattcagtgtgtagctagtttccgttgactcggttaaggtaattgttttacccgtttggccagaaataacagaagaaccacgtttccaaacataagcaatgcttgctcctgaaggggcaccagtaacatcagctgtgactacttgggattgaccaatttctttagaaacagaagtcgggctcaaagttaaagtaattgcaggcatagttttgttattaacggtaagagttgtttctgcttcagccgtttcaggatcgccttcagccggagtaacagtagcaactactttaacggtcttactacctgcaggtcctgcagcaacataattcatagctgcggtaacagaagattgttttacaccatttactgtccatacaaacgtttctgtgccttcagctgcggctccagaagttgttgcagtaaaattggttgttgctccaatgactgccgaagcagccaaaggagcaatagatacgctataagccatagctgttccttattttaaagttacaaatgaagaattacgtgtttcacgaatcataacagacccgtttcttttgatgtaatagattaaactaaacagtgtctggtgtgctgatgggtgttcaaacgacgttggccgagatttccaatctgggttatctttaatccattggtaaatccaccatggaagagtaatatatcctgggttcttacctagcaattgcatatttggactaaagttttcaggaagctcaatgatttcgtctgttttaataattttaactactttgtccattgctttgaagaattcttcagggtccgtagtactaattggaatgtttgtaagttttccttcatcatctatatgaataacgctgtctccaataggagcttcagcataaaatcctttatcattgatagaaggtgtttttacttcaaatccagggtcatttaccttaggggtttctttatagaaacctgggtcaatatcatgaattttaataccaacattaactggagcgtcaaacagtagttttgcttcatcagacgcttcatcattgaaaagtgatttt

(The sequence listing continues in the following parts.)
